United States Patent Application Publication US 2018/0305689 A1 - sequence listing, part 41

SEQ ID NO: 585464 - DNA, 4001 bp, Homo sapiens
tcttttaaagttccctaggtgattccgatgtgtagtcaagttttagaactactgatttagcccgtggtttgaaccttcctgatagtactcattgtgccctgccatgaattttttttttttttttaagagaggagtcttgctgtgtcactcagttggaatgcagtggcatgattatagctcactgcagccttgaatgcctgggctcaagcaatcctcccaccacagcctcttgagtagctgggactacaggcgagtgccaccacacccagctgtcatctaccatcttctaccctatgaaccctccaagatcaggaaatgtgtccgtttcttctttgtcagcctcacaaactttttttttaagttcaactatccctgtcattactaactattcccccatgatccctagcctacacttttctgtggatgaaaatgtaatgtattcgagaattttaacaatttcttagttttcccattcacattcactgataatttattttgatcctcataatttattgagcacagcagggaccggggtcctttccccaccttagagagattattttcactgctaaagatcataagcctagtgagagactgggagggagatggacctagctctcctgacacaggtcccaagcccttacctccacggtgtctaccctccctccaggacttcctccgtgtgccagctccagcaaaggatctgattcagctcgcccccaaaaaagacttttaatagttcaataacaataatgaatatgcaaggtttgttctaaggcatttagaaatggtttcagggagtcatgaagccagtcctctcttgggctaggggaggccgagatggtcttgagctccaggggacttgtttcttagtgcccaggcctgggcgcccctcccccaccaagcctcccaggtcttctgtccaaagccctccccctccaccccacctccaaccccgtctgctctaccccatcaactacgttttctccctcagcacttgccttataccccatgcactcacgagcacagaggcgacttccctctctcagactttaggcgccactgcagggtccggaaaagaaagagaaacggcccagcgcggtcgcttacataacccagggcggggctccgctccgcccccgaaagtttttgcgacggagttttccctcttgttgcccaggctgaagtgcaatggcgcgatctcggctcaccgcaacctccgcctccaaggtttaagcgattctcctgcctcagcctcccgactagctgggattacaggcattcaccaccaagcccgtctaattttatatttttagtagagacgggatttccccatgttggtcaggttggtctcgagctcccgacctcaggtgatcgcccgcctcgacctcccaaagtgctgggattacaggcgtgaaccaccgtgcccggccttggccgcatgtgttttgaattttgctgcccggaattcactgcgaggactgggatcacccgtcaccccgccctggtctacggaaaatgaaatgtgtttactgatatagaaacggaataacggcgctgtgggctggggagggccgagctgccttcaggcttctggtctccagctgcagggcactcacacctgcccgttatgaaaatgcagacccgcagggcaggaattccgagtccgggctggagcgtgatctggaatccggctctcttgaaacagcaccgcggaggattcggatccgggtgagtaggaaactgcgcctcagcccctcccacgggccgcccacgtattccaggatccgaaaacgcttcctgctgctccgtcaccccaggaaggcagcgtccgcctctgggcggttctgatggaaaccggctgcgccgcccgcaggaaaacccacaactaaggggccaggaaaaagcctcttagggtcccgccacttcagtgaggatcctaatttacacccttagtttggcctccatgaaagactggagtgaccttcactgaaatgatacaaggggcccagggagctgcggcgctcagaatgcggtgacagcgccgcctcgcgtcccttccctgacctgctcccggcggacgcggagaagtttgttggcctggaggctggaatataccggggatcaaatgcagagaatggagaaaagagggaaggatggggggacgtgttgaagaaatgagggaagagataggaagaaaaggggagagaaaaagtaaaggagagtttttttgttttttgttttttttttttgagacggagtcttgctctgtcgcccaggctggagtgcagtggcgcgatcttggctcactgcaagctccgcctcccgggttcagggcattctgctgcctcagcctctggagtagctgggactacaggctcctgccaccacgcccgactaattttttgtatttttagtagagacggggtttcactgtgttagccaggatggtctcgatctcctgacctcgtgatctgcctgccttggcctctcaaagtgctgggattacaggcgtgagccaccgcacccggccggagagagaaaatttaaaagacgtagtttcattatttcttttatttttgccctttatctagttttacttatgaacatttttaccacaaatttctctctctctaaatctgtaaatatgctgctattattgttatttcagagcctgtgagggtaagttgcagacagcatgaccctctacctccagatgtgtcagggtgtgtctcctgggcacaagaacagggtttttgttttgttttgtttcacataagcaaagtacaagtctcaaagaggataatatttttaaatcatcttattgggacatactttgcatgcaataaactgcatctatttaaaatgttcaacttgttgaattttagctgttgtacacacccacatctccactaccacagtgaagataaagaagattttaatcgtctcccaaagaacagctacacgataaaattctatgttgtcattaaaaagagtaagagcaattttaagtattgctatgaaaagatgtgcccagcatacttttaaccttttttaaaaggttaaggaggctgggcacagtggctcatacctgtaatcccagaactttgggaggctatggcaggcagataacctgaggtcagaagttcaagatcagcctggccaacatggtgaaaccctgtctctactgaaaatgcaaaaattagccgggcgtggtggtgggtgcctgtagttccagctgtttgggaggctgaggcaggagaatcgcttgaatctgggaggtagaggttagagtgagccgagatcatgccactgcattccagcctgggcgaaaatgccactaatatcacttacataatattaatatatatttgaagtaggggaaaacctggaagattcctcaccaaagttttgacagtgactccagagactgggataactttgtgactttcatttcctcttaaatgttgtgccagggtctgaccggcagacccaggctgcacgatggatgaataatgtactcagacaccgatattcagtgaaagagtgcaccagagggccaggccactcacagaaagggttgtggcagctgcgtgccctgactatctggccctgtgggcctttattcagcacagatttaatgacaaaggctttgagtcaacacacctgtgggtaattaatctggtcgcagtcccccggagagagcagtcctacaaatgatcaaaggtaaacatgctctttagataaactctcttacatgtctttgtacttactcgaagctattaactcaaggtaaggggattaggctgctttcagctataaccctatcctgaggcttttgcaaaactttccaccttccaagaaggtttgtgtctatttcctataactttatctttataattattcccaccacctgaccaatcccctacaatgttggaattttatcttttagtgtaaacttggatttgggtggattgcagtggttcatgactataatccca

SEQ ID NO: 585465 - DNA, 4001 bp, Homo sapiens
cgcttgtccagcttggtccacagtgacttggcgctccagtagttgagctggtccttgatcttgtggtactggggcagccccccaccgggttccagccccagggccccacacagctcctggaagctgctcagcacgtcctggcacagctgggcctgcaggaagctctcaaagtgggcatgcgctgggttggtggaggtaggtgaagccatggaggcctcctggggagggcagcagctgggcagagatgagtggctggagaggtggaaaaagaaggggaagaggctggagaacagaagaaataaaaaggaaggggaggcgaagagagcaggctggtgtccccagggagctcgggattcaccagtgattggctctgctcctcccagcccattcccctgccagcatctgctccagagacagctgctatccagtccactccaagtgaaatttgccaaatttggaagtgaaaaacattagtcttgggcacagagggcacatgggacaccaggggagcctccagttcagcctccctgtccagggatctccaagccctggggtaggaattcttagcctgccttccttaggccttggaatcagggtgtgcggggatttcttagatgtggagaggacagagctgcctttgcatgcaacacagggacagatctgatacccacaaccccagctgctgagcatacatcctgccccatctccctccaagcgtccctgtgccggcgccccttgatggcctcagtgccacgctgtgtctgagaagtgtctcatggcaagggcaaagttttcctcagcactcgtgcttgcctcctgacagagaaacagcctctgtccgcgtaggttccacttccctccaccaaactgcctcaacaaacggcgggaggatgttgcgactgactggggaacggaggcctgggtctatttctgacgcactgtggtcaaaacacttcctctgtgaatgtgccctactccagggggccgtgggtagggctgggggtcgaccgcagccgggtgcgcccctcccaggttcccccctccctgatcgacccctaccccgccccgccccctgtgcgcccgggcgcgctctcccaggaatctccggagacaaagcctcgctttgtcgccccctcccacgccacctgaagggtgcccgagggggtttctcacgcggggcccagaaggtatcagagggtatggaggaggcgggtgtccacggcagcgttagggagggtgaatggcagcagtgggggcaggtccctgaggctcaggcccctccaccatccagctgcccctccgttcccagcccgccgcgccgagacaggagatgaaagcctcccgctgcgggtggcccggacgagggcagacggaatctcatgacggaagggcaaagatctttcttgggggtggagggtggaaggaggaagacctcggcgaaaggggagaaaggagcgacccagcctggaaacgccaggacaaaggctgtgagaggggtggagcggtctgaaaggatggagagggagctggaccgcgggcggcagcggtgggggtccccgacactggacggcaaagtccggacgcggcgtgagcagggctgggctgagggaagacctgcctgacctgccaggcgtggttcccgagcgaccgcagctgcgtttccccggaagcgcaccccacctcaccccacccggccgcggggctcgcagccggctccgctggacgacttaccggcggctccgaagccgggaggggccgcttcctgttgggctggcaaccaggtctgagcgggtgggagggcgggggcgggggcgggggcggaaacgccgagatcgggcggggatgctgggatgcggggcggcccggggcgtgcgcctggagtcgcgcggagtgtgggcttccgcgaggggcgcggggcgccgcccgggctttattcgcgactcattagcatctcattacttctggatccctctaccgcctccagcggggacagtcttgggcccgcccatgcctgcagggtggcgcccgagggcgtggcgctgcggacaccccgttccgctctggggcctctgggtgggtctggcctgttgggggctgaggagctcgagggtcagggcgcccagtgctggaccgcgcaccctcggcctgggctccttgccggtgcttgcgcgtgcaaggctagctctttccccgccgcaaggcgaggaccacccgcccccgccgcggtcccaggtccgctggcagcctcccagcgccgggccgagagggcgctcaggctcctcaagaggtttggaaaagccggcgggtccgagggtggcgccggaacgtctgcgctctcctccggtctcccacctggagatccacggcccgggcgccccaggatggatccaagcgcagagtgcgcctcctgtgacagaggtcgacccctaagcccgggccgagggcaaagggcgcggattaaagtcctggaaactcagcaatctgcagcttccaaatggatatgagaagtgagagggaaggggatggcggggcgggttagaccaccactaagagatggggaatgggaggggtgtgtggaagagagaccaagtcttcaaagaatgccttagagtgaggacccacgggactgtctgctgaaaagggctggagaggcctttgggatcagcttcgtcgtattcccgataaggaacagcgcctaaagtgaagggacgcgtccagtcttttagctagttaatattaaaaaacatcgtctcatttattgaccgtcatcctatgagtattacctcaacatcagtgcttgcaacagtcccattttaccaaaaaggaaactgagtcacagatgttctgtgatctgcacacagcaagtggcagagctgtttgggggcccaggtctgtcggctccaccaccccagggttgacccaaaatgacgcatgaaaggctggcattataagatgctgtttcttgtttagacgaagtgatactgttacactggaagcactaataaaacccaggtataaataagagggttgctgtccttgagatccagagaccataaagagctgggagggaatagggcctctccctttattctcattttgcatttcatctggaaaatatctgagacccagtaagacctgaacactcactgttcccagctcgagctgagaagcaggcagtgggacgaaagcaaggggaaatgcctgttctctgccaggagaggcgagggaattcagccaggtcacgctcagaaaactagggcagcctctcagttgggcccatcctagcttttgagtgtgacacgtcatttggcttgaaatgaatttgccgaatatcagacacacccatatttaaatacatggtgtaaaaacgttctaaagtccactacagctgggttaccctgggctccaccaccccagggttgattcaaaatgatgcgtgaaaggctggcattatacgaagctatgtcttgtttagaggaagtgaactgtcacgctggaaacactaataaaaccgaggaataaagaggagggttgctgtccttgagatccagagaccataagagatccagagaccataagagatcccgagacagtccctggcttctagaataatctcatttccctttcactagcagatggtacacaactagccgctccacttactacaactacagcggctacaactagccgctccactttgcaaaggcttagtggggtctggcttgactcaatgccttttgccaagcagggtcatgtggctctatgaatgacacatcataaaatttgtctttaaagaagatcagagaacaataatgagttcatcagtgctaaaaactgctgacttgaagtttcaacttatgctaattaaatacttaacatgggggcataaagcagcagggaatacattgttctggaatccagaaggtctggttggattccagctttgcttcacgctagcctagtgtgaccttggatgtcaccaaccacacttcgtctgccca

SEQ ID NO: 585466 - DNA, 4001 bp, Homo sapiens
tattttctgaataatcacctagctatccagagtgagtaaacactcacttacttaaatatttaatttcctggagaaaatgtggattggtgggctttgaaaagttggtaaaaactttgtgttttaagaataaaattaaacagtttaaacgagaacctgaaataatacttagggcttaacagtgtttgtaaaaaattgttatctttgctctagtcaggcctgatttaacattagtttggttgatacatataagatatatatcattttggaagttttgtgaattacatataataaaatatagcttagcaaatatgcaaccaaaatgtttttatcttctctcaaacctgaagaattctctattactctaacctccaaataacttatttgatttagggagaaatcaaggatgtctaaaacaaaacaattgatggaaaggctctattaattttagagtagattaccccctactccccatcagcattgttaatttagatatactagtgcccaccttcttttctcaaaaatcccctaccagcttacatgaaagtggtaaaagaattcaataagcttagcttgaaaacctaacccaaacataatttaatcttttgatgatgatttaaaaatcatacaattacagacacatgctggctacaaagtctctgaggctcaaagttttaagattagatgaagattagctgggtgtggtggtacatccctgtagtcccagctactagggaggctaaggtgggagggttgcttgagcccaggaattcgaggttacagtgagcaatgattgtgccactacactctggcctgggtgatacagtgagaccctgtctctaaaaaaggaaagattaggagaagatattcactttgtgggatttaactagtctgcaataaaaatgaattataagcttccatctccagaaagttatcagacacaacacgtagatcaacattttcaggagatcagttagaattcagtagagtatatataagacttaaattacactgaataaagttttatgttccagaatagtgaagaaagctttaccttcatgaaaatcaaatctcttttctgacaaaaattcagaatttagggtgaatgtcttgatccaattttgtattttaaacttaattaaaattttgatagccttctgttgaaaaatatgtaaatttatgtttctcagaaaagacgaattcagaattttaagaaatcctatgcttttggctatcttgttacatgaattttgagttaaaatactgagtttatgagtttgaatctttctgaagtgttaacacaataagcccactgtactgcataaagataaaacgttgagggttactttgtcttaggggactggaaattattaaaagggcaaattccccatacattgtgatctgtcatatttagccctgacttgtcttgtggtaacaactgtgttgcctaagaaaaataagaaaatagaacaaaccattctgcccagttcaaccaaaatgactccctttgtcctagaaaacaaaaaaacataactggggaggttggcaagaccataacctatggctgtgaacatttaaaccttacagaaaaactgagatcaatgcccccaaagaaaaactacccgagtctttatgagacattgcagattaaaatgaaaaccattcaataatattgaaatgctcaatacaaatcagtaccttagacaagacatacacacatcttgctacctggatggagggcattataaacatcagttagccatcacagctctcacagaagcatctgcaagtcaatggtgtggagagcctgatttcaagcgttcaaaatccagtcagagctggcttataagaagagcccaatcaagcagtcaaacgtgtttacaggtcagctctgctcctggccaagtggcgttggctggggcacgtggtgagtgggtggtggcggaccaggctcctgtgtcagctgcaggtgctgagctggatctgaagtacttgtagctaaatggagctcctctgtttgctcttgatgggcatgaagatgttccagtgtttccttggacagagtgatcacgtgcactggctctgtttgtgagggccccatctggctttcaatcatattgaggctctgaatgtgttctgtttgctcctgttgagctgaaagaattaaattctgcagttgctctggctgctgcgtgagcagggtaagattagcagcctggtctgcagtcatgttttgggaactctctgcagtcacaatgctgattccctggctaggaccgggcatgaaattgatgttatgtacagaatcggttacgagaagctgaatttcctgctctcccgaggtagagagttgatatggctgtagctgaagaatattcctgacctcttctgtattactactgccagaaatgctgctggcatctgaagcatgcttctccttgctatgaattttcaagtgagccttcaagttgtctaagcgagcaaactgtaagttacactcagggcaggagaaaggcttcttgccagtgtgtagaatgcagtgtctccttttggcactggagtcagagaaggatttgccacaaatgccacaggagtatggcttttctcctctgtaagaaaataaacattttatttttaaaatggaaatacctacttactacttcctgattatttagggggaagcaatcaagagtagtggaaaattaactagactgcaagtcataagtcatgggttcacctactaattcaaggacttgaagcaagtctcgcttccatgggcagtttttaatctgaaaatagggtgtgggtggtgcctgaggaagggtggcagatggggcacggctatatatgataaaattttatgattccacagtatgtatttcagataagaaaagagagtaaatatttatacaataaacatatagttctcttttgttttgtcttagttttcagagccaatttttagactctaatggcccaataagtatctatgattaatgtcaatttaaaaaatttaagcatcctctaattatttgtgatgctgtcagaagaactcctaagtccaacctggggataactgtgtaaacaaaaacatttattcagaaaacatcaaatttaatacttatttttgattgaagatttaagctttggaccaatccgtagccccaatcaaaatttaataaatgaaatcagtaatgtaaacttttactggccagaatcagcattcctttttacctaggtgaggaatttcattattgaaaagataaaacaaaataggccaggtgtggtggctcacacctgtaatcccaacactttgggaggcccaggcaggcggatcacttgaggtcaggagtctgagaccagcctggtcaacatggtgaaatcccgtctctaccaaaaaaatacaaaaactagctgggtgtggtatcccagttactcaggaggccacggtgggagaatcgcctgaactcccacctgcactccactcacaccactgcactccagcctgggcgacagtgagaccctgtctcaaaacaaacaaacaaaacaaagccaaagtaataaactgcacacaaaattctgcaaagtaacaactgggagaaaactatataggtaacacatgtcacctcactgaacagcagaactgaatgaggcctccatgcgagaaaaatatctgcaaaactttaccgatggattctgatgtgggtctgaagagaactctttgctgtgaaagatttgccacagatttcacaagtaaatggcttctcacctaaaaaaaacaaaaacaaaaacaaaaaacccaaaacaaaaaaacatttaacaatatacattcagaataagacaaaattaaaaaaacacttcggtttcacaatataaacagaacaaaggcaatcccctccgtaagcgtaaacgaatgatgcactcaccaaatatctactctgtaactaacctaagcactgtgtgccgagtgccaagagcatacacagaaatcgtaaggcatggtt

SEQ ID NO: 585467 - DNA, 4001 bp, Homo sapiens
actgcctaagcagtctccctcttccaggttactgtcacctctgccttggaacccatcagaccacagcatatcctcaaaatcttcccagttaggctggtctgagtgcagtggtgtttacaactaattgatcacaaccagttatagatgtttttgtttcatcttcactcccactgtttcacttgactagcctttaaaaaaaaaaaaaaaggaaaaagggtccgggcacggtggctcacgcctgtaatcccagcactttgggaggtcgaggtgggcagatcacgaggtcaggagatcgagagcatcctgctaacacagtgaaaccccgtctctactaaaaatacaaaaaacttagctgggcgtggtggcgggtacctgtagtcccagctgctcagaaggctgaggcaggagaatggggtcaacccgggaggcggagcttgcagtgagctgagattgcgccactgcactccagcctgggcaacagagcaaggctccgcctcaaaaaaaaaaaaaaaaaagaaaaaaaggaagaaaatcttcccaagtagatagtggtgacggtggcacaaccttgtgattatgctagaagccactgatctgtacactttaaaacgataaattatgtgtggcatgtgaattctcaattctcaataataagaattctgtctggaaagcctctactaagagaattggcttgtccccagcgcacattcttagtcattgggacatctaggcagtggtcttcaaacctagccactgcgtagaaccacctggagagtttttaatatccatgttcccaggccacagccacaaccagttaaatcagtaaacctaggttggacctaaaccttagtatcttttaaagttccctacgtgattccgatgtgtagtcaagttttagaactactgatctagcccatggtttgaaccttcctgatggtaccgactgtgccctgtcttgaatcttatttttttcatttactttattttatttttttaagagaggagtcttgctgtgtcactcagttggaatgcagtggtgtgattatagctcactgcagcctcaaatgcctgggctcaagcaatcctcccaccacagcctcttgagtagctgggactacaggcgagtgccacacacccagccatcacctaccatcttctaccctcctcccccattagactatgaaccctccaggatcaggaactgtgtccatttcttttttgttggcctcacaacctttttttttaagttcaactatccctgtcattactaactattcccctatcatccctagcctacacttttctgtggatgaaaatgtaatgtattcgagaattttaacaatttcttagtcttcccatacacattcactgataatttattttgatcctcataatttattaagcacagcagggactggggtcctgtccccaccttagagagattattttcactgctaaagatcataagcatagtttgagacagagaggcagatggacccagctctcctgacacaggtcccaagcccttccctccacggtgtctaccctccctccaggacttcctccgtgtgccagctccagcaaagggtctcattcagctcgcctccaaaaaagacttttaatagttcaataataataatgaatatttaaggtttgttctaaggcatttagaagcggtttcagggagacatgaagccagtcctcccctgggctaggggaggccaagaaggtcttgagctccaggggagttgcttctcagcgccgaggcctgggtcccctcccccaccaagcctcccaggtcttctgttcaaagccctccccctccaccccacctccagccccctctgctctgccccatcaactatgttttctccctcagcacttgccttagatccctggactcacgagcacagaggcgacttcctcctcgcagactttaggcgccactgcagggtccggaaaagaaagagaaacggcccagcgcggtcgctcacaaaattcagggcggggctgccctcggcgcccgaaagctttttgttttttgtttttttttgaaacggagtttcgctcttgttgcccaggctggagtgcagtggcgcgatctcggctcacagcaacctccgcctcccgggttcaagtgagtctcctgcctcagcctcccgactagctgggattacaggcatgcgccacccccggctaattttgtatttttagtagaggcggggtttctctatgttggtcaggctggtctggaaatcccgacctcaggtgatccgcccgcctcggcctcccaaagtgctggaattacaggcttgagccaccgcgcacggctttgcccgcaagcgttttgaattttgtggcccggaattcactgcgaggactgggatcacccatcacccttccctggtctacggaaaatgaaacgtgtttactgatacagaaacggaataacggcactttgggctggggagggccgagctgcctcaggcttctggtctccagctgcgcggcactcacacctgccgctgtgaaaatgcagacccgcggggcaggaattccgagtccaggctggagcgcgatctggaatctgactcgctggaaacagcaccgcggtggattcggacctgggtgagtagggaactgcgcctcagcccctcccgcaggccgcccacagattccggggtccgaaaacacttcacccctggaaggcagcgcccgcctctgggcggttctgatggaaacgggctccaccgcccgcaggaaaacccacaactaaggggccaggaaaaagcctctcagggtcccgccgcttcagtgaggatcctaatttacaccccgagtttggccccgtcaaagacgggagggaccactgaaatgatacaagaccagcgcggcccagggcgctggggcgcatagaatgctgtgacagcgccgcctcgcgtcccttttctgacctgccccaggcggacgcggtgaagtgtgttggcctggaggctggaatacaccggggatcaagtgcagagagtggtgaaaggagggaaggatagggggacgtgttaagaaaggagggaagagataggaagaaaaggggagagaaaaaataaaggagagataaaatttaaaagacgtagttttattatttatttttgccctttatctagttttacttatgaacatttttactatagctttctctctttctgaatctgtaaatatactgctattattgttatttcagagcctgtgagggtaagttgcagacagcatgaccctctacctccagatgtgtcagggtgtgtctcctgggcacaagaacagggtttttgttttgttttgtttcacataagcaaagtacaaatctcaaagacgataatatttttaaatcatcatattgggacatactttgcatgcaataaactgcatctatttaaagtgttcaacttgttgaattttagctgttgtacacacccacatctccactaccacagtgaagataaagaacatttcaattgtctcccaaagaagagttatattataaaattctatacagtcattaaaaagagtaagattgcttttaagtattgctatgaaaagaagtgcccagcatacttttaaccttttttaaaaggttaaggaggctgggcccagtggctcacgcctgtaatcccagaactttggaaggccaaggtgggcagatcacctgaggtcaggagttggagatcagcctggtcaatatggtgaaaccctgtctccactgaaaatacaaaaattagccaggcatggtggccggcgcctgtagtcccagctactcgggaggctgaggcaggaggattgcttgaacccgggaggtggaggttgcagtgagctgagatcgtgccactgcactccagcctgggtgaaaatgccgctaatattacttacataatattaatatatattttaagtaggggaaaacctggaagattcctcaccaaagttttgacagtgacttcagagactgg

SEQ ID NO: 585468 - DNA, 4001 bp, Homo sapiens
gttggggaggggagatgggcagagcaagaactggagggcggcatgagcatggggcaggagtgactgtgggagaacttggggtagggtgaggacaggaggggagggtgctctgggggagggtggggcttgggaaagattctcagcactgtcatatgctccagcactcccactttcccactgaaagatgagaacttgctgagggccccaggcagctgggcaagagataggagcagcacaaggtcccaaggtggagaggggcggagggaccagggagggatggtccagcacctgtgggctggagggtggggtcctcaagagggtgaggctgaggatgaaggagtggggaaggggccacaatgaggcagggcccagagcaggcacctgcactggaggggagggggcatctgcgctgccctgcgccctgcctaaggcccaactgccattagcatcagggctctccttgggggtctggaggggagtgggatggagggaagacccccccggacaaaaggcagcaccagaaagttagagtcagggacatttgggaatggggaggcataggggcagcacggagtgaaggctgcttgcaggaaaggcccataaaggaggcaggagggaccttcagtggcgggggcgggggatgaaggcagaggacaccctagaaatggatcagagaacagcacacaggaaggggtagcagggagctgggagagcaacaggacccagggcgccgtaagatgggcagggaggaggtgagagggaatctggtgtccttagatcattggtcattagtaggggtgggatgcgagagaggagaggacccccggagccggaggcgaggggagaatgagctggggatgacagaagtcgcaggaagaatcctctgcccggagcctgcagactccaacccctcagcttgagagtcaggaccccccacagtccccacagcagcaagaagcaccacctccgggtcccaagaaaggagggccccaactccaggagctgcggcccaggagctgagaacacatcggctccgggagaggacaggacttcagggacctgagatccgcccccagcaccgggggaagtggctgcctcagcggccgcgctggaacggccttccaatgccattcacaggagcagcccgggaacccaggggcctcagaaggactggtttgtccgaaaagtgagaggagacggaggagaggcgaggagagcaagtgcaggagagaccagaaaatgcgggtgatgcgcgatcccgaggaggactgaaaggagacaggaggtcgggcgcggtggctcacgcctgtaatcccagcactttgggaggccgaggcgggcggatcacgaggtcaggagatcgagaccatcctgactaacacggtgaaaccccatctctactaaaaacacaaaaaattagccgggcgtggtggcgggcgcctgtagtcccagctactagggaggctgaggcaggagaatggcgtgaacccgggaggcggcgcttgcagtgagccaagatcgcgccactgcactacagcctaggcgacagagactccgtctcagaaagaaaaaaaaaaaaaaaaaaaaaaaaaaaaaaaaaaaaagagacgggagatgggaaagcagggctgaggtgtggcgggaacaggcggcgtccagctccctgcactccagacagcacacctgagccccgccctgaccgcacagcgctcgcggcaacccacccggacccccggaaacgccccgccgctcccgctccgccggggaccgccaggaaccccactcaccagcggcggctgccgggggtgcaaaagggaaggcgacggccagaaacagcaggacccggcccagccccatggcccctacgtcgccaccttctcagctgctcagcagtggccaactgaatgaaacccgtgagaagaccccgtcgaaatttagtcacctgcgccccgctcagcgaccgcttatccagtgaaaactgaggcccggaacttagggccaatcatgagtggagagggcggggccacgttcagaagagaaaattctagcggcctggagacctggggaaatttagaaggcgggacctggcggccagaaaagggggagcgtgcgcgagcgcagccaaaatcaaggaccagccccgagtagctgagagtacagctccaaacttatgagcacgacctggaccctgtcgccctccctgcatcgcgaccaccccatccccgcattcccacccccaaggagcgcgggcttcaccaagcccctttcgccggtcctcccatcaggccggctctcactggcttgttccttccgggacagacaacgcgtggtttttctcccaatacactccctcaaccgcgcacagcgttactgcaatgagaccagtgaccagatttgcagacctgtttccagatctcagccgcctctgcctttcagaagcacttgccccagtagaaacgctcagatcacaaattctcttagacgtttcagctatataatctccttctcctcccttcgactcaaagccaggtcccccctttcacccccttatatcctctaagtgtctgaggtctcccagggccccctctctattcagttcctgggtaatcacagggccaacgaggcggctccccatggttcattacaacaccaagctctctccagactcccttttccagcctgttttaggacatctgtacctctgggaccatagtccccttcaatatgacagatctacaaggactctctacacgtctcccaccacatcatcctctcttcctcctcagtttctcttaagaacttcaccatccttggtcccttctgatttcctctttctccttcatctccgggagtcaaagtcagctccttcaacgctatttcaatcccacagccatagtcttagtctaggctttcccctcccttcagtctggattactgcacaggcttcctaaacactgtgcctgcctcagttacaaccagagtgctccaagccacccacagcgccccatctgctgaatgtcacacatggtggatgcttctactctaccatggaaaccatagctcccacaatctattgtctggcaccacccccatttctctggtgacatttccccagggttgcagtaaacgtgggctctgggatctcctcaccctatcccaccaggatgccactgcctaagcagtctccctcttccaggttactgtcacctctgccttggaacccatcagaccacagcatatcctcaaaatcttcccagttaggctggtctgagtgcagtggtgtttacaactaattgatcacaaccagttatagatgtttttgtttcatcttcactcccactgtttcacttgactagcctttaaaaaaaaaaaaaaaggaaaaagggtccgggcacggtggctcacgcctgtaatcccagcactttgggaggtcgaggtgggcagatcacgaggtcaggagatcgagagcatcctgctaacacagtgaaaccccgtctctactaaaaatacaaaaaacttagctgggcgtggtggcgggtacctgtagtcccagctgctcagaaggctgaggcaggagaatggggtcaacccgggaggcggagcttgcagtgagctgagattgcgccactgcactccagcctgggcaacagagcaaggctccgcctcaaaaaaaaaaaaaaaaaagaaaaaaaggaagaaaatcttcccaagtagatagtggtgacggtggcacaaccttgtgattatgctagaagccactgatctgtacactttaaaacgataaattatgtgtggcatgtgaattctcaattctcaataataagaattctgtctggaaagcctctactaagagaattggcttgtccccagcgcacattcttagtcattgggacatctaggcagtggtcttcaaacctagccactgcgtagaaccacctggagagtttttaatatccatgttcccaggccacagccacaaccagttaaatcagtaaacctag

SEQ ID NO: 585469 - DNA, 4001 bp, Homo sapiens
ccccagacactgggctttcatgtgttcctgccacccctagaacagcctctcttctcaatgcaggtgaatgttcgtatgcctctgatgtgccgccatatttccccgcaatctttggaagtcaatctgaggctagacctaggcctctgctacagagtaatgttcatgagttttgtgacagctacttcctctaaggaaaggtttttgctcacttctagatttatagctgtattcaagatagagtcaggcatgcacaatgtctgactttccagaaagtgaaatgctaatacatcgaatcacttcgaataagaagagtccatcttcactttgtgcacttgccccatgtcctctgtttactcgcaaaacttcctgtaaaagactgccaggaagctcagggtcaaatttcacactaattcatagcaaccaattattcatgtatttagttactccctatctggtttcataaaggttttatgaccactaagcctttatgcttaccatatctgggtttcctttttacttttaaatgcattttaacttttttctttccatattagtaaactttgggcatgtgctttttaagtgaatcagaccaaaaacagtttaaaaataggcttaggctagggacttcacatacattatagtttttattcttcacaaaagccttcagattagttattactgttccctatcttacacatgaattaactgagactcagaaagattaaacaaaaccatggtcttatatttggtagttgtgggcaagaattttcaccaagccctttctgattcaaaatccctggttagctctacaaggacacatggcctttccaaatagtcagaaaggaaaatactctgtggccattacatgtctggacaatcacctagggcagaggtacaaagtgggtactgaaaatgatgacctgattcctttaagaaaaggttgtgtattttattaaatatattactttaagaccttgaaattctaatacacttcaagagttttcaacccagtatggttcttttttccatttttctagttttaatatcttgaatagtccataaacctcaacttcatacatctagaacaatgtattcccatgaatttggtcttattatgggctatattatcttactttttgttatttatgctgatattaacattagttatgacctgttccaatgttaactctataaccacagtaaatttacaaacataattagtgacctatgctcatcagatgagccatggacagcacatttaactcaaggttatagtctattttgtatttgagcaaatgtaagtcaccatattaatcattgacatttaattgcttagtatcaaggcaaaattacttgtataacttctatggcaaaaaactttatccttataccagaagttcattaaacttaataaaacattaatatattctataatacttatttttcttggcatatattcctggtatctctgagaaaaaatggatttgaacactcgctaagcttcgcatacgtaaataaaacaatcttccagtgctgaggcaatcacaatgagaggtcaaaataaatggattccagtttttaaaatgacgataaaccacatcatttaactaaatcaaatttgccctcatttgtgtaatggcattttatatataactttattacattattttcaggaaagcccatggaactcattaattttaaagttattgaccagcaaaacatggaaacagaggccggctagcacaacttttccagtctatgacagttgctctactaccctgtcaatttcattataaatctgtgtgtgctaaatctcatgtcttaccgtcagtttctcctctaaattcttgtttaataagcttcttttttcacgcttttcaagttccatattgaaagagaatgagaaagagagaaagactgagagacacagaggttcagattctgtctagaaaatgattcgacgtgcttacatgttagatattgcaggacattccaagttgtgagagcctaggacactatcagagagccctagcgataatttctggttagctagtgtttccatttatagatgttcaaaccctataaacagagcactgaagagaagtcaggcagctggccttagataatgataaatgtccctagatataaaagcaaactcttcagcagaatgttccaacaggttaggctccctgaaccaatacagatgtatgtgacaaaaatccacgatcaaagaattcattaatagctgttgcaacagaataaaatatactctagaatacagacctaataaatcagttaaaaagaacaaatgtgatagtcagatagcaaataaaatcagcagatctagcgcttccaaattccaatttgcaacctagtactgtagatatgtttgtattactttgtagatttttcaaaatgttgcttaaagaggaagagcaaaagtataacaaattaaaactataaagacatgcaaatatatattcaaggggtgttgtcaactttattccatggagagttgacaaaatgatgtttaaaaataccatgaaataaaagtgttttccttcacaaaaatggattttgttcttcattatcctggctttttcactgggagcaaagttatgatatagaagataaatctcatttttttcagtggaacaagtactttcagatttctttagaaaatgttacatgccttaaagaaaattaattgggcaacttaatggtaaatagttctccctgtgttttgcagcaaaacaaaatatgtggaaggtaatagaagaatagaaacggatttcagagtaaactaagactgctctctatggtgatttaatacttcagcctgtttaaaacatccttttaacacctgttttttggttttggttttgttttgttctgttttgtctactttaactcaaattccctatcagcttttccttcataagaaaacatttcagaaaatgtgttgtggagctctgtcctttcaaacgattgcagtcaatcctctgttgtcaggcagggttgctccagaatttattctgcatcatgatggaaggtttgaagactccagaagtgaaacactgagtaggcaataaacctatccttcaggatgataaattcagaaacaccatattagattcatgggcaaaaggggcttcctcttttcactcaaatgtaaattccagaaaggaaattatttatgctggttattgttctaacaagttggaaaacaaaagtcttaaagattgattaacatgcaagatcggtatgtgtcaaaagtaaggcaattgttaaaatcttaagtgaacgaacttcctaaacctctctagaaaaaaaaaaaaaagaatcatgctgtggctgcaaaaggaaactcaattcgtgctcagcatgcgagtttaatgcctgaagactgaatccaggatccggttaggaggaaaaggaatggtgtgtgtgatgcagagttggttggcagatgagaatatggtagtgatttggaagagatgtggtaggcatgaaaagttttagttacacaaacatgtgctgagtgcctgtaatagataaagattatcctaggggcaggtagttttttttaaataaaataattgaaaataataatacaatttacaaatacaatccctggattttggccctcaacaaactcacaaccgaggtgcgactggatagtagcaggataataaccctcatatagcacagttccttggcatactcaccgtgcgctaggtaccgctttaaggctttccaaatgttatttcaattcccttttaaaatcactctagagggtagatattattatcttccccattgttatgggctaaatttgtgcctccaaaattcatatgttgaagttctcatcccccaataccctagaatgtgactgtatgtaaagaatgttcttgaaagaggtaattaaggttaaatgaaggcattaggatgggccctaatccattatgagtggttccttctaagaagaaattagaacacag

SEQ ID NO: 585470 - DNA, 4001 bp, Homo sapiens
acaacaggccttctagatgtattatcttctagggctgtttcatcacataactaatctcatcaatatcatgatagaaaggagagtggttttggcaaggaaattactgaagtagttcaaataatccatcccataatttcatttgagtaagaaataaagataatcctttaggagtaaagaggtgaaattgcaactttgtccccaggttctgtaactaggccttcccttatctttccatgtcatgactataggtctatcttatgttccatccaaataaaatttaaaaaataatatatgaaagtcttcattataagcaccccatggttacaaaatacatataaccattataagcagtaagtagctttaccttctaaagcatatataatgatgaaaatttatttcttcaaacaccttgcacaatttgtataattcaatgctacttaagtatctaagatacaaatacagctccacaactggtatgtcacatgctatgaactttttaaaagttgacagctataactttcagtgaataaagtagaaacaaagtatgaatgaaaactgatgcttcaatgaataaggtatgcttttacaacggtactgcctaaaaaatttctaaacataaccacatcctgacaataaaggcaactgaaaagaagaaaacctatttctttctaatttattgttatattttcctaaagaaacatccatatcctacataaaattttctcaccagtgtaaggaaacaatttttttttattttagttgaaccagtacatgatgtgattccagaaaacacagaaacaggaaatctaataaaactaaagacttattcatcttcctgagttactgttggagaataacaagatcagacataaattcctgtccacatacatatcttcagaagaataatcacaaaaagggcaatcatttggtattcgcttttaagctaacagtacaatattagctcttttcaccacctttacctagcatccttaacttaccaaggatctaatactcattcacaaggaatttcagttggaaaagaatttgaaattacaccaactatgcaatgcaacattcagataaagagccacatattagccagtagactatttaatcccttgtttaggagagaacaaaaaaatatttgctgtttactgcatactgtggctaagttccaatgtagcctaagaatgaattgctatggtgatgaaaaaccattttccacacaaagcagcaacagatgcatgttaacagcattgcacttgttaattgccaattaacactttcagttgtcaatgttatttaaatatcttagtttctatccttgggaaactaatttagtcatagaaatatgagataaaaggattaaaatctttttctaaatacactttgaaatgctcaaaatctctaagaacgtcatcttctcaccggatagcctaataatttgagaaactgttttcccgcatgccacgcaggctaacagctcctttgctcagttttgggctgtaatgccttcctttcttatatttccctaaaagttctcttccttcagatgttgacacccacactcgcagatggcctctagcctcctgttaaggcattacagggtatcttacattatcactgtgccaagggcaatcctgagcattttctttgcccaatgagcagttttgtctttatcagctcacccttttctctaagtgaagatagcatttcatttcaatatacatacaaatttatcttcactgggcagctctccctcacatccttgcagcaaataccaccagcaccgtacactgcttttaaaagttactgaaagcattaagcaaagacttccttttacctggggtgtggtctgaatgctccctgataagatgcacgaggtcatttggaagtaattgttcccgcagtcactcagaagcccctgttctgaaagcattgattcatcacataagggagcgagcaaaccaatgactgaggtgggaagggagcctcatactaaaacaacacacacacactcacgcagaaagaagaaattctaaaaagaggtaaagcagagtcattccaaaattgaggaattgtgtcagctccgaagagtagatttctgttttgacaatttttagatttggaacattatgagaggtcatactaactgctgaaatggaatcagtagaagtgaaaaaaagaaaaagaaaaagaaaaaaagccactgatatgtgttttccctcttttcttttcatgcatgtattccaattatatattctgtgaaaagaagagaaaagccagattgtgcagcaatgagaagctgattgaagggcgctagcacctgccaatctcaataatcagttggtcatgctcatagagaacatttagaggtataaatacatgcaaacactgtgtccaaataaagaactagaaaacacacagttatttcaaaatatcagtaactttatccttagtatataaattgtaagcaacaatacaggagcatctgtagtgactgaagttatgttattaacaaaatcacctctaaaataaagcttggaatcaaatccttgtcaaaacagaatttcattccaaggttcctggaagacagtgagaatcctgactgcagacaaaccttaaaacttcatatgtgaaattgattggagtcttcagctttcagtacttctattttctaagtattgatttttctccaaatctgtaatatctacatttgtgctttggcagtgaaaagtgttgtatccaaaggactagatatagatcaaaggctatgggaaggaattactattttagaaacctagattatgcctcttcacattttcgatgttatcaaaagcctgagattatggaaacataatgagtaaaataattgctataagtgattctattagcacagtgggaggaactattccaaacaacacagacctagaatatgatctaaatttctgaatataagtgccgtgttataaaaaaaactatgagccttcttctattttacacatatttatggatactcaaaagagaatataagtgcctcttgccctcaaaaagctaatggtttgagaatataaaacaggtaaacaaataacaaagatacaaagtgaaaaaagaaaacaagaaaaagccctatactggccaggcgccgtggctcatgcctgtaatcccagcactttgggaggccgaggcgggcggaccacaaggtcaggagatcgagaccattctggcttatatggtgaaaccctgtctctactaaaaaatacaaaaaattagccgggcgttgtggcgggcagctgtagtcccagctaatcgggaggctgaggcaggagaatggcatgaatccgggaggcggagcttgcagtgagccaatatcgcgccactgcactacagcctgggcgacacagcgagactccgtcaaaaaaaaaaagaaaaagaaaaaacgaaaggaaggaaggaaggaaggaaggaaggaaggaaggaaggaaggaaggaagaaagaaagaaagaaaaagaaagaaagaaaagaaagccctatactgcagttcttcttaaactactgcacacataaatcccctggggagcttgttaaaatgcactttctaagtgtggagatctgagatgtggcctcagattctgcatttccaagaagctcctagtagatgccctgggagccacaccccagatctgctgctggtgtgttacactttgagtagcaaagacagaggaatttcagagaacgatgttacagccacctggagggcagtaattcaagatggtggcatttgggctgcacttagaagaacggggaaagggaaactatgaaggtgggatggaatagcaagtatttcaagcaaagagagagggctggattgaaggcacctatcgggacagcaagagcagtaagtcataaagcacaggaccctggagccacatcatccactggctgtgggccctcagacaagttactgaactttttaaaggctcagtcctctcacctgtga

SEQ ID NO: 585471 - DNA, 4001 bp, Homo sapiens
gccaattttaaaaactagtcatatcactaagaaataaaaagtttcaattgagtgcttaaaatagaatttaattaaatcaatgaactataatgtttctgatttgagatttttttaatgctaactcaattcaaaatcccaaaaagctgaattctctttattaaaccgaaaaaagattcctttccaccagacttgagaaatctctcaaaaaaaaaaaaaatccattcaaacaaaaaaaaaaagctacacaccaagaaaatgttttatggtcaactttttttaccttgtgataaaaagaaaaatgaattcattattctaaaagaaaacataatcctgaaactaaattatcatgtcacctttctaaagatacactagtctatgaacgaacacttaagtacatagtactaactcccttactagaacctaactcataaaatcattacagaagatgaatgaatcaggagtaacttaacataacatctatgctcaaattgacaacctgagcctaatggcgtgtgtcagtattcaactcagtattaagacaaatggctagctacccacgtcaagtgcagtcacaggtacagatgaaaacagaagaaatagagtccttcccatgactggcaaaaactcaagaaatcagagaagcaatagtcaaattctctcaaaaacataaagtggaatttaatgataaaaggattacatttcgtaagaatgttcaaatctgccaaacatgttttgttgcctaggagctagtattttatagcaagtattaactataaattacctattacaacaaatcaaaaatagacgctattaaaatgatttcctaaacgggcacaaatattgagtgaaatttttttatgctggtaaagtctgtgcagccaccgaatgaacagagcgcggaaccgacccttgcggagcgatttacagggttgctccccgacccttcacctccctcccctctccacggagcccttcctagtggacttggactcaaacatttttttaaaagctgctcggaacgctttcagcagctttgctataaacaacccccattgttaccaggccaggagcgagcgtgatttcctcctcctctcagggagccagcctggggccggcgcctccctccgggcagaggccgccgcagagggcccttcctcgcggccccgaaggtggagaaggcgcgcctttcctcggaggcgtccgactccgggcctgtgccatcaggcagcccgcacctcccgaactttgtgatactgactttcccctcccagctggcagcctgcaagtttatgaacccgaagcacagcgcgcgtcacaggctccatcccggccacggcgaaggggcgccgcgagccacaaccgggctgcaggtggagggcgccggccccgcgcgccgccgcgccccccgcgccgccggggatgaggccggggccgcgccgcgctcgcgggggtgggggcggcggcccaggtgagccaccaggtgagcggccggagaggggaacaggtgactgccgcgccccgccagcccccgctcggcccgcgcgaccccgggatacaccgcggcagggggacgggggctgcgggggacgccggggcccgcggtgggcctgggggagggggaggggagagaaggggcggaggggggagggggaaaggagggcgggtccgcggctggcgggcggcggcgggggggaggggcggggcgcggcgcagcgggcgggggtcgcgcaggccccgcgcccggcggtgctcacctcggtcggctggctgatctcgaacaggtccagccggttggcgttccagtggtggatgatgtcggccagcttccgccgctcctcgtcacggccgcccgccgacatggtcctggccgcgcctcctcagccgcgcggggccggggccggaggacgggccgaggacgacaggtccgcgggggcccggcgcccctcgccaccccccgccggccgcctccgcctccgcggctgcctccgcctccgcggccgcgccgcgtcctccgacttggcctccgcctggggctcagtccgcgccgcgccgcgccgcctcagccccgccggccggtgtgcgcccggcgcccgccgcccgccgcccgcacccgcccgcgccccgcccgccgccgtgcgcgccgccgcccgccgtgcgcgccgccgccccgcgcggcgccgccgcacctccgggccgctccactaggtgctgctgccgcggccgccagggagggaggtgtcggagggcgggccccgcgcggtgctagggttccgtctggactggcggtggtgggtcccaaccggcggtaccgggttccttcccgaccagcggtgctaggttcggttcggacgcgcgctgctggatctaaatgggcagtgctgggtccgatgggtggtgctgtgttgggtccggacgcgcggtgcagagtccggacgggcggtgctggatccaaatgggcggtgctggatctggacgggcggtgatgggtccgatgggcggtgctatgttcggttcggacgggcggtgctaggtctaaatgggcgctgctgggtccgatgggcggtgctgcgttcggtccggacgggcggggacgggcggtgctgggtccaaatgggtggtgatggatctgtggacgggcggtgctggttccagacgggcggtgctgggtccagacgggcggtgggtccgatgggcggtgctaggttcggttcggatgggtggtgctaggtctaaatgggcggcgccggatccgatgggcggtgctgggttcggtccggactggcgggtccgggtctggacgggcggtgctggatccaaatgggggtgcagtgctggatctggacgggcggtgctgggtccgaacgggcgatgggtcccatgggcggtgctaggttcggttcggactggcggtgctgggtctaaatgggcggcgctgggtccgatgggtggtactgggtccggacgggcggttctgggtctggacgggcggtgcagtatccaaatgggcgctgctgggtccggacgggcggtgctaggttcggtccggacgggtggtgctgggtctaaatgggcggtgctaggctcagcaggggaccggtgggcgtggcggcacaggtacggagcgcagggccggtggagcgccctctccgaagggccctgcgctccccgcgctcgctgctcctcctgcccgcgcattgccccggggctgctgcgtgtttcttccagggtgattcctttccgctgggtcacttcaaagccgaccttttcaagctgttttcttccgcggaggacacgttgttaggctttgtgtgcatttcaagggtcatgttttctgaaccgcgctctgccgctcttggggtgttcgagcccccacactgctgtgcggtgttcctctcacagagtgaggttggagggtcccactccctttgtgtgtctccttagaaaacgcctcttctctcagacacatcgttatctgccaattcttcgcagacgtagagaacggactgcagagttaataaacgtcgaggggaagctttgatgcgccccatttggccctgagagatgccacgtgatcgtcattttaaatcctgtacgtgtccccgtggacgtggaaacctgaaattaatttcagtagcaagctttgtgaattgtagggattttttttcataaggtgtcttttttgtaattgcccctcccctcccccaccctttgttttggctgcagagcgccatctctgcagtctccccacgccgggttcagtcaggcgaagttgcgttatctgtgatgtgttgtaacaaaaagcgtttatctttgaaacactaaggcaagtaatgagaagagtgaactatatttgacaaagcctttttatttttgtcattacttttttttccaatgtggaaataatttttctctccaccaactggatttcctcttttgcagacaattaaagaattctgtcatccccactgggttctgtcttttctaccgcacttgtccagtac

SEQ ID NO: 585472 - DNA, 4001 bp, Homo sapiens
attacccaagtaaataaatacaaggcttaaatcttatttctacaaatcaactcctgcagtgaatttgttcaacatctactgaacatctgataaggaccagtacaatgcttctgttcttgcagaaaactaaaaaattggacttgtgatggccaaatagagtaaaaataatcattagatggttaaaaaaaaaaattcacacgagcttagacaaagcaaattgaaactgttggccttgaaatactggctgagagaattactcatattaagtttacctacatcataataaaagatacaatatgttaaatgcaaagcttaactaggaccagaataaatttaatagtacaggaaagttctcgagaaaacaaaatagaaatgtgagccagccactatatagtaaaaaagctaaaaaaccaatatatggacattcttaaaaaccattcatttcattatgaaaggcttctaatacaattctgaagaataatttctaaaaatggaaatgttcagatataagtagggagaaaaattaggaaatgaaatatatcatctttttttccaagtccttcaattcttgttttgcttcagtgtatgtacaaagcaaactttcacctacagtataactgaaaaaacagctttccaaatgacaggccaattttaaaaactagtcatatcactaagaaataaaaagtttcaattgagtgcttaaaatagaatttaattaaatcaatgaactataatgtttctgatttgagatttttttaatgctaactcaattcaaaatcccaaaaagctgaattctctttattaaaccgaaaaaagattcctttccaccagacttgagaaatctctcaaaaaaaaaaaaaatccattcaaacaaaaaaaaaaagctacacaccaagaaaatgttttatggtcaactttttttaccttgtgataaaaagaaaaatgaattcattattctaaaagaaaacataatcctgaaactaaattatcatgtcacctttctaaagatacactagtctatgaacgaacacttaagtacatagtactaactcccttactagaacctaactcataaaatcattacagaagatgaatgaatcaggagtaacttaacataacatctatgctcaaattgacaacctgagcctaatggcgtgtgtcagtattcaactcagtattaagacaaatggctagctacccacgtcaagtgcagtcacaggtacagatgaaaacagaagaaatagagtccttcccatgactggcaaaaactcaagaaatcagagaagcaatagtcaaattctctcaaaaacataaagtggaatttaatgataaaaggattacatttcgtaagaatgttcaaatctgccaaacatgttttgttgcctaggagctagtattttatagcaagtattaactataaattacctattacaacaaatcaaaaatagacgctattaaaatgatttcctaaacgggcacaaatattgagtgaaatttttttatgctggtaaagtctgtgcagccaccgaatgaacagagcgcggaaccgacccttgcggagcgatttacagggttgctccccgacccttcacctccctcccctctccacggagcccttcctagtggacttggactcaaacatttttttaaaagctgctcggaacgctttcagcagctttgctataaacaacccccattgttaccaggccaggagcgagcgtgatttcctcctcctctcagggagccagcctggggccggcgcctccctccgggcagaggccgccgcagagggcccttcctcgcggccccgaaggtggagaaggcgcgcctttcctcggaggcgtccgactccgggcctgtgccatcaggcagcccgcacctcccgaactttgtgatactgactttcccctcccagctggcagcctgcaagtttatgaacccgaagcacagcgcgcgtcacaggctccatcccggccacggcgaaggggcgccgcgagccacaaccgggctgcaggtggagggcgccggccccgcgcgccgccgcgccccccgcgccgccggggatgaggccggggccgcgccgcgctcgcgggggtgggggcggcggcccaggtgagccaccaggtgagcggccggagaggggaacaggtgactgccgcgccccgccagcccccgctcggcccgcgcgaccccgggatacaccgcggcagggggacgggggctgcgggggacgccggggcccgcggtgggcctgggggagggggaggggagagaaggggcggaggggggagggggaaaggagggcgggtccgcggctggcgggcggcggcgggggggaggggcggggcgcggcgcagcgggcgggggtcgcgcaggccccgcgcccggcggtgctcacctcggtcggctggctgatctcgaacaggtccagccggttggcgttccagtggtggatgatgtcggccagcttccgccgctcctcgtcacggccgcccgccgacatggtcctggccgcgcctcctcagccgcgcggggccggggccggaggacgggccgaggacgacaggtccgcgggggcccggcgcccctcgccaccccccgccggccgcctccgcctccgcggctgcctccgcctccgcggccgcgccgcgtcctccgacttggcctccgcctggggctcagtccgcgccgcgccgcgccgcctcagccccgccggccggtgtgcgcccggcgcccgccgcccgccgcccgcacccgcccgcgccccgcccgccgccgtgcgcgccgccgcccgccgtgcgcgccgccgccccgcgcggcgccgccgcacctccgggccgctccactaggtgctgctgccgcggccgccagggagggaggtgtcggagggcgggccccgcgcggtgctagggttccgtctggactggcggtggtgggtcccaaccggcggtaccgggttccttcccgaccagcggtgctaggttcggttcggacgcgcgctgctggatctaaatgggcagtgctgggtccgatgggtggtgctgtgttgggtccggacgcgcggtgcagagtccggacgggcggtgctggatccaaatgggcggtgctggatctggacgggcggtgatgggtccgatgggcggtgctatgttcggttcggacgggcggtgctaggtctaaatgggcgctgctgggtccgatgggcggtgctgcgttcggtccggacgggcggggacgggcggtgctgggtccaaatgggtggtgatggatctgtggacgggcggtgctggttccagacgggcggtgctgggtccagacgggcggtgggtccgatgggcggtgctaggttcggttcggatgggtggtgctaggtctaaatgggcggcgccggatccgatgggcggtgctgggttcggtccggactggcgggtccgggtctggacgggcggtgctggatccaaatgggggtgcagtgctggatctggacgggcggtgctgggtccgaacgggcgatgggtcccatgggcggtgctaggttcggttcggactggcggtgctgggtctaaatgggcggcgctgggtccgatgggtggtactgggtccggacgggcggttctgggtctggacgggcggtgcagtatccaaatgggcgctgctgggtccggacgggcggtgctaggttcggtccggacgggtggtgctgggtctaaatgggcggtgctaggctcagcaggggaccggtgggcgtggcggcacaggtacggagcgcagggccggtggagcgccctctccgaagggccctgcgctccccgcgctcgctgctcctcctgcccgcgcattgccccggggctgctgcgtgtttcttccagggtgattcctttccgctgggtcacttcaaagccgaccttttcaagctgttttcttccgcggaggacacgttgttaggctttgtgtgcatttcaagggtcatgttttctgaaccgcgctctgccgctcttggg

SEQ ID NO: 585473 - DNA, 4001 bp, Homo sapiens
aagggtccactgggcagactttgggcagggacagggtggtcctggggtgggggtgggatggcctagctgagtgccagccaaggttgactcattcaaaggcagcaggggctggaaccttggccttttgaggcccagtgcttttcccaataccccactctacgttgcctctgcccatagtaggcagaggaaggcacagggggcaggcctgttgaatgcatcttgggcaccactgttcctgcgctgggtggactgctgagtgcaggggccaggcctccaagcagggaggggaggccgggacagcccctccagcagtaggggtaggggtggaggtagttacaaggtttcagataaagcgctcctccagtccccaggcagcctggattctgtcggcaggagagggtctgccctggaaaggcctcggggcttctctgcaggtctcaacctggctccccctttgaacagaaccttccaaggctgcaggcttgcatcctgcctctcagccaagacctgtctcctcagtcatctgaaaccaccctaccacgccagacgctccctctgccttcttgctattccagctctctcttcttcccacttcctattttctctccattttgttcaaactccatgaacaagaacaacagagctcagacagcgaaagcctccccatcccagctgtatgcaaattcccagcaggctgaaaggaccacccgcccacccaagaccacctcccaggaagccgaggccttgtgtgcagccccagaggagcttgagctgaacggagaatgggttgaggtgggtgggacccatcactgttcttcccttctcattcctgcgcgttccctgaagagtctctggggcctgcttttccccccagcagagacggatgtgtcacatttatggcatcccatttccttcacagagaggctatagatcctgtttcattctggtgtatttaattcactccataggaatcaataaaaactttaaattaaaaaaaaggcaaaatccaattgcttctcattttcttgatccaactggcagtcggcatgtcacctacgttcatgtgtgttctggtgagctggaggtgggagaaggagcttttcattgtacagtgaggcactaactttcctttcccatcatcagagatggggggcttcaaccttcaagtgtccagctctgcatgaagggggtgaccgtctgccctcccttgcagcacccctggccgggctagccttgcctccccatgtgctctccctcggggtcaactttttcttttccttttcttttcttcttttttttttttttttctgagatggagtctcgctctgtctcccaggctagagtgcagtggcgcgatctcggctcactgcaacctctgcctcccaggttcaagcgattcttctgcctcagcttcctgagtagctgggactacaggcatgtgccacctcgcatggctaatttttgtatttttagtagagacagggtgtcaccatattggcctggctggtctcaaactcctgaccttgtgatccgcccacctcagtctcccaaaatgctgggattacaggcatgagccactgcagggccaaatttttcttacctttccagagcaaagccaccatgccaagaggggccctgcgcccatgatgagctctggcttgggttcccggcccaccgtggatgtgccagacccacccacaacagcctctgctttgccaggagttgtacccacctgcttgcctccagcgtctgtgcctcagccctgcctctgctcactgatgccctgggaatcagcgcgggcactcagtgcgaagcccggctgggcactggaaggtggcagagggccctggaccaggctggctctggcttgcaccagcgttctgctttagggcttatgctgaccactccccacccactttctccaagggctacttacggcgtgcacgtggtctgagtgggtctggaggagtctctctgcttgtcttctggtgtccggctgatctgacgggttcttatatacctcccaaccctgggagctgcccttggagcccattaacctttgaccacagctttgggggccctcagagggggagcctggattcttgaagctcgtggaaactccaggcagggctagccacgctatgggcttccagggctttcctggaaggaacagcgacagtcagggttcggtggaagctagcccccacccagatggcattctcccgtccactgaaaactcagctgcctctcagaggtcattttaacaaagccttttctttttttgttccttaaatatatgacattggtgagcgtctgcaggccaatgctctagtgatcagattttctgtcggcctgtcagagcgctgtattagaaagataacttctcttcagtcttccccctgaagcccctcatgaaagaaagtgttcaggagtttgtgacagcatttcagtggattaatgaaaataaaactactgagtccagacccaaggctgtgtggggccagatgccgcgaaggaaccgaggaaatgcagaggggtgacagtgtaggaggtctgcacgctgcagcctaaacggggagaaagacacctacctggacaatgtttcatggtaatcatgcaattcaaacagtatgtgtaaagattcaaagagggaagagggaagaggtgaatgtgatctggagtcagacctggctcgctgttgctggggctgggcggggccaattccagagcgcagcattacccaggaaatgctgagcacgaacgttctgattaaacgcagcaaccccgtgaggtgggtgcatttatttcccccattcaatagataaggaaacggaggcactgctaaatagctcatctgtgactcctctgcaaggtgtctttatactagggtgaaggccagacgtggccaggtgcagcagagggcaggagtgagggcttctggagatttggggcacacacaggcttagaatggtgtcacaggaggtcccctgtgtgggctgggagccgctcagtcgggtctgagtgtggggacccttagcaaccaagcagaaggatttagatttgatggaggaaatggaatattgggcatcttcatgataccttgaaggggatgttagggcaaaaacatcactctggaagatgtctagttttctgggtaccggtcatggaccaggcagaggctgaggtggggtacagtctgggtgtggaatcccgagggtctgggtgggcagtggccattttcccaggcgacatacgttggccagtagcaccttccccacacatccagacgctgcctcacacatccagaggggcactatttcttgcccaggagaccctgcctagccagtccttgggtctgctctggcccttccactcagaaacaaatgtttgcagtgcttcaaacccaacacagataatttctaccttccctactcagcaaggcttaatgaaaacagatggcagctcagtgtcctcgcttcctgccagcagggtctctgtgtacagcacccacattagaactccagcacactggaccagcggctgttgtgagatgtgcagtgtggctctgaagtctgagacttacatcaggaattaaagctccaaatgccgggggtttgcagcagagttaccatcccttaaccttgggcctcattggagtctgactgtccctgtttcaagaggggcttttgggaagaggtcgctaggctgggcaaggtggctcacacctgtaatcccagcttttgggaggctgaggcaggaggattgcttaaggcccaggagttcaagaccaacttgggaaacatagcaagacctcatctctgcaaaaaataaaaacaattagctagatatgatggcatgcgctgtggtctcagctactcggcaggctgaagtgggaggatcatttgagcctgggagatggaggatagagtgagccatgatcatgccactgcactcctgggaaacagagtgagaccctgtgtctgaaaaaaaaaacaaaacca

SEQ ID NO: 585474 - DNA, 4001 bp, Homo sapiens
aacgtaatttacaaaagtgaacaacacctacactcacagaaagttataacgaagaaatacctgaataaatgaaagagttctctagatgaattcactaatgctgtttcagtaacccactgaatgccaaatatttccaaggtatcttcttcaaaattagttggtaaagggtcaagattcaaaatcaatctgaaatgaaaattgtttcaatctcataaaaagtatactaagtaccataatacgacggctcttttctttacattatttgaatccatattatacatgacatgtataaaaagtcagaaaatgccttggtactttacacattcaagattacaatagctagactgtattaaaacgtcaatcttctatattgataaaatgtacgactaaagtgtaatgtaacttaagaggaaaaatcaacaagaattctaaaaaacatatttctgcctgtcttcaccagtagtcttcagttgtagaatttcatcctttgaggggacatttaattttaaaactgctaacagttattctgagccatgtctggagaatagtatccaactaatgaagttgagtattctatttaagatttctaacaaggtacaactataaggtcaacaaaaatagtttcctcactgaaactgcctcagcaggtattaccaaaatatttcaagaacagttttactgtaatatatatgtacctgcccaaggcaaaataagtctatacacttctatatgtgcaggtaggattagaaggaacaggggcaataaaaaatgtttgtctctcttaaatattactggaaagctctagaatattatcacactctttagaaggaaatactactgcaaaaggctcagatagttaggaattcattttaagtagaagaaaaattagtgcccagctccctacagtaagggaacatcagttaccaaggaagttttccctaataccccaaatactttagatatgcccttaccaagaagccagcagaactgataatcatttgtacccttatgatatactaagctgatttataaaacacgacttggtgaacaccaaagtttaatgggctgaaataactaacattcctaaaaaactggtgaataatcagatgagggaaaatgtctctgagttttacctaccgcttaagggctccgctgcagaggtaggattctccagaaaaatgttttcctcctcctctgttgtcaacagcacaagaaaagtaaggaggtttgcaccattccgtccccagctccagctctaagctgtcagtcaggaacgtcgatgcagcagaacagttctccattgtttacttcatgttctgaaacacttggggttcgtcgtatcattaagggctccaaagagaaggtgtgaagagattcctgttgggggggggggggtggggccgagagagtggggattacttcagaaagttctcaagacgtccgccagcaggaaggaaaaacaaacgaacaaacccagaggccaaattcccaattccccctcgccctccgtccatcaaggctgtcagaacttaagacaaaatgcacaaccaactggctgtggcagggacctcgaaatccggccactaagtcgggctctgcagcccaggacaaggtgaaaagcaaagaaatgtctgcaggacatagcgtcccgggcttgcctagaactgcgccctccgcaacgtttctaaaccactctccgcccgtttcccagcagcagggtggagaacgctccctccccggctcggggtggaaattaggaaagcaacccctagggccaaccccgaccctccaaggaggaggcgagacccaccaggcccacgcctggcagcactcgggcggagaaggcggggtgccggtatcccgcgtacccggctgcagcaaggacccggggcgtcggttacccgcggtgcctgtcgtacccgctcacatttccagctcccgaaacctgcctcctgtgacccagaccaccaacaggaatctttggggtctaaaccgcaaacaggcgaaattcccgccaccgcgcgcccgcgctccggaaaggcggggccacggcgcagccctcccccggctaccaatcgcctcgcgatatctgcgcggaaacagtcggagccccacgaattctcgcgagagtccgtcagtccgggacgaggtactgagaaacttttttttttgtacctttaattggtgcgttcggctgaaaggcggggcctggtaaaaaaaaaaaaacagaactgctgctgaggcggaggagaggacttaaggactatgggtttatcctctggccggaccaaagagaagatatttactccagtgagtgcgaagtgagtgcctcgttcacacccacagtcgcgccgtcccctcttcccgctctggggccagcaactcttgttagaatgcagatgccttttgtccatggactgtgaggcaggcaagtgcaacaattaattttctctgtaacagatggaacaagtagacagaaaattagtatggatatggaaaacttggaaagcactaaccaacttgacctaattgacgtttataggtgaccaacccaacaatagcagaatacacactcctgtcaagtgcacatgaaacattcactaagcgataccatattccgagccataaaacaaatgtcatcaactttaaaaagatttaaatcgtacaaagtgtatagtctgatcataatggcattaaactagaaataaagtagatacttgaaatactctaaatatttggaaattaagaatcatacttctaactaacctgtgaatcaggaaaaatcacaggaaaattagaaaatacgttgaattaaattaaaatgaaaacactaaaatttgtaacagtacctgcttacattaaaaagaagaactcaattcaataaacttttgtcttaagtaactagaaaaaacccccagcatattgaaaccaaagcaagcaaaatgaatgaaatgataaatagtagaaataaatgggatgaaataaatggaaggaaatacatgcaaaagttgtttttctaaaagagcaatataattgataacccccctacccaaactgataaagaaaataaacaaattatcagtatcaggaattaaaaaggtttcatcactatgaaatttagtcattaaaaggacaaggatattaaaagaacattatgaacatttttatgccaataagcataggtgaaatggacaaattccttaaaagacgcaaactgtcaaaaatcaacaaaagaagaaaatttgagtatctctgtatttatcgtagtactcagaatctttggttaagcctccctcctctctctctgcacacacacacacacacacacacacacacacacacacacaccacttcttacaagaaaacttcaggccagggcaggcacagtggctttgggaggctgaagtaggtggatcccttgagaccaggagttccagaccagcctgggcaacatggtgaaaccctgtcccttgtctccacaaaaaaaatacaaatattagccaggcgtggtggtgctcatctgtagtcccaactacttagggaggctgaggtgagaggatcacttgagctggagagttcgaggctgcagtgaactgtgagtgtgccattgtactccagcctggacaacagagcaacaccatttctcaaaagcaacaaaacaaacaaacactctccaggccaaatggccttactattaaattctcccaaacatttaaggaaggagtaataccaattctatactaactcttagagaaattaggagattggatgcttgttttatgaggctagcaccacactggtatcgaaacctgacaaaagacaattacaatacaatatcacatgcaaacataaaagcagaaatgttagcaagcaaaatccagcagtacataaaaaggatgacatatgatggcaaggtgcagtggctcacgcctgtaatcccagcactttgggagaccaaggcgggtggatcacttgaggtcaggagttcaagaccagcctgg

SEQ ID NO: 585475 - DNA, 4001 bp, Homo sapiens
caaccctgcgttaagcgcttgtggggatagaaaggcggaggtgcacccagccctcaggaactcccagtctgctgaagataatcctaatgagatgtccaggattcaatgtgagttgacagaatagctatccaacaagtccagatgggaggggactcacaggacagagcatgtgccagtggcagcatggataatagtaattaccaccaacatttacataacacagcacttacatgggctaagctttgttctaagtatatacgttaacatacgttaactcttttaatccctgtgacatcctatgaagtagacacttttattcttactttgcagatgagaaaacagacactgagaggtaaggggacttggtgaatccctaataagggatggggctgccccagagtctatgttctcctttctgccacattacccctcccttcacagtgtaaagggatggataggagcaggctctctccctggcctccacacagggaggacggaaaagcattagagttgagttcctgccctctacagctctgcgactggaggaaagttaacttagattagccccctcatctgaacatacaaactctactcacctcacatggcttagtgaggactaaatgcttccacatgtgagtcactcaacacaggttctctcatgaaagaccagtacaaaataaactagggggtggggggctggagaagaaaagtcccttttcttgaattctttaaagatctctcagccatctttgctttcctatctcttcctcaatgatgttcagagtttgaggatactaaaaagtcttcacttcccaaccatgggcctgcttatctgaggatcccagaggggcttagatttggggaaagcaaatttggcggaagtcattgagcaatataggggaggagggagcagtgatcttatgaatcccaggacaggaagcctagttctgggagacggggaaaaaaacgcctagataggtaccgaaaagaggtttcactaaatgaaaagaggtacttttccccccaaattattccctaaccacctgagcagaagaacaaccaaaacctaaaacttttaatgacttgaaacactctgaggggtgctggcaaggactgagggatcttacccaaaaccctaaagacagaggaattaatttctcacctggaagaagccacgtcctgccctgttctgctctaggataaggctgaaccctcccaaggttaataaaaaagacaaggagagtcagcaaaggatgggttacagagccctgggactacagtaacaactcatcgttggtgacaccgaggtgacatgtttagtcagtcgcactatgaagcaggtgtcacagggacacctgatctctcagctcttgggatagggagggaaaatgtttaagaaagagggtgggtgcaaggcaaggctgaaaggtactaagacacctcactggacccaaagtcccagtcctctgcttacccgaatttctggccaagctcagggctagaaggggtggcgtggctggggggcagggaggttctgaagcgggactcccaggaacctctcccgctgggctagcgggtgagaccgggcggtccatctggagaacatcgctccactgaggagtgccaacgggtccctcccagaagcggtcaagcagataggccgggagctactgggggaaaagggcagtgtgccggggccactcctgccccgggaagctgtggacgcaggcggggtgggctcacctccgaggcagctcgcgcggactccccggggcagggctgggtcaccggagcccctgagctgcagctccgggcgctggacctcagaagccgccgcagcatccgggacagtggccgcgccgccatgaagcctgatacgagcggaaccgcagcccgcttcgggagcacactggccgggcactcgcccccggggtcatcccagcaagggcggggaggggcagggggagggcgggacccgcgcagccaataggcgaggacgcagtcccgcgtggccttgtgggagctgtagtacgctccctgtgcccactttcctgggccggggtagcgctctagggcagaagggtaaactcaggtaaggaacggggttcttttccttccagtttttctggctgctctagtctcagatttaggtcgtggtgtgacagtaggcaggacaggacaagggccaaacgaatgaggcactgccttggatgcaaaatttaagagggtgccaggtaaactgcggttatcaaagtaagtaattttttaatgtaatatttcaaaaaatcgtaataaattttcagaagtccgtgaaatatcaacattctaaataaaaagatttagcctacacttgcatgactcacatcactcagtgcaccatagtgcagattgtggttgtaaaacggtcagttaggtctttcaagatacacttctccagttgtgccccaaaaggatattaacaatcttttttttttttttttttttcgtggagaaggcaagagtatatgagaagtcacagaatgagtggacaacatttttgaaatgcttcttatacaccaagcaccatgctaaatgttatttaaaacaatcctggtatgaatagaatgtcctttttgcaactgaggacattgaggcttagagagaccaggtaattttctcgaagtcacacagctgatagtgggtttcaaacccagggcaatctgctttctacagtcattcagtcaagattcagtatgtgttaggaatggtggggtgtgcctcttcctctctataaaaagcagagtgctgtagtcctttaagattttggataacacacacaataatgagcttatgtactaagaataattatgctcaaaccagcctgttgtatccaaaaccctgtccctgtggaattgcaagaataaaacaccggctggaacatacagctgccaagtgcatgcttaggaagtgggaatatagctcctgatcttgaagaattgaccgaatagtgggagaggaaaaaataactgaatataactgacttttacaagtgcagtgggactgtcagaaaagctgagatgattttagccttagattcaatgtgaatttctcacaatgatactcaaaattcagaaaatatattgtaggggatgaaagtgtatctggggtgtgtttgaaactgatgagacaagtatgccagaggtctgtttgcaaggggcctgaagaccaactgaggactgttcaagctctgtccactgctaagtttagatatgtctggatttatcaggaaaactgggtatgggggagagaaggataaaaactttttttttttttgtatgtatgaggcttgaagagccttctagagaggactcaacctcagggaagaagccatctgacatatgaacttgatccaagaatgtcaccagctccttggagcctctctagattccaccctcttcatacaagttgtatgtgatcatcccttcacttgggctttactgtcatcttttatagaacttgggtctccaaggcaagacctaaggcttactcagttctgtttgaaggctgaaatcctctccatattatcatacatctacttggactcctgtagtgctgggaaactttctggcttcctgatgttgtctggtccacttaaatgtttccccacctattaaagttcttacttgtattcagcaaaaaagtgcccctttctgtcaacatatggtgattaagtgtcatcagggccgaatcctctgctaatggctgggaataaggaaatactttcaagggctcacagcctgcagtagggctctgatgtgacaagtccatggattgatttggagggttctgtagacccctgaacttgaatgcataatactgtatttttttttcctggggaatggtggctttttgtcacatgctcaaagagcctcatggaacatactgtcctagaaatctctcttttgtgataccctcctattggccctagttttagccccctaggcatatacatcctctctttg

SEQ ID NO: 585476 - DNA, 4001 bp, Homo sapiens
cacctgtgagccggatcttgtcgatgccttccttcacaaagagccgggcgagggtcaggatctcctctgtggtcagcaggttggctttgggggtcagcgggaccccctcctcgggcatgcagtactgacctgagggaaggatgaatgggaatgtggagggaggaaagaggcacggccacagccccgtgatgcctccactccccaactctccatcaggccaaaggcttctcaaacccatctggatgtgagcggagacctcactaaacctgaggtggaaaaaccccaggccagcatctccccaggcctcacctttctcatttctgaaacgttaacacctttccctatgcccaacacacacaatctggccataacatccctcagtgggaggccaagggcatgggttagagatgaagtaggctgagggcagagcctggcctgacttcctgggctgagggcacctgggcaggggcgttcctcctggcattgtcacccatcctcctgcatttcactggctatggcaaacaggtagctttctctctgtgtgtcatggggtgagagagaggtactctctggcctggcaaaagctgccgtcctctgtagctacaagcattctcaaatccactctatctatttcaggttatcatcagacccattttatatgttggaaaactgagatactacttgttcatggtgaggtatcagaatggggtaaatgaggtgagcagcggcaggctgtggaagggccaccatcctccaccatcacttcctgtggtgcagtttcattaaggtttgggtcaagatctgttagagagtcatgaaggcaaattactcagttgggtccagaaccagtcctttgagactgaagagaataagtaagactaccagaatgtaaagcatatagtacatcttgtttggttaaaaagttactaaacatacatgcatgcatttattgggccatgaagtaactttatttcttatcgtgaggtatagtgaaagaaagtggggaggaaaagaagggggggaaggggggaaggggaggggaaagtggggagaggcagaaggaaggaacagaggggaaggaagatcaactttggaagtccctccagcagtggctacagatccagagcactctttgggaggattatgaaatgaggcctctttgttattagcctagccccagctgatttgtcacgggactggggcacctccagagtcagcagtgctggcatgggcatggctgtctacttcaaatgtttataatgtccaccaccccacccctggccatgtcctggacttcgggaactacagggaaacaggaggaaggacccctgaagaatgagaggtccaggatccaatcttaattctaaatccaactgcatttatgttttcaaatctaattccaagtaggacacagcttctataatcatacaactcagccttgacccctatcttgcccctgaagcccacctggcctggtaagcaaggggtagcaggtgaagaagttagaaagcagaactggaggacacaggaggatttccaggcacagggaaatttcaagggctgcttcagcagatggacaccagcccagagagggcccaggaaggtgactcacatctgaggttgcacttctctgtgagggagatccgcaggtagctgtgctgccggccgaagctgtctgtgaggaaggcggagaagggggccgcatgctcccgcaggaactgcctccgcctggacacctcctgcgaggacagaccagggaggaagcatgggcccctgctaccgggctgggaagaggcacaaggagaaccgcctgccccctcccttactctgacatctgtgcggagcttccaactcttccacatgtttgggctctgcaatgttggggaagctgggattgtccctctcgttgagaaatcagcttgatgggaaggacccaccccttaagtattcagcttgggggtcgggggcggatggtgatctctactgggaagatttctggctgggcagcaaggtggaggcaagggtgtggggaaatctattagcccttattcttcactctagccagtgccaaaaaaaggattgtgcacccatggtctcgggcataaatgagaagagactgctgaaggccacaagcaaggcccaaacccgtcctgcagagagaaaggagggagccggcttcactctttcccatgtacaagtctgatctagtctgatccgtctccccctgacctatcggtccttggagagtacaacctgggtcccgacagatgctgatgagataattgctccaaggaagtagcatttaccaagcatcttaaagtttccaaagaacgttctgtttcattcccacacccactccacaagggattattataactaaggcttggatggggtccaagaacaccctcggcagaagcaggattcaaatccaggtcttctgattccaggttctttttttttttttttgagatggagtctcgctcttttgcccaggctggagtgcagtagcgcgatcttggctcactgcaaactccacctcccagattcatgccattctcctgcctcagtctcccaagtagctgggactacaggcacccgccactgcacccggctaattttttgtatctttagtagagacggggtttcgctgtgttagccaggatggtctcgatctcctgacctcgtgatccacctgccttggccccccaaagtgctgggattacaggcatgagccaccacacccgaccctgattccaggttctaaattactcccttctatcacagagagagtccaagaagatagggaggatgacaactagggtgggtagaagtcacttctctagaatatttcagacaaaaaaatcacgaccctggaagtcatgcatgagatctacagacaaggttctggaatgggaataagaaaccctggtttctgcagtaggtatgacctggtacactgtgaaagtcccttaacttctccaggcctgctttcccagttgtaaaataagaatacagctacaggctaaggttgtcttgctaggagtaaagacaggggtggagtggtagtggtggtatcagaagatggtaggtgaacacttaaaattatgatgaagaacagaaggtctcaggccctccaaaggtctagcgcaactatgcctacaattaggaggaagaagcatttgcttcagtaagttcctcagctccagctgcacattagaaccatctggagaactttaaaaaaacattccagtggagaccaactaaatctggatctctgaatctgttacgttttcaatctctccaggtaattctcatcggcagcccttgactgggtcaagagccactgagtggctcaaagataagagacatgagagtatgtgtgaagctgctcttgattttctgggcccataaaacattcctcactctacccaccgcgggagaatttcccacctcctctgagaagccctgctcaccatcctgtggggagtaagcagcagtcacttctctaactgccgtctgctataatcacaacagtcacttcctccctccctgcggtatgatggagaaaactcaaactcaacccattgcctttccacagatagcctcagggttggggcggggagcactccataatcaagaatcccatcagccaccggagtccagatgagatacctgggaatctggatgtattgcagtgctgtgccctctttttcatcaacagctatttgcaattcagtcatgttagtcaccctagattctgcctcttcacttgccaagataccccccctcaacccagtcttgacatgatggggggatggggtggctggatgggggaggagtcaaaatacatcaaagaattggaagttgagaggaccaaggagcattattcagcagaaacctgagagcaagcagtgtgatggagcaatcaagaatggaattaggggccgggtgtggtggttcacgcctggaatcccagcactttgggaggccgaggagggcag

SEQ ID NO: 585477 - DNA, 4001 bp, Homo sapiens
taccgccgcatccagctaatttttgtatttttagtaaagatgaggtttcacactgttggccaggctggtctcgaactcctgacctcaggtgatccgcctgccttggccccaaagcgctgggattatgggcataaaccaccacacccggcctcaagtttccttcttgagaacaacaacgacaaaaaagactctggttatagagatactgtgaatgtcctggacagaacattttagcaatcatctcctctcagcatctgcccatctttttgccagctgtagccatctctgactcttcagcccagcctttaggttccctcttggaatgtggcacagcatcttgaggttgaatcctcctatgggcctccctgttaggacttggccaaattgctgcctattctacccttagaggttttgcttttgtcactccatctactttaactgtctctccatcacttctcactattcagtccttgttcataccttgtttcccaaattctcttctgagatcttccaccctggggatggctctatttccctcttccttcccctgtatcttccacctcactgtggctcccggaccctgacccgaaaaagttccttgtttttttctatgtggatgtgtttctcaagtcagattctgagctactaagaaataaggctgctttctcccctagacctggagagtggatgcactgtgcctctgtcagtcaggtggctccctgaggatgggaaactttctgtttatttctcctctgcacgtgacagccgggttcctttataaaaacctactggtgcctgattatgcagagcaaagtctcaaacatgacaagatattataattccacaaacatttattgagatttactatggacaggcactgctaagcatgttacatatctcatttcatgtaatcctgatgagaactccaagaggttgttattattttatctcaatttgagaggtgaaaagacaaagctggaaagacaagtaagaagtagttcaaggaaagccttgagttagtcacattaaggagtctgggtcagacgcaatggctcatgcctgtaatctcagcactttgggaggctgaggagggcagaccacttgaggtcaggggttccagaccagcctggccaacatggtgaaaccccatctctactaaaaataaaaaaattaggcctagtgcagtggctcacgcccataatcccagtactttgggaagctgaggcgggcggatcagcaggtcaagagatcgagaccatcctggccaacatgtgaaaccccgtctgtactaaaatacaaaaaaaaaaaaaaaaaaaaagaaaagaaaaaatttagctgggtgtggtggcaggcgcctgtagtctccgctacttgggaggccaagtcaggagaatcgcttgaaccagggaggctgaggttgcagtgagccgagatcatgccactgcactccagcctgagcaacagagggagactctgtctcaaaaaaaaaaaagagtctggactccatcttgaaggctgtaagaaccacccacggaaggtttctgaggaagggaggcatgtcagtaggtctatgttttagaaagataatatagcaacttgaggatgtttgaaggagctaagccccaggaaactagcctttctgttttcagggtctccccagggcaggaaaaaaaacatgtcttacctgcatagctggaagacacttggaggaggaggaggaggaggaaggagcagaggcagctgggcagagagggtcttgataagcttgccatctctactgttcctggggacagagagcccccgcagcaaggtcaggccaagtggaggcccttggggtgcatgtccccttactgctgaaaagcccaagggaagatcttggagggcagtgctgcctgggccctgcctccactccggtaattgctgcagctgtgcccgcagaaacagccccacgtcacccttgccaggcactcacacaaaagggctacagactgaggggatgaccagggtttgccttccccacccccccagagcaatggagcagaggctgcctggtacagggctttcctcccccactccctcctggagatccaacctttgaagggtcttctaggggctaatcagtggggcaggatcacttacaggaccttaggaagaggcttgttcatggaatatgtaagcttcctccaatccaccccagccctactgactagtcaaaagagagaaattattattggttcttaaaaaaagaaagaaaacttagatttctttttcctgtttctattatctcacaactgtcatcaccagaccattcttcttaatgtctaacctccctttcttctaccgcgaatccaaactctgccctgtatgtttgtatatgtgataggtcacttgggatttgttagtttcttgttcccaaagaatgtttttagggaagtcatgagatgaatgtcaggtgtgctcagagaggcaaggttggaggaagggagaccagcaagggcagcaactaactatgtcagtcaacacaggcagaagggacagagccagcatacaggacacgctctccagccttcacatcacttgccagtttcctcagtgtcacaggggagagtgagatctggaatggaaaatgacctttctctcacctcttggctcagctgagaattgcaagtgtgagaccagcattggtagcaggttccaaaaatagacttcccaatcttaaggcaagtatgcctcaccaaataaggaaaaaaggctcaatttagagccgtgctgtccaatgcagcagtcactccctgcatgtggccacttaaaattaattacaattaaataaaattaaaaatttggttcattgattacactagccatgtttcaaatgctcaatagcactacagttagtggttatctcatcagacaacacaaatacagaacatttccatcgtcacaaaaaattatattgggcaacacaaaaatttatattgggcagcaaggggtagaaacacaactgagacatacatttctgcttttgtccgagatgggcgtaaggagctagaaggacattaaggtcagctgagtttgggaactgcttattctttcacccttcaaggcagccagcgtttggacacaagcaatgtttggctactctggtgctgtgtggttgaaagtcaagattgcaggggtcaatcccatggaaaaagtggccgctgtggatctctggctttttaccaaaggggtttttttttcttcaaaaacctaaaatgtcctgggacgctctttctccctgttgcatattcaggtaggagagttatgcacaagatgcttctgggcaggatttgggggtggtaagatgtgtgcaattgtccagcaccaagcaagctgtcaaaagctggatgggagatcaggatgagggtggaggcatgtgggagcagagagggtcaggagcctgccgagccatcacagccactttggagaaatcacagcatctctgaaaacaacaataaaaaaaactaaccaccttactgagatattctatgtgctgtggttctaagtggtttacttgcattaacacctttaatcctcacaacaacaaaacaaatattaaactattatcacccatatcttacaggtgagaaaagggaggtacaaaagaggtaaaggaacttgctaaagtcacaccactagggagtggcagagctgggatttcaagccaggctttctagtcctagaactggctcttttaaccaccacaatacaaggcctctgatgagctcagcttatttactttcatgccctcaactgcctcaaatttcctgaaaggggaggattcctggagctgtgagagcagtcccttggctgacatggtctttgggcaaaggtgatatatacaagggaaggccagaggggccaccagcaaaatgaagccagtggtgttgccacttgcagaaatctggggtataggggctgggcccgctcacgcctgtaatcccagcactttgggaggccga

SEQ ID NO: 585478 - DNA, 4001 bp, Homo sapiens
ctttgtggtgggcctattatggcatgttgaatcagaattctactcacggcttttcatttgacatacaattggctgggctttctagaaatgctactctttgagggaaaataatatggagttaacattcaaagtatgtcccattttataatattagcatagtaagagttatgctcccttttgtagaacatgcaaggatagttaaggggcatactatactcctctccctaaacggtaaaatttcttttttaaaaaacgttaaataggtatttaaataaggtattgtctactttatattacaggagaatgagtcattcccctagtgaggcctgcatttgtggtcaaatacttggttcataaagttaatgtctgagatgctgcaggaggagaatatttatacatcagtgacttcagcagaatgcaatcctcataaaactttattttattggagttgtaaagttacttatttgggggaagaaacgattaatttatgaaaaaatagataatagagtggttttgaactttttattgttgtcactttatttccttccagagttaacagctcagtgccagaatcagcgttcaagtttgatggcatatttcagtcgaaaagaacctggggataaaattactaagaagcgcactctaaatccacggagaacactgatttaaatactatcaaagccttaatgcaatgccagaacaattcggagttttcatctggatcaagacttttagcaaagggcagtatgttcggatgaatttttataataacaaagcgtgtacgttcaccgccatccaaacgttggtcacgatcaagcaaggatgtccaggaaacctagccacctaatcattctggtcatctcacaatcttcttcttcctttttttttttctttctatttagtaaagcacccatgaacaggcaaggtggttacttaggctccttcaaagtaaatcagcagcggtcaaattaactttattggttattaaagtaagccaaagttttgtcacttcataggatattttgcctggggaccttcgattttggtctctaaatgtggcttcctgaacagctctcggaataggaaagtccctaagcgattcttaggggcccttcattcttctggagaatggtgtagctgacatcagccccgcgcctggaggctcccaaatagccacgatttgggaagttctgagatttccactcctagacagcaagtccgcgacgtactaaagcgctctgtcccttccctcctctgagagctgtcccattaggtccccaaagccaaagcctaggtccttctcccttcccatcagggatgaagcggggtgtattgcaggtgtgtaggcgggggggcgtctattaagtggggcgctggggacaggaaagtgttcaaagaaggaaacctgcctggggtcatccgtgctcggcttccctaccgcgcgccttctggggctccgggagagcaggcgctgcccgcggaggcgagagtgagcgtggccgggggcgcggggctgcgccaggtgagagagagctgcgggccccggggacgacccgcacctgcgccctctctggggtccggacgggaccgggctcggccgggcgggctccgggaggagacgcgcttacctggaggtagggccgcccgtgggccaccccgcccacgacgatgtcggcggacgccatggccccggtgggcgagaagccgaagcccacgtagcctgcagtgcgcacctggaggcggaaggcgatctggctgccccgctggctccagcccagccagtacttgccctccgagtccaggagggtccggtgcggataggttcggcccgagccccccgccgccgtcccggggagcagcccccacagcaggagcagcggccagcagcacatcctcgggcgcctcctgcccgccggtaccggcctccagccgctggggagtgaggagcagaacgaggagcggcagcggcggcgagcgggagcccagggaccgcccctcgggccggccgcgcgcccgcccgggaggggcaggacccgctctccccgccccgggccgcctgcagggcgcgccgcgtcccgtccggtcccgtcccgttccgtcccgtcgggtcccagccccgccaactctcaccctgcccggcccttccagcggatccacttgcagcccccgacccctgacttggtccccgaggtcggggctcggtgggaaggaaagcgaggggcttcccggaaagaaagggaggaggaggcaggaggaggcagacgccgagagaggagaaaaggaggccagaggcagagggaaaaggaggagggcaagagaatcctagagcgggaagagcgtgggctctgcgggacgtgggcgagaggttaccagggaaagaatggacattgacggcagagagcaagtttagcctggagaggaggaattgagtgagcaaagggggtagtctggggtgcgatgcacagaaaggcccgtccagggtaaccttcacgtctccgtatccgttgctgtcgactttccagagcctttgttcccagtgacgtccctattgcaatggagggacacacttcactttccccagccccccacctcgagaatttctctcaccctcccaccctgcggggccgcagagcttgctcctcacggcaggagttggagccctgacgcttgccttcacctagtttttgtttggtttggtttggcgttgatgggacaaagtcagccaaactactttgccatcagcagagaaggtaaggggtgaattgtcatttgagagttatattttaatttaacattctcttttcttgctattccaagttctggccataaccatgtttgtcaaaagtttgttttgttttggttttgcctctacctttgaccactcctgtctttagaatgctaaatacaaatatggccactaaaatttaccttgcttatttattcctttatttatgatctgccaagtttccaaaaaagttcgaaattttgtctttataaaaatacaaacaatgcaaaatagaaaaacaaataagagagaatatcagatgagaaatatgggtaagaagagcaagctccacactagccaccctacactcctcattctctctcctcacctcgtatttcagcctgtttttccccctgcctatcttttcccataacttttccaaagttaccgtcatgcatctaatttatattcttctaaggatacgggaatatttgatcatgtctggaaggtgacctgtaggtggatctgcttaccaaagtgctcagggacttgcctgggaagggacttttcccaaggagagattggatcaaggtccgcagggctggccaatggcaataggccagcatcagagaagagtgatgttggaaccgcaaaataaaatgagaaataaaagagcctgcaaagccttacaagaactgggcatggagactatgaaatataagtagctggtgcctcacctccaccaggacccactgggcaaatgtcaagggcagtaacagccatacagcaatgtaagggtggcaaccttagaattgggtttttacaagcaccataccagggacgtggcttcagccatgaagaaaggaagggggatatggagagaaagaggaacaaaatagggggaatggagtcccagaggagtggctcatggcaccgggtgggacacactcactatcctctcactatcctgggcagggatttcagggaagttaaattactgcagagtgactaaaggcaaactttctgttttgtgaccctacttttattcctagtgtggaggaacctggaacaagcacattgctacatctgcttcctggggttcgttatataaaccccaaattcacatctattaggacattttgtctccttaatgaaacaaaaagaggtcatgccttccagaattcttcccccattaactgttttagctttaccttccatcactcccatctcactcacccatcggcctgtagaccacatgaaaaatccctctggaatc

SEQ ID NO: 585479 - DNA, 4001 bp, Homo sapiens
tgtcataactgtatttttaattttaccacacaatgttatccttagctgtacctattaggaaggctcagtatccaacacattagtaaaaagctaaagtaatattcaaagctgtagagaaacttaacagcaaggattgagagcataccctcagactgctaccttgttcacatttttactaccattaatctgatacattgctgtgctccacagtgctaaacacccatcttaattaatagtagttctatttaagcatagaaatgtctttttttgaaagtcagaagtgaagcttctgtttacaagtttaccatatggcagactgaattatttttcctaccctactgctctataaaagtagaagtaaacagtatttgcaataaaattcaggatttaaaacttttttattgctaaaatcaagttgccttcatactatcccttttgtgtggttataacaggatttattcctcctcagctttcatctctttacctcttgaccacactattaactaccgaaaaaaaaccgcagctgtacacgtacctaggttttaaaatcatacactgaaaaactaactaaaattacactcctaaataacctaaaactgcttcaaagttatattcaatattttgaaataaaagcaagcgccccaagatgagaggtgcaaataaattatagaaagtgtattttcaggctttccaaccgcgaatgctctttgtttctaactggaaaggaggagttaacagaaaatagaacaagaagaaaaagtatgaccttagagacacgtcactttactttggttgacagaatttcgtatataaaaacatcttaaattgtacttcctcccaagcttaaagtccttagaatgagaaaaccgaaaggcgaacccaaggccagcacattttatttccgctgtcccagaagcgcgctgggcgcacccgaagctccgctccaacagcgccgcgccgcgctctcagcagcgcctcccgctggcgtctccccaccccacacccaggtcgccgcctctggcacacctggacggccgcaggtgaccggcgacccactccgaggatctggtagaaaccggccaggaaaccactcccgcccggaggagcgagccactgtcaactggcccggagggacgtgcccactgccaaccatgggagaggaacgagcctctgtcacccctgccgggtcaccctgccctgaggggcgcccactgtcacccctgccgggagaggcgtccccatggtcaccctgtcctgaggagcgccgtcgctttcgtccctccaggtccccactgccactctggccgggaagggcgtccactgttatgcctaccaggagaggcgtccccagtgtcaccttggccaggagggacgcccaccgtcacccactccctgaaggggactcaatgtcacccctgccttgaggggcgcccactgtcaccctgccgggagaggacacccactgtcacccccgccctgaggagcgcccactgtcaccctgccgggagaggacacccactgtcacccccgccctgaggggcgcccactgtcacccccgccctgaaaggcgcccactgtcaccggctctctacgccgtccgcttcggggtgtggcggtccgggagggatccgggtggggcccccctgacaagcgcaccctctcgcctgggccccggcccacccgctgcccggggccaccgcgtcctcgcggccgccctcgtcgcggactgcacgggtcgcagcctcccgggagcccctccgggttgcggggttcggcctgcggcgctcgtcacctcatgaggtagtcccggaaatccttgcttcggacatagtccgccgctttccgcaccaacgcgcccgccatggctgtgccgacaccagaccccgagtggtccctgcctctgctgccgcttcccagagccaatgacaccccggccaaccccccggcagccgacggcgagccagcccgaaggcccgcctcacgacacccggccacgccttacggccgcgccgcgccgcccggctctcggccaatgacagggcgcagggccagagatggtggcgcggactggctggctcgtgccgcacgcctccttcccgccctcggtggcgcacgggggcggggcccgctgccgtaaaacggctggggctgggccggggctggcaggcggttgctaggctccagcggctcccggccagcggggacgtggaggtgacatttctctgacccacaggactgtgggcgccctgccgagcgtcgcgcggtcttggggcgacctgcagtggggcccctgcggcgcagcgcgcggtgggactggccgggttcccgcgccgcccagggcctgtgtctgcgccggttcctggcaagggcaccttggccgggcggcccgcgtcccctgcgcttcccacacccacgtgggcggacccggcccgcaagctgggccagcctgcggtttccgggcactggggagtgcgcagagccccgggccagcgaccgcagccggggcccctggcttctcccgagcactttcccccggaccggtccctccagggtggcgggcggcacccagggccggcgctcctcaccaacgcgctgcagctacgggctcaggagggagccgcagcgtcggaggaggaaagcatttaagaatagcacaaagccttaggctcgaggaagcgtgactgcttacgtgttgaaaataaaggttctgtaagtcccaccgcgggtgcatattgaaaagaaagggatcattagcacgcgaccctcgcctaggagtatataaaccgcagcacgactttcggatcacaaaggcagagaaaagaacacattgaaggcttttgctcacttttccaagttgtttcgtttcgttttgtttctaatgtggacgatcatttaaaatgcctctggtggccgggcgcggtgactgacgcctgtaatcacagcactttgggaggccgaggcgggcggatcacctgaggtcaggaattcgagaccagcctgggcaatacggttaaaccccctctctactaaaaataaaaaaattagctgggcgtggtggcatgtgcttgtagtcccagctacttgggaggctgagacagaagaatcgcttgaacccgggaggcggaagttgcaatgagccaagattgcgccattgcattccagcctgggcaacagagcaagaccctgtctccaaaaaaaacaaataaatataacaaaattcctctggtagccgggtgcggtggctcacgcctgtaatctcagcactttgggaggctgaggcaggtggatcacttgaagtcaagagtttgagaccagcctggccaatatagtgaaacctcatctctactgaaaatacaaaaattagccaggcgtggtgatgcgctcctgtgatcccagctactcgggaggctgaggcgtgagaatcggttgaacccgggaggtggaggttgtagtgatccgagattgtgccattgcactccagcctgggcaacagagggagatcctgtctctaaaataaaaaataaaagaaatgcctttggtgaacaggaattctcaacattagtgacccgcagtgtattagtgttaataatggacatcccctttgatccagcaagcccatctagagatttcctaggatagacaagccagtttgtgcaatttcatgtgtacagcattgtttttagtatggaaagattagagtttacatatctacccatagggagagagttaaataaattatggtgcatccgtttagtggattagtatacagccattaggaataaaggaattctttatgtgctgatatgaaatatcttttttattttcaagaaaaaaacccaggttctgaatagtgtataaagtatgctactcattgtgcatagggacaaagaaaatatatacattcatgtttgcaaagatactggagaaatgttagtagtggctgcctctaaggatgaccaagagtgacactgacttttcattgtatcttcctttgttctttt

SEQ ID NO: 585480 - DNA, 4001 bp, Homo sapiens
agaaggctgaaagggggcagctagcgatgggtatgaacactcacgcagaggcagcaggatcagcaacacagaacaggacacatgcatcaccagcgcgcgcttcacaaaacagtactttcccttgctcctgcaatgcactctgatatcttatctttctttctcttggctttcatgttttaaaaactgctatttgcaactcactaaactgatcattagcctaatgagtcacagcccacatttgaagacaatggatacagcataccctgatctatatcccagtagattgctagaaaagggaagggagttggtttggcgtaagtatttgtaaatgcttccctaggtagttttgagctatcttaaagaatttgttctagaatgttgccaggattcaatgtttccctcttttaaaaagtctcctgggtccattctcatctctcatacctgcacaaagatgactgtaaccgctttcactactctaggacgtctgccatttgggttttgaacaatccagtccagtttcgggcttcgagaccctctttaaagggtttaggctggcctcactttgaaaagaaagatacagactggaagcaactcttccttttcctatcacctgttaatattatctattcttccataaacactggatgatcttcctcataagaacgaaactccttgtgggtaccccagctcacagtggcctctggctttcctgaccttatccttgcaggccctcgtcactctcctgcacctgttcttgtctgtgtaccccatgcaatgtacctaaaggaaactagactcacagtcctagcttccagacccctactccccactattacttaactggggcagtcaccttggaaaacgtatttaatatcgcaatctaattttctctacctgcaaactgaaaatactactgtttacttttggggttttcgtaagaattaatttatgcataagagttcccttctctcgtctccctggacacattccctcaagcttcctttgccttcaaaacaccagagtgtttcactgttgtcaaactaaatgcagagtagtggctgagattctgtgccatctaacatgctgtggaaaccacaacgcctccaaacaggtttctgcagagactactctttgccttcctcaattaattacacagaaaggatgggaaaggcacggggcacggggcgcggggcgggcggggggagcgggggcgggttgcggggtggggcggcggggaaagtgtaaaacccctatttccctctaatcagtaacacgacctgcgagcaggctccccagtccaaacaaaatgaatgagcaactgtcaagccaggcatcatctgagaaccctgcccagtgcatggaggcgcgcccggggccaggagccagcacatttccccagcccaggggggctctctcagttgcagggcaccaaggcggcaggagggccgcagcaaggaaagttttctcaccagcgggaaagggtgtgcctcggccgctggggcccagcggaggggaggaagcccacccaagccccgagcgccgccgcttccaggcttttcggacgcccagcggcgtccacacgcacatcagcgggctgccgggaaggttttaaacttggtgctctccacggggtccacactcttcccgtgggcgtcctcacaccccaattctcctcctcccaccccattctctagcccctctaaactaaagactgcccccaaacccaagcaagccctgccttgaccaaagctgcacgcgccccgcacccagcgcccgggctttgctccgccctgggcgccctgtcccgcccgtggttaccggctggctagccccggcccgcgggctcggccctggttccggctcctggctcctccgaggtgcgcgagcgccgccgccgccgccgcctcccaccgcccagggccgggcgagtagctcctagatccgaggtgcggcggagacgcgcgctcccgacccgcagcggaggcggcgcggggcgccggagcagggctgcagcgcgggagccgcctccccagcgcgagagccgcctccccagcgcgaggccgccttggccaagaggaggtgagctttgcagatccctttcctgctcactttgcccctccgagtccgggtcagagcctgagtcagagaattctttgccatcccgggctctgcagtgggtccctcgggtcaactttgggtaacaggaggagctcattagctgagcaagagggagtggggtatcatgaatcaaggcttatgaaaaatcggcagcattgagttcaagttcagtaaggccagagcccccccataatgtgctgcttaaattactacctcgattttagtttctcttcctgcccactggtccaggtgtcaaagggcagtcagacgttcaaacggggtcccaaagggctagcactgggccgggagtagtttcagcatagcagggctggctcatctcttcctcccttgagtccttattgcatgccaggcattgatctgggaatacaggtgcttggtgcttgcattctactaaagagacaggcataaacataacaaataactaaaatacatagtatgtgagatagtgatgaagtgcggtggacaaaaaagaagggaggaaatgggataatgtttggaggtagggggtgcatttttaaatgggatggtcaaagatggcttcacagtggagtaaagatctaaaggagatgagacagaaagaagtcacgctggtatctggagagaaagcacttgctgtgtggcaggcactgagatgttctttactgcactagtcatttcttttactactctccatatgccatattagacaggtattgccaccatttccattttactgatgagaaactgtaacttaggaaggttaaaggaactgcccaaggtcatatgctagtcaatagaggagcttgccttcaaggtcaggaagcctggtgccccagaaccatagtttaaccaccattatacagcagcaggggaaatgcagcacccatgcaggctggtggcagtgtgatgaactcaagctggtggtgccaaaagaggattcctggaaatgacatctcatcactgatttttttttaaaagctcagtttcattaccacttgtaaaatgaaatattttgaacaccatttttcttcttcttcttttttttaattttaagttctgggatacatgtgcagaatgtacagatttgttacataggtatacatgtgccagcgtggtttgctgcatttatcaacttgtcatctaggttttaagccccgcttgcattaggtatttgtcctaatgctcttcctctccttgccgcccacccccgacaggccccggtgtatgatgttcccctccctgtgtccatgtgttctcactgttcaactcccacttatgagtgagaacatgctcatttggttttctgttcctgtgttagtttgctgagaatggtggtttccagcttcatccatgtccctgcaaaggacacaaactcatccttttttatggctgcatagtattctatggtgtatgtgtgccacattttctttatccattctatcattgatgggcatttggagtgaacaggcaacctacagaatgggagaaaatttttgcaatctatccatctgacaaaggtctaatatccagaatgtacaagcaacttaaacaaatttacaagaagaaaacaaccccatcaaaaagtgggcaaaggatatgaacagatacttctcaaaagaagacatttatgcagccaacaaacatatggaaaaaagctcatcatcactggtcattagagaaaaccatctttatagtgtgtgtatgtatcttctgcctcatccacaagcagtttgattctaaataacataatttgacaatctgtgataagatttattaatcattccccaagtgtccacaccagttccagttgctcattcctattcacagggatgtgattcctcacccctgcagtagagcctctgccaagtgtcttcagggcattg

SEQ ID NO: 585481 - DNA, 4001 bp, Homo sapiens
agaccagcctgggcaacatggtgaaaccctatctctactaaaaatacaaaaattagccaggagtggtggctcgcgcctgcagtcccagctactcgggaggctgaggcataagaattgctagatcccaggagaagctgcagtgagctgagatcgcactgctgcacccagatctccccagcctgggcaagagagactgtctcaaaaaaaaaaaaaaaaaaaaaaaaaaaggccttctagtgatcctcagaaatccaaaaaccagacaactatggcttccacttccatttttcagatatccattataatactatttgacctcaaagtgaattttattgttccacacaagcaacagattacaccaatttcacaactcccagaatccaaacctacaaagacccttcccaccaagcactttaccaaaaacgggcttcatctccatcttcctttctttcacagttgaaaaactgcccttcctaattaagccaaccaacttcttacctcaataaaatccttgtttttcagtagcacgtacagtatttccagtgatgaacagtgaactgtctttcgtctcacacagtaacctccgtgaagaagatccaccttgttctttactgtatattcctggcatgctaactgcatcctcagacaattttaagtgactgaaaactcaggcaaagaaaggcaagagggcaaatagaagggcacaggagacaacgcttttcaaatttttctcactgcgacctacagaaacacactgtagaacacctcctagtacactcacacgtgtgtgtacacctgaagtgtcaagaaacaataccctaagtgcaacaccctctgatattttctatttcaagtggccgtgatctactaaactgatttccaactcaccaataggattcagtttgaaaaacactgcaataaatcaaaccttacagttgcattccacaagctactaatgaactcttgaaaatccagcatacagcagagacgctgaccaactacaagatccaaaccccccaggtgggcagtgtccttctgttcagcagtggcagttccccaccaccaccagccctgagagttaattatctcccaaactcccagagtttcccaagtagcctgaggtgtctgtcatatgcccttttaacctctttataaattcagtcccgtccgtctcttacggtggcaaagttcatttatcgtcggctgtggaaagcaatacttcctttttgtcccctccaggaaccagaaattaaatgaccaggttggtgcccgttgtgcctttatgatctatttgtgtgggtgatatatagaaagagtctcagtctctcccttcatctttccagtcttaatcactggtagatgcagtctctggtgaaataagaaaccagggaaccccctggcctgggggagggcgcactcatcagcgttgacagagtgaaagcaaaaactcaatcctcacaccacagaggcgtctggctaactcatctccagacctaagttgggaaaggggaggggagcgcggaaagcggagaagccggaggagacgctccggagtgaccagcgacggctgaacgcagcccgccctccccaagtcgacgccgcaacccggggaaagcaggtgagcgccggccacggacttgggggtcgcagaagcagcccacggagagcggaagggaggaggatccgggtaaggggcctcccctccccgtcgggacccccctccccgtcgggacccccccctccccgtcgggacccctcccactgacgctctgcctcccactctggcctctcctcactcaccccggggagtgggcctcccctactgcagagaaaggaagaggagaaggagggaatgaggacttaacgcccacccctgccccccaccataccgctctcgccgcccgggaaaatcccgccgcgggccccaccagccaagcgccgccttcgccccacgcggcctcttcctagcgcctgcgcgccaggcccagcccggcggacgcgatctgagagtgcgcgcgcaccttgcgtgcgccggcgtgcggggcgggacctgcggggctccgccccctccccctccctccccccgctccccctcccccatacactgccgcggccgccgcaggagcccggagctcgagccgcccagcgactccccctccccctcccccagccccgccccgccccaacccggggctccgagccggagccgagtctgcgcctgggggtgagtacgcgacccctacccagccctcgctcttttcttcgaagatcccaccaccacccaaagaaaaaacctggactcagctgcgcgtcccctcccttcaacctcctgcgggacccagaggtgcccgggcccgcgggacccaggggtggcgcgcgctgcccccaaccccgcaccatcccgagccaaatgtgagtcctccaacccctgccggaggtccagatacgcgccgccggctctccccagccccggggagatcccaaagggtgggacccccgcccccggcccccgagtgccactcttctcccacctgcccggtgcaggtgcgcgtcccctgcgcgaccctcgggggtgccagctgcgccccgcctgtccgccgccgtttggggaactagccgcccccgcccccgagttttggaccccggggtcgccaagtccgatgccttctgtgccttttattttttctgctgctcccgggggcgagtacacccgaagccggtccggggtaagggctcgggctcgggcaagggcagggttcgcaggtgctggcacgaggccggccgctgcccccggctctggggactgactggtcggcgggctggagaggcggccggccccgggagcgtgtcctctccttgcgccccacacagtgcagttcattcatgagccgcccgggcctgcgttggagggtgcggtggggaaaagattcagacgcgaaaccgagagtggggcaaaggccctgttgtggggagggggcgccgctttgtccctcctggctgtcttgaccgcctaaggcggacagtcccaaagcttggcaccttgttccccagaaaaggaaaggacgcttgggaagtggggaggagaggtcagaggggctggctgcccttggggcgctgtgctgccccctgcctgggtcccctgggcagaggtctggccgctcggggcaagcctgagcactccaccgccctggggggctggggcttgcctacccattaccagtctgcagcagccggggagcaatgaggctgtgcccaacacctgctgaagaggggcccatcctgcctcccaggccagggtgaggtggggagtgggagtgtcagccaggcttcaagtgggggtgtgctggcagcgtgattgtcctccagggcaccagagggtccaggccttggcatgccccaggtggcacatgctggggcctgctgttggctcactcagtgcagtcttggcctgtgggtggatggggacatggcaaggcagaaggcaggcagtgggtaactaagaacccccttggacatcattcaagttctctccaagtatagcagagtcttagagacctgcgttcaaattctagctctactattcttcagctgtgtgaccttgacaagttacttaacctgtctgaacctcagttttcattaaaaagtgtttatgcctataattccagcactttgggagactgaggcggacagatcacttgaggtcaggagttcgagaccagcctggccaacatggtgaaaccccatcgctactaaaaatacaaaaattagccgggcatggtggcacacacctgtaatcccagctactcaggaggctgaggcaggagaatggcttaaacctgggaggcggaggttgcagtgagccgagattgtggcacttcactccagcctgggtgacagagcaagactgtctcaaaaaaaaaaaaaaaaagaaagaaaagaaaaagaaaaaaagtgtggttactaccacctccttacaagttttatcatgggaatcaaacaag

SEQ ID NO: 585482 - DNA, 4001 bp, Homo sapiens
tgacagggataacatctactttatctttgtaactcctgcctctaacgcaatgcctagcaagtgatacaggtatgatgcttgttcaataaataaataatacatcacacagtaatgatttccaatttactcttacaactttacatagtacttaagaagtccttaagaaattctaaaaaatcctcaccaagcagataagcagcagataaacctgataaacacttacatgctgtagtatagtggtaataacctagcgtcctggctctgaggtcagttaaaacatatgtaaatcttagctctggcacttactaatcatgtctccctaaacctcaatttctttgatcctgtaaaatgggggaaattataactgcttcatgatgtaattttaaggattaaatgagaaaaaacatataaagcaagtagcataattcctggcaaatgtaagtgttcattaaacaaccacctttataacaaagtatctcaagtcatactagactcctaactggtctttcttcaagtcctgctccctcaaaaatttaatcttccaaaaagcagctaaaatgatttttttttttttgagacagaattttgctctgtcgcccaggcgctcagctcactgcaacctccgcctcctgggttcaagtgattctcgtgcctcagccactggagtagctgggattacaggcgtgcaccaccacgcccctctaatttttatatttttagtagagacggggtttcaccatgttggccaggttggtctcaaactcctgacctcagatgatccggcttcttcggctggctccctaaagtgctgggattacaggcatgagacaatgcgcccagccagaatgatcttgaaaaaccaattcgggctcaagctttaaatcctctcgtagtttcccactataatgaaaagaaagtctaaagtgctcatcttgacttacaaagctaatcatctgtcgcctccttacccctccatgttcatcttgggccattcatcctctgcccattgagcttcagatccacaagcccttcagttcctcaccccagcagtttcctttgctaggactgctctttctggcagatgactaggcttcttcctctttcagatctcaccttcttaaatgtcacctcagacaggcaggtatcctgtccgctactgtaacatcctctttaaatagcccccatcacacctatttgttgtttgttccagcccctccgcgaaccctgcctctacccgccgcatggcagctacctgggagagtgcctggagttgaatgaatgaaaatagtctgtagggtgcactgcccttgtcaatcacaagcagatttaattacctgtgccagaactcacgggagggaaacaccgtccgccagccccgctctttcctggctacagataaaagctccaggttccgggggttccggttggtgaattctggggcgacagcttcattttccacagggtccacttcaggtttcgctgccggctcggagctggttgacagggctgcgaacctgcaccctgggcaacgggaaaaaccgcacagggcttaaaaatgacggatatggacagcgcacgaacccgctctaacgtctatccgcttttacacccccaatctttaggcccgaggggacgaaaaatacgtatgcccacagggtggagtcagcactgaccccgtccttaacttcctactgtggtcttcgcagtgccgcgagctctatttcgatccggcacgtcgaatacaaaatagaacccgcacgttccaatgtactgtgcaagcccaggcgagtgagctgggagaaggggggcaagactaattaccagggttcctgcaaaccgagaacaacccccaaaaccgcgaccgaagcgccatcgctgagacgatctcggaaaagcctcgcctctttttcctcacggacgactcagtcgctcgccaggagcagccatataaagtcagggacaagcctttggctgctgtagatccccaaactctccacgccagacgccaccgacccggaagtagcaagtcccctgccactgagtggccgagaaggcgatctgttatccttcatcgccaatcatcgctcacgtcgaggggcacgcaggccctggagcccaccaaccacctcgtagctacgcccaagaccacgcttgttgcttaagtccggggtcaaaggcacacaccccacaaaaccatgtttgggttttctactcggagagcttgggcggtcatcgactggtccacacacaccccacctgggcaccgcgtaggaataaggcagggcaagatgcagttttctccttaaaaagggtggttgtcttcctcgaaccaaaaattttcccgtatggcccgctggaaaaactgccccgtcccacccaggttcgcgcccttaaacttacactcctgaggcctggagcaaagccggccgatctgcctcacgctccccgagcagggacaaggaaaagacactaaacctaaaacgcacgactcgctcagaaccccaactctaacttggagaagggcccgcccctccagttacaccccagctccaagctccacccttcttacaaccttttctagaaggcactagaatggcccactgcgtctgcgcaacatcgtttgaggcgaaggttcaacctcttcccagcggtccaacatccgacttccgttctccgctttcgcgcccttcccatcggctatctaattggacaaaaatgccgaccccgccccttccccggagcctcacttccgtcacagtcctgtttctctccctgttgtccctgcctctttttccttcccgccgtgccccgcggccgggccggggcagccgggaagcgggtggggtggtgtgttacccagtagctcctgggacatcgctcgggtacgctccacgccgtcgcagccactgctgtggtcgccggtcggccgaggggccgcgatactggttgcccgcggtgtaagcagaattcgacgtgtatcgctgccgtcaagatggaggggcctttgtccgtgttcggtgaccgcagcactggggaaacgatccgctcccaaaacggtaagggcgggccgggcctgggtcgggtttgcggccggggagggccgagtcccaccgcgaccggaccccggctgccctcgtttctctcctttacctccgcagaaagggcctcggggccccgcagccggacccagcccacccgccgttctctggggcagggcgctgtggccccacttttcccacagcgaggaggagccccgccgcgcgcggcagggttttgagaccggcaacgcgtggatgtggtgtccggggcggcgttggaaacgcgccctccgcgggaaagcgggcctcccgggctcgcacgtgcgggccacgcctcgcacccccttttgtttcagggcgaccccctgagtgtccatgttaaacgccaggttttattttaggaccatttaccagaaaaagagtaggtccatccgcgcgccctcggatgagcccggtgccctgtccgcccgcagctgcagtcgaggtcgggcgtccggcgtccagccgtatccgggttgacagcttcttacagtagagttagcccaggaaacgccactcgagtgcattgaccccaggagacggcagcgctaacttagcagagcgtttgctgtcaggcctttggatacctacagagcttactgtttcttgatagattcctaatttttttcgtaaacaaatctgaaagtcaccaccttccccgttgactaccgatttctctcctcacagataaagagagttttaatgagcaaaaaacttgcagaatctgaaggaaaaggctggtatagctgtacgaagtggcagagcatgaaattggtggttattactttttttttttttccccgccatcagattccaccccgcatcaaagctgtgccaaataggctcgctttgtttagggacagggtcccacctgtcgcccagacgagagtgccatcatagctcactgcattctccaagcacagg

SEQ ID NO: 585483 - DNA, 4001 bp, Homo sapiens
gttggccaggctggtcttgaattcctggcctcaagtgatctgcctgccttggcctctcaaagtgttgggattacaggcgtgagccactgcgcctgaccaatttttaaagttttagtagagatgaggttttgccatgttggccagcctggtcttaaacttgtgacgtcaggtgatctgcccgcctcggcctcccaaaatgctgggattacagtcgtgagccaccttacccagcctgttataaatttttgaagggtatgaaggaaaatgtcatggcacttcctgtgtatggcccattttcttcaattacccaaattgtctttagaagcatagaccaattacctattgctttgtattctactctctgactcctgtacacatactacatgcaaaaggagccaaataagtgctttttaattacattcctctgccttacaaggtacaagtgtgtcaatatacaagtctagggtcttaacatgtttttccttttgactgcttaaatccccctgtccttgttcccacctgtgtggtctcggcccccagacttcctcatcttcactggtgtaatggtgtacttggtacgactcttccaggacacaaagttggcattaagggccacagaagtaagaactgggcggcaggggagcaacatcaaggcagagggctgttggaggaggccattgttcatcatctagggataaaaagacatctctttcatttgaaagctaattgaaggcaaagcatcagagaaccaaggcagagggcacagatcaattttagcttgtagcccacttcctcctggatgtatcccaaaccagctatccaaaaactccacccttcacagcttgcacagtaatgttctctccttggtgatctccttccaaatttggctcagaactctccatctccaggaatctgtttttacctaaacaattcccttctccagagctggtagcttccacacatccatgtaccaccatcagtgccaattccttttgccctctgcattgtttctgggaattcttcacatatgaatggaggggaggggtcatttcactcttgttccttgatgtattcccagcatttcggagtaggttgatttggatttgaattttaaacatgcatctcccaaactgtaccataagcagcctgaaagctccagaggagcaggacttacttctcttttgtgtgactcaccagtcacccactaggacctcaggataccttcccctgaggccactgttcttggtatcttgccctgcattctctaatatcagcagtaactcatccttgcaggcatcatatcataatggttaagagcacaggctctgaaagacagactgtttagctctgatagttggtgtgtgaccttggactccttattttcctcatctataaaatgggaatagtaactgccttatagagtatttgaaaggagttcatttatttgaaacgtctattacctatacctggcttatcataggcactcgaaacgttattactgaaacctgcacaaccggtgatctgcaaagcactttcaccttaagtatctcgtctgaagaatttcgccctatgagaaagcaacacttgtagaggaaaaagctgaggctaagtgtgccttatccaaggtcacggacctgcatgactcctgaccagactcgcaactcccgcctcgcatgcccgcagaccccatctccggcagcccgaatggaagcagccttcttcccgggtaagatggattacctgggcggcggggaacagactcggggcaggggcggcgacggtcgggggcgccaggttcagagagcgcagagcgcgggtcagtgcgcacagggccatcagcacgacacccttacttttagccaagctgctcggtgctcctagatgacgttgactgtccggcgccgtcgctccgcaataacgtaaaaggaggcgggcagaaaactggagcccaagctggatacacacctcctttcctacctgaacgccgtgagagccaatccgcgggcagctctaatgtcgcgtgactaggaaacaggccccgcccccccagacccgtcaaaacaattgcctcgagcggcagccatcatggatttaaaggggcagtaccggcaagagcggcagccacaccggcagattgcaggtgagtctttgagggtatcctggggctgaaggttaaggtctctgccatctcttattctcgcactaccagaaagatgaacaaaccccctccaaccaaccttacaaaactccagcctccaaaactccgcccttcgcgattcttccccgcccctcggcgtccagacagatagacagacgacctgccccgccccctgcgccaccgactgactcagtgacctcggggtcgttaggcctccacgtcctcgctggagctgcggacctcagtcgtccatccacacctcccccctgccgcccccgcccatctcactctcccaaccctgggcaccagggcaggtcgacagcccgaggcactcctctactgcgtttccaggcccaggagacccactccagcgccgcggttccttgcgacccggcagccgttcagcagacctcccattctttcctgcatcatcgggcattgtggaggcaccctacggtgattcctctcagagcctgtttgtaggtgaccgtgacagagacaaaaccatggaagtgactgggtttggagtgaccaggtgttcctccctcccctttcccagacacgcctcttgctgtaggtctctggttaagtctctctctctcattcccttcctgggagacagtagctccctaggcctgcaatgagggaggctggcttggggaaggagacgggaattgggcgtctttgaagacctgtgggcagagggagggagggagggtgtttgtcctgggtggggctctgggccaggtcctctgggtagctgtgaagtggtgaaagaaggggtgggaacgctggacttctggactttgggcagggcagatcctctgactctctggctgcagaacagtttcttccgtgctctggcctgagtgccacagccagggcctctgctctgtacacaggtaagaaggcttcaaagatgagaaacaagacccctctgaggaagtgggaacacagtctgagtcctggggggtgggaagtatgggttgaaggttagtgggaaaatatgcagggctgaccaggtttggagatgctgggcttagttctgcaggtgatgcagcctgaagaccttgagctttctgggaccctgtaatgtggatcctgcaaggaaggctcttgttttcttcttttccctttcttccctgatttaactttgcagagattccttccgttttttctagacccctgcattattttctgcatatctcccactttaaccctgtgccatttgcagctctcccacagaccttctgtgatccccatagtgctgtctctcatcccttgattccttttcctaactcaggctgtaactgcttttttgttcttttcctaagtcctaaatccttctgctagttctaagcacctttgttcctactatagtcttcctttatttaagtcagttcatctccctctcgctttgcccacaaccttagctttgagtttagtgatctaagctccctgcctgctggtcactctctctctccagctaagccacagggtcactcttacttttgtcccttcacttggattcccaccactctctgagaaagttgctcagcttctctgtctcatctttacaccagctgaactctgttgtttctccctagaccgggcaaggtcccccaggccaggatgtcaggcctggtgttggggcagcgggatgagcctgcaggccaccggctcagccaagaggagatcctggggagcacacggctggtcagccaagggctagaggccctacgcagtgaacaccaggccgtgctgcaaagcctgtcccagaccattgagtgtctgcagcagggaggccatgaggaagggctggtgcatgagaaggcccggcagc

SEQ ID NO: 585484 - DNA, 4001 bp, Homo sapiens
aaattccctcccaacaattacaccagtgaccccacaatcgagttgtgcaagaggagcaagaatattacacttctcagtcacattctcccactataaacctctgctttttcttttcttttttttttcttttctttttttttttttttttgagagagtcttgctctgtcgcccaggctggagtacagtggagcattctcagctcactgaaacctccgcctcctgggttcaagcaagtctcctgccttagcctcctgagtaggtgggattacaggggcccaccgccacactcagctaatttttgtatttttagtagagacggagttttgccatgttagccaggatggtcttgatctcctgatctcgtgatccgcccacctcggcctcccaaagtgtagggattacaggcgtgagccaccgtgcccggccaagaagtttttaaattgcattttttctttgtatttcttgagagagagagagagagagagagagagtgtgtgtgtgtgtgtgtgtgtgtgtgttgggggagtggtggtttggaagggagggctgtctgggtaaatttgtcttaataaagcagttcaaaaatttcaatctctaataccatctgacttttctcaagaacagtggttttcaggccgggtgcggtggctcaaggctgtaatcccagcactttgggaggccgaggctgccggatcacttgaggtcaggagttcgagaccagcctgaccgacatggtgaaaccccgtctctgctaaacatacaaatactagctgggcatggtgacgcatgactgtaattccagctgctcgggaggctgaggtaggagaatcacttgaacccgggaggtggaggctgtagtgagccgagatcgtgccattgcgctccagcttgggcgacaagagcgaaactccgtctccaaacaaaaacaaaaacaaaaacggtggtctcaaagtgtagtctgaggacgtctgtggggtctgagacactttcaggggatccgggaaatcaaaactattttcataaaaccaaaacgtcatttacaacttttccactcattctcttaccagtgtacagtgaagttttcccgtgacagcctgaggtgtgatataggaaaagattaaatacagaagcagatttgaatctagcttttattaagccagaaattaaagagagctgcaaaaatgtaaaacattgctgctccttactcagtttgttcagaaaatatatttttcataaagtattagttgtaacatgtaatgagttagtgttacttttaaatcaatatatattcttaagttttattttccaaaaagctaaatatagatagcaaaaacccacaaaaacaaaagctctctggagtcctgaactccgaaagtgtaaagtggtcccaaggccaaaaagcaggagaaccgctgctgaaaagtttttgctcctcctgcaaataactgcgcagaggatatctaacccacttctctggcttgagaccttcatctaaatttggatgccaggaaagcatctcaatttagttccatgggaagagtctgatatcttgcaccagctcagcctctaattttcgcgaggcaaatttcctgtcttctctgagcctcagtttattttgcaagcgtgaaaggaggggttttggaacatacgaagtacaaaatcttttccagctctgacattctacgattattcttgttcctatctttgcctggactcactaacttatatttaattccatgagagaattctgataaaactagcccctttctcgtcactttcctgtaaacggcgcgaggtgagggataaatatcaggaaaaatcctgatgggcagagcggctggtggcagggaaacttaaaagcaactatcccggtcagccctcctagtctccctagccaatccagtacctgccagaggcgccggcacacagcaccgaacgctgtccgcgccgccatcttgccggtcccgacctctcaggattgcttccggggttacagcggcgtcctcagaccatagagttccgcaaaagaagagagtacatcctcatgttccggcgctggaacaaccatagagacatgaacctgtgctttttgggggcgggacagttggctggccaggctggtttggctccggccagtgtctggatagttaccaagccctattaatgttttcacctttaaattgttgtgtgtgtatacacacacacacacacacacatttatttatttacttattttttccttttagagactgagtctcactcggctgcccaggctggagtgcagtggcacagtcatagctcactgcagcctcaaactcctgcctcaagtgatcctcctgcctcagcctcccaagtagctggactacaagtgcgtgccaccacagccgactaattttttgtttttttttttaattttcttgtagagacagggtctcattatattgctctcgttattttgtgggctggtcttgaattcctgtcctcaagtgatcctctggccttggcctcccaaaggactgagattacaggcatgaaccacaaagcccggactgaaactagtgtattgacaccatttacttcagtactggaataatgggtgatttattttcctatttttgcatttttcaattttttttgcatttttcaaaattttaacaaaatctatatttaacaagaaaaagaaaagtcggccactaccattgggtccagttgccactcagttaccttattgcagcggctttctaattatggttcttaatcctttcttccttccccacaccaattggaattcctgtgctccaaccattttgtataccgctgtcctactgatctttctaaattattcatttccttatgttactctagtatttaggaatttacaatggctagcttcacttacaacaagccaaagtgttttgtctaattattaatgtccaccataattttttccaagtaaaaagatgtataactgggatttgctataataaaaacttcttcaggctgggtgcggtggctcacgcctgtaatcccagcactttgggaggctgaggtgggcggatcacctgaggtcaggagttcgagaccagcctggccaacatggtgaaaccccatctctactaaaaatacaaaaaattagtggggtgtcatcgttgtgtgcctgtagtcccagctactcaggaggctgaggcacgagaattgcttgaacccgggaagtggaggttgcagtgaggcaagatcgtgccactgcactccagcctgggagacacaatgagactctgtctaaaaaaaaaaaaaaaaaaagaaaagaaaagaaaaggccaggtgcagtggctcggctcacacctgtaattccagcactcagcactttgggaggccaaggcgggtggatcacctgacgtcagaagttcaagatcagcctggccaacatggcaaaaccctgtctctactaaaaatacaaagtcaggcatggtggtgtgcacctgtaatcccagctatttgggaggctgaggcaggagaatctcttgaacccgggaggcagagagtgcagtgagccgagattgagattgtaccactgcactccagtctagggaacagagcgagactccgtctccaaaaaaaaaacttattccatttgtgcaaatctttaaaaatttatttttatttttccttttactttctcctcatcttaaagtctgcttctataatactatattgtcttttttgtgtgtgtgtgtgagacagtgtctcgctctgttgcccaggctggagagcactggcttgatcatagcccactgcagcctcaaactcctggggttaagtgatcctcacaccacagcctctggagtatctaaaactacaggtgtttgcgaccattttttattttatttttattgttttgtagagacagagacttgctatgttgcccaggctggtctcaaactcctggcttccagcaatcctctcaccttggcctcccaaagtgctggttttacaggtatgag

SEQ ID NO: 585485 - DNA, 4001 bp, Homo sapiens
agactagcaaaagaaaatgttttcatttacaagctttgaagataggtgattcttaagaatatagaatatggtagtgccttcatgtagaatcatattaattcaacctaacatttagatgaaggacttcagagacccatttgatttacagtccatccttttttactttttttaaagaggtgggcgttctcactacgttgcccaggttagactccaatttctgggctcaagtgatcctcccaccttggccttccaaagtgctgggattaaagatatgtaccactgtacctggcttacagtccatcatttcacaaactctccaaaggaaaaaattaagtctaacttcaaatatttgttgttaaaacaaaacgattcctcttgcctttttttctggaagcatagcaaaatctgcctcaactttgaatttcataagaatatgcaaattgtagccaatagtgtttgacacttggtagactccccaaaatggtatggagatatgcctattttgcagcatgggaacaaatgaaacatccaagtcctctctatcatctgcatgatttctttagtgtctttattaatgggtctactaatggataagttaatcaggcaatatccagacttttttttctagcaaatgctccacttcccttacgggctaaattcttcaaacatacttactatttccatctcttcatcaactatctctttcatttctccaaactggattccttgtttgccactctattgaaattgctgtttgaaagctacaaagagacctcttctgagacaaatccaatggccccttcattaggccctttttagacttttctgctccctctgacaacaatgatcactcttttccactggatacttctcagctttcgttaaaggatatgctgcccaatactatgccagatcctcaaaaaaccccacatctcttcttttgcacatcactcatcctttcctgcttccaggagtacacaaaggaaggctatgtcctaaaagaccgtttcactctccgccagattccatccttttgtgagcctgctcaagacacatcctctttatgaaaacttccaactgggtttgccgtttccagtaactgagtctccctgtacttcgtcacgtaaaaggctaacttgcatttattggagtgtgtatatacataatctcattagaacctaagcttttcagaaaaagggctgtattttctgtctccagaattccttcacagcttgaagcatagcacttggcattcagtaaactctcagttgatgctcgaatcaggccgctttcccagattaagattaatgaaaagctgaactaccatcctgcatttgcctatgtctcagctattcaatggcctttccactttggcctccccctcacagggagactagcggcccggggcagagaacgccgccatcagatcacagcattttgagaagggaaagtggaaagggaggctctgggagggtacccagatggccttccttcgtgatccagagactctttaataaaagagactgcgattcggagaacatggaaggaagaattaacatgcaaaccctttccgaaaacttttctgagccctaggacaggtttagtgtctgctcctgctaagtaagcaggcttttctctccgtcctcctccgccttgtgaagatactcacaaggggcaggagatcaagataaggcaccagggtgtggaaggggcttttaagcacgcctggggagccggtacctccaaagtttcagaatcggacgaaggaaaggtaggaaggagcgcaccggggctggcggaagcagtctctgccgctcttcttaatttcaggaggttgctgggacgcatgactcaccttccctgaacccgcgagctggaagccgagaccagctggtcgctgccgggcccgctagtagcccacggagaagccgcccacagccggacaccagagccttgagggccgccatcttcaaaaacctaccctgacctctcgtccatttccgcttccggaacgtagcgcccgccgccgcagtggtggggcaggaacggcggggcggggttgtagttcgcttgctcctgtcacatcatttctctcacctgtccgctttgggatacgaagagaggcttctgcgtcaagcctatatttcgtgttaaggatctaggggaggtcttctagctcctgtctgccaatgcctacaagtcttcaaggttgcattcgtttcctggaaggcttccttaggaaaatcgcacgcaacaccccacctatgtctttaaagctttctcttcactgcacgtgagctgtggacttttagcttctgtgactggggctagacctctacgggagaggctgaaatggttaggaactctggctctggagtatcggatatcaggcagacctgggatagaattgatacccccttcttccctgaccactgccacactgatctttgatttgcatatacttagacctctctctagccccagggccttgatacaagctatttcctttgtctgctctttagctgtctagttagcttctgcttatttcttagagctcacctcaaaccttatttccacagttttgcttgactgcccattctcagcaccagatgcctctccatcttagtgcttgggacaatttcagttttatgtttgttttgtatgtgtcttctcaccagactgtaagctccatgaagtcaggaacattgttttctgttgactcgcacatctccagcacttagaatagttcctgacacataataagagtacaatatatacttgttgaatgaatgagtagaatctattttatagggcctaggggaggactagaccctgaagattagatgtgataaaacataagtgatcggccgggtgtggtggctcatgcctgtaatcccagcactttgggaggctgaggcgggtggattacctgaggtcaggagttcaagaccagcctgaccaacatggtgaaaccctatctactaaaaatacaaaaattaggtgggtgtggtggcgggcacctgtaatcccagacacttgggaggctgaggcaggagaatcgcttgaacccaggaggcggaggttgcagtgagccaagatcacaccattgcactccagcctgggcgacaagagtgaaactccgtctcaaaaacaaaacaaaacaaaacaaaacaaaacaaaagggctcaataaacataagctagttaatagagcagttatggagatgactcttttcacaagttggactcacttgtgttgtaaggaagcttatggtaccaaagagaaaatacaactgccagtttttcctctttcagatttgtgagacgtataggatgttcctctggagctccacaggaaaggaaaatcattcacaactcagttcttcctatccttctctgattcaagatgggaaaatcaggcttattaaatgacatagcatgttttctgatgagtaggagaggagcccatcatccagttgggaccgtcaccctaataggaggatgcagagcagctgctgtatggaaaatgtgagtggcatcaccatagacagggagaacaggagaaatgcagcattgggttacgttaaaacatctcatttagcaaaggtaaacccggtgaaggggaaacttaaaagaaaagtcaatcaaggtggtagagactgacacatggattaggagtgaagcagagggtcttagtgaggtgtaggtctaggtgtcccagccaggatcaagaaagctttgactctccctatagcttccaagtttgttctgcatagatgaccttgagcttatagatgtatagatgaccttttgtgtttgtactacatcctctgtttcttcacccatttccaacttccaggaatccagtagagacaagggcagcaacagagccccacccagggcttgctttggacacagtgagctaaagcattcgagtgccaaccctcttctcattatcttatcttaacttatcataaacaaattttattttaaaaaacaact

SEQ ID NO: 585486 - DNA, 4001 bp, Homo sapiens
tctgaaatgaaagatcatacaagttattcctgggtgggagtgtagtgggtggctctgtccacttatctcaaatcctatctgaccctccctttccccctttagaggtaccttctgattccagatatttccagggctcatccttataaggagaaatgggaactgaggacaaagaatcttcctcagagggagctttggtgcaaagagtctggaggggaacctacaaaggagaagaaaaaaataaaagaatgagtttaaggaaaggactaaattgttttgcttatcacactttggaaaggaggaatgcacacatactgcattaatggaatataacaggaatgcatatgtaagttaagtatttttgttgggtttaaattgacataaatcaacaaccactctccttttctacaattggatcctgaaagaaaagctaagttaggggatatatgcctaaaaaacaatcttatttcagaagacaaataaaaagtctagtacaaggccgggcgcagtggctcacgtctgtaatcccagcactttgggaggcccaggcaggcggatcatgaggtcaagacatcgagaccatcctggccaacatggtgaaaccttatctctactaaaaatacaaaaattagttcggcgtggtggcatgcgcctgtagtcccagctactcgggaggctgaggcaagagaatcacttgaacccgggaggcggaggttgcagtgagccaagattgcgccactacactccaacctggcaacagagtgagatttcgtgtaaagaaaaaagaaaaaaaaatctagtacataaaaggtattcttgctttttggaaataaattgactctggtggaagaataaagtaagaggaaggatatctaggttcttggaactaagatgtgtggtggggaggggatgcagaagacaggtgagtctccaaatcaatccaatgaagtcactgagttgcccattttcataaaagctgaaggtcaacattctacagggcagaacaaacttgagtcctaacgctagttttaaagctaccaaggctgttattatttctgtgttgacctctgtcaccactcttcagtcccactttagggagtggcagctgggcaagccttcctatctcaccgtgccccaccaagaacctccagagaggtgagtacacaagactggagggaaacctcaattcaaaggacggagttaagctctcataactccgataagaaactgatttaataaagagagctgagaaactgtcctcaggtcgtaagaatatatcctgaccttattgagaaatagcaaggttggtagaaattgggatccctaatttccccaaggacattccagagcaacacagatttagtcaccacttgcatagttaacagctggttgtggcgctcgcttggggagtacatatgttatgctaaaattgcaacgatacagagattagcatggccccttaattagttaaataatttttaaaaagctggttatgcatgactgagggtggacaggggtcaattccatcacttaagttattttactgaaatggcattttggaaaaaggatgatacctaaccctggcgtttagtcctcggctcgggattagaaaatgcgcggggtgtggggggggggttgcaggaagtactgcctagacagctaagacacacgtgggaaggtctccactcgtggattcctgacagtggagcgacaacctcgagaaggtataaccaacttgaggttgtgcaaaatgtctttcgaagagttacctgaactctgtgagaacctcggaagagagatagcataggaagccgcctcagcacggtgtttaatacagacgccgccatcttgacgtacgcccaggacaggaattgacggaaaggcaactgcgcatgcttcaggaaactgagtagggcagggccaaggacaagcccgcagtgcggaaggcggccccacgtttgcgtcaggacggaagcgtgaaagggaaggcatgggggagaagctaatttcaactgcgtcacaatcgaattagaccccaaaattgcggttttttttggccagtcactacgactcttagatcgcattgttaaagtttgccttttaagcaattttgaaggcgatttttagcggtatcctctcagtgcgcatgcgctcttaggtttctaccaatcctgggtgagaaatgttctccagggcggaagtggcggaagcagaggaaagggaggtgctaggctcctggtcacgcgcacgcgacagggaggcaggaaggaggcggaagagagtgccagggaaaggggcggagcaaaggtgaagtgagagtagccaatcagttggcgagttgtcatttgggttgaccaatgagttcacgcctcgcgtataatgtctcgcgacaagggcgtttcactagcacgtttgggcgcgttgggcggcgtccgggtataaaagactccacccgagcgggcggccgccattctggggttcgtttagaggtaagtttgcctactttgtcgtctagtgggtaaaattttgcggagagcgttggatctgggaagcgggatagggatggatgggttcatttgagagccacggcttaaagcggttgcgatcaggatgggacacaggtttgtttggggacaacaaagatggcatttgtgagtgttttgaagcaacccgtactgattacatctttctcccttgtgttccttttatcccaggtttgaattttctcggagaaagacaggccggccacgaggaaaacagaaacaagccgcagcaacatctaagcccttgaaaggatcctgagagaggggggaaagggaaaacagcagccaccagcccaaccacttgtgtcttctgccccttcccacctatcttgcccaccccaccagcccacgctgcttgggacttgaaatctgtggccgaaggaccgtcactacataacttcaaaaataatcaaccaccctcccttcccaaaccacccaaattcactcatccagcgtttacttttttgaatccactcagaacttttttctgcgacccccctccctaaatggagttgggtgggggggaaatgaatactgagttggcctttattttttaaaagactttttgatccaatgaggccccctaaataattgagttttgggtcctggttggttgttttattttttttcctccaaaattttaccccctcccccctgagcccgaggtgctgacgtcgcaaaaaaattggatagtaagtgtcgaattttcaaaaaccagccttgcaacaagaaatcaacgtttcccgttgtgaaaccaaaaataatgagaggaagaaatgagaccatagaacaaatagagaactggagaaggaccaatctggtcacttaatctccattaaaaagggcctgtgggtctaaacagtcttgttctctctcccctaccacctatctcttccctgccttgctgcaggcaaagagagggtggagggagggccagcaagtgaggattttgatggttaacccttggtaatccagccaatttccagactgccaaagccatatgtgtttatataaggaggaatggttaccttcctctggttagcagcagtcttcaaaagggttaatgagctcacatacaagagatggtggatcttgtggcccagaagtaccacttctttgtgtgtgagacaagcagggtgcctttcaatttgccagattaataagcaatctgtacataaagattgcagggtaaggagatgggcagagagaagtaatagctcgctataactttttaaatgactgttaaatcctctcaattttaatgtaatttgcttggggtatatttgtgtggttaaaataggtggcaatctaggaataaagattgcaagacacttaggacaaaatataatcttagtgccagtacatacaagataatagttggggaggtaaagaatgtcttataattgttgcagattgcataggtatttaaaagcaaaagagtgattaacattttaacttgat

SEQ ID NO: 585487 - DNA, 4001 bp, Homo sapiens
tttctaattattactgatatctcagagttggatgaacaaatgtgcaacatcgtgttctgagatttaagaaaatgtctggtcttccttttcgcataatttaaaagactcttcatgcacatttggtagtagatacattttagaaaacataggtcctaagtaccacctgatctttcaagcattccagttgactggctcataaattatgaaacctatgattttacttcttttctacagatatcctttatagtgaatacttatgaaatacccccactgagctgaaatgacaaatctttattttaaaattgtctatttaaaacgtgattagactgagtcgaagtgagcggtgaagtataatcaagtacatttaatgactgacagaggacactgttttgtgcttccaaagtaattacactgattccagagactgtagaaaaaaaaacctatttctgatcttttttctactacatacacgtaatgattgttgtaatttgttagtatctgaagtttcatttcccttttacaaaatacaaattatcactataagggtaagatgaataaaggtaaaaggcatttgctgattacaaatgcctttcaatgttttaatgtcacaaattagagtgtaaccgggattgagattgtgaacgtcaatgcttgtcctaaaagtttcctccaacttgctgaaactggattcccaagcattatcaattgagggtgcagagcatgtaacccaacttagcctctccaataagtggagaatgaggtgctgacgaggagttactttgggaggcttttgagagcacaattgagaaaacatatttgaggacactgctatgttcttaataaagtcattcatttcaataccttttattcctcaaatatttgcactcacatttgtgaaaatcttaacttttcaccatgcttcaacatttggtgaaaaaataaacagcaaataagatttttttttctcaatccgatctccctggctgtttacttatagagtactgtagttgaaagtaagtcgttctcagaaacaactcagtctttagcctcacttctaggtgcgtccccaatctccgtgcaactggacaactgtataaatgtgtccataacgaagaaacagaaaacagggaagtattaatttatacttatgacttccgaacagatgaaatccttgtttaaaaacacctctcggccaggtgtggtggctcacgcctgtaatcccagcgctttgcgaggctaatgcgttaggatggctcgaggcaaggagtttgagtccagcctgggcaacatagtaagaccctgtctcaaaaacaacacagaaaaaacctcttacaagagcacttaagcgggtgttaactaacgtgatcacggtctgtaaacgattcctaggttgttcctatggttacataatctgcagcaagggcggtggaggagaaggcagagggttggccgctgggaccccggcagggcacagcgcacatagcaaggtcgcattctgagcgagtgggacgcagctcggcccgcgggcctgtgcaagctcacaggacacgcgggaggccgaggcctgcggagggcgcggagcaacaggcgcgccgcgccggacggctggggcagcagtctaaggtcactgcaagaccagcgtcccaaggctgttgccggggaagggcagtacctgccacgcggagccggtcgggcccgcaaagctgcgccgctcggctccttccaatcaggttggctcggcggccgcaggcagcaacgggaggacccacagaggtcacgtccaaggccagggcacacagcgtccgccggggaagtctcatcgcgcggggcaggaggcagggtaaactgcgcaggcattccatggtgctggagcaagaagcaggcagcagccagaccccagaccttcatgccggacgctggctgctcaggccgcagctctgacctgtcgctaccgcccgacctgcagactctgtgcaccaggcatgcgcggggcgtgccgcgcctgcgtgctacttccccacgcatgctcggaaggtacctgtgggcgagcctgttaagtccacagccaatagacgtttgcttgcctacctgtacctgcacctgtacctaagtgagggggcaggcgggctgggagatgggtggagcacgtttacctgcactaagtgagctgtccaacctaggttcttgggcgcttggagtgtcatggttttgtagtttgtggagaattttcatacctatgaaaattgcagtttggaaatgagcaggttacccattcccacatcatttaatttatatttaaatttaacgtggtgtagggagcaagagggaaagctcctacttttgccctctgaaagttgctggaatgaactaagtagacagattagcaggagaaaaaggcatacaaaatttgcttaacgtgcatagggaaaaatcacagaagagtgattactcaataactcaattaaggtccagatgcttgtatacccttctttgttgagtagagggagataggtatgaatgggcccgaaagccagacagtggtttgcaaatgattctccttggacattcagtgggacagaagtacaaacaatcgcttgtggacaagctgtgaaacttcactctgaacaaaaattgtcctattatacaggtaaagtttcccaggtaatctcttggagctaccctcagaagtatctatgaaaagtctcagtgtggctatgactttcagtttttgtctcttctctgggtgattaatctcttctgattatttaatgcgattcctaaggaacgggttttaagacaattgcatttctttggaaaagagttttctctgtcagataaggaaattccttatctggctgtgcaggaaaagagagccccttcaggtgcttggaaaaagtaagagtatcagagagacaaaaggaagggggaaggtgagagagagaggccttgatttttaggcttctttctgagacccttttaatttcctttaattcaaagactcaacatgccaccgggcgtggtgcctcatgcctgtaatccagcactttgggagccaagcactttgggaggccaatgttgtggaccacttgaggttaggagttcaggaccagcctggccaacatggcaaaacccgtctctactaaaaatacaaaaattagccgggtgtggttgcaggtgcctgtaatcccagctacttgtaaggctgaggcataagaattgctggaatccaggaggtggaggttgcagcgagcccagatcatgccattgcattccagcctgtactgcattccagcctgtacgacagagtgagactcccatctcaaaacaaacaaaccccaaagactcagcatgccaaaacatcatattttggggtattatggtttgagccccagtagtggcaaaaataatcaactgtcatatggaatgatgtcatgtattaaacttttgctataaagaatgaggagcacagacacataagatttctattccatatttaataaaatgtaagatagcatcaattttaaggtaccattattttatgtaccaccaagaaagaaaaaaaaactgataagttatgctttctaaacatgtagattgaaagacatatctcaattccagtctttaaaatatgaaaaaagtcttaggttaaatacagtatgtatgcatattttaaaaatatgagttaataaatttattgtcccttccacagtagtaatacaaggcagacacaagttccacagacttcctttcaatatctatgtatggacacaaagctaaggagacagagatagaaacattttattctgcagggtactgggactggggatggagtaggagggcagtgcacaaagagaagccttcacagaagagaggatgtttgacttgataatgtggggaaaagaaagagagatcagattgttactgtgtctgtgtagaaagaagtagacataagagactccattttgttctgtactaagaacaattcttctgccttgagatgc

SEQ ID NO: 585488 - DNA, 4001 bp, Homo sapiens
tgtcaaaaagagcctggcatctccctcccccttgcttcttctctgccatgtgacctctacacaccctgccttcccttcttccatgagttgaagcagtctgaggctctcaccagtgaagatgcccaattttgagctttccaaccatccagaaccataagccaaataaaactttttttttttttttaacaaattactcagagtcaggtatttccttacagcaacacaaaatatgctagacagtgaggtgagttaatgtaagtaaaacatggctgggcgtggtgactcacacctgtagtcccagcactttaggaggccaaggtgggcggatcacaaggtcaggagtttgagaccaccctggccaacatggtgaaacaccgtctgtgctaaaaacacacacaaaaaactagctgggtgtggtggcacacgcctgtagtcccagctactcgggaggttgagtcaggagaattgcttgaacccaggaggtggaggctgcagtgagccaagattgcgccactgcacttgagcctgggtaacagagcaagactctgtctagaaaaaaaaaatatgtgtgtgtgtgtgtgtgtgtgtgtgtgtgtgtgtgtgtgtgtgtgtaacacatctgcaatcccagagagcagaggaattcatggttccatccccacctctctggagaagcttgaggctctcgtggtctggggcatctggcatgaagtggatagtggagtcactagtatcatagtaggcaatgcccaagtatcctgaattccacagcacacacagatggatctgtccagcaaggaagaaaggaaatcactattagaatcactcataagtgtagggtttaccatgtcttatataatttaatcattttctcaaatctctgagataggcatcatcacccccatttagtgaatgtgaaacagccactcaggaggtaagagacttgcccagctcttcccaaccctgttttttttttctttctttctttgagacggagtcttgctctgtcgcccaggctgaagtgcagtggagcaatctcagctcattgcaacctccgcctcccgagttacagtgattctcctgcctcagccttcccagtagctgggataacaggcacgtgccaccacgctcggctaatttttatatttttagtagagacggggtttcgccatgttgcccaggctggtctccaactcctgagctcaggtgatccgcccgcctcagtctcccaaagtgctaagattacaggtgtgagccaccgcgcccggctcccaaccctcttttattctaacttcccatcaactctccattcaagtttctactcccctcagagacctcggccagctcctcctcctcctcgacttcctcctcctcggcctccctggggcccggcactggggccgggctggggaagccggaggaggccgccccaggtctcggtccctgcggtgtcctccttgggttcgctcctaaggaggccatgagcttggaggctctgcggatgcaaaaagtgagggcggttcggaagcaacgattcacagaggaggccggggtagggtggcgcgcagaatgcaaagcactaagtacttctgctacagggctgcggggcagggctgaggggcgtggagagctgtggacacaggaggtgaattctcgggtatttaactaaagtacagattgtgggaaactccacgcgccccaccctcattcctgtcacgcggaggttaccctttggaaggaaggggtctgagggccctgtggggcgagtcgtgcacgtcttatgtctctgcctctgccaaccacgcgccaggaccccagcctcacgcgcttatcttcctcctcccccagctgccgccatcgcagcgttttcccgccttttcagtaacctgagtcgctacaggtgggagaacgccccgctgaccgaccgccacgagcctgcaaaaggagcgcgccggcgcgtgagcgaggtgcgcgcgcacgcgccccgccctcctaaccgctgttgattggagaggcccggatccagcctagagatccgacagggcgaggaggagaagcggactgccgtagctgaagagtctggacgctgattggcctatttgccttcggggcgggtccagaacgttcaaacttcccgccctctgccgttgcttagcagccgggcctctagcactcactgtttctgggatttgattggcgcagtgggaagcccgcgagaaggtcggaccagggtccgtagtcccagtccctggaaggggtttgggaccgttgcgggggttttgagggggaggccaaacttaaagagccagaggcgcttattttttttcctgcaacaactcttaagttaatatttgtaccctctgagttaatatttatacagagcttagaacagtgcctggcaaacaaagtaagacctaaatgagcggtgtttcaaataaataagcggaaacaagcaggacttctgtctcagccctaccgtgcctgtttcctgggtacagggtatgaccacccccataatggcacgacagggcctaatttattatttaaacccttcaagcagaggtggaagcattcgaattacatcaaattctggcagagagaagtagttctgatcagaacactcacacccctactgggacatgcccataccccttcgcacttctacacacccctgaagacagagaggtatctatcattcatgcattcggcaactatttagtgcctattttgggccaggggttggactcaaagcggtgaacataatgaagtcactgctccataaagcttatttgtgcgtctgtgtgtgtgtgtgtgtgtgtgtgtgtgtgtgtgtgtgttgcgggggtggggttatgagggagaaagaaaaaaaatatatatatatatatatataatccctttaaatgcaccatcctccccagctttgttcctagtaccctgagatggggagattcctccccagccccccaacccaagaagttaggaaagatggtgggggtgagatgacctagctgtgctaaccagtaattggaaaatcccctccagcaagaaaggtgggggaacagagttaagggctgggttaatggttacccctggcaaatctgttgagcaatggagctatagaaacttggaggaggttggtgacagctctggggagtgtcagggagggacccaccttccaatctggggtgtgaagagattagggactagtttaccaagcccaggaaggggagggagtggaaagagaagcccagagagggaaagaggagctactgagataggagaaatgcagggacagggaggtgagatggagggaaacctctgttgcaggatttgggggtacagccctggctctgctggatggttccaggagagggcagcgttgcctgtcacctggtaaattaaggcacgataccctgtgggtagtcatgccagccagccaaagtcaatattgatatcaaggcagctgtagctataaagctgtaggagagaaaagagaggccgggagaggctgccaaacctgtttgatcttcaagctggccccatttacctaaggcttctcttggacacagaccagttggaacaggagaggaccctgagaagtagagttgttttgatcccctcccctcaatgggaaggggtcctgtgtgcagattttgagggtcaccatgagggaattcacacccacacagaggcatggaatcatacccttacaggatgttacagttcaagggaacgaacaccaaagatagcctttctgtcgggaggagagaaaaaggccctcccacaagcaggagaaaacccacagaagaggaagcacaagaggaaaccaccaactgctggtttccagcagcacatcacgtcactccaccccactcctcccccaagtctctccctttctttaagtttcaagctctgttttagttctgtgttcttgcactccaccatggttttctggaactgtaggtcttttgttggacagagggtgatgaggaggatag

SEQ ID NO: 585489 - DNA, 4001 bp, Homo sapiens
cctgcctcaactcaaatcttggatgggtctccaattcaatttttaccttcctccccccaagcttcttaactggaaaattctggcctaatgacccccatcaaaactgtacccatcccagccacacccacctaattctcacacctccacacgcccttcattccagctcactcctcaagcagcacacttcatctgtaccgcattgctggccaccaccaaatctgccaagtgcctatgcatccctctgttccagagacatccctacctcggtctcaatttctggtagtccctacctatcctgccacctatgtctccactgtcccttctgcccaatttcaatactcccgtgccccttctcctcatctgcccagatacaagcactgtgattcctctctctgaccccaactatgacttccatttcctcctccaaatgcgtcatcccccttccccgcttaaagcctcctcctagctcccctctctagacaaatcgctgccactcccctcccccaatgctggccctatctgttcccctccccccatacgcgtcaccctgtcccctcctcctaccaaatccgtcgtcgccatcaaatccagagcccccatctccggtaaaccgatagcattcccctgcaaaagtctttgccttcgcactctcccaccaaattaaatcacaatgcaacccaagacctccgtctcctctgtccacccccagtctggtgtccttctttccctcctaaatttctggccctggcgcccactttgtccccaccccaagacgttttaaatccatctctatcaaatccagagcctccgttcccctctaccccaattatgtgctcctcattctctaaacactttgcctgggcccccaaccttcctccccatctcttcacccaaacttcttgcccctcccccaattctattgcttcttccctcgccccaaattcgctcccttccctatcccaagtccatcgtccccactcctttatctcccaaatatgtttttccagcccatcgctccctccttggcactcccccaaatcgcttgttccttccaccctctcccgtatctgttattactctaaccccttggtctcctttctgtatcctaaaacccgtgacccctgcgttcccaactccctcacggcttccctcccatcccacccactcggccccccaaacccgccgtccccacccctctccccaaatccgtcgccattgactgcccgccccaatcctccaaatcctggcctgtcaccttcacatcagcctcccatctccctacggcgcctctggtcccccacctggatgagcagcttcacgtagagcaggggatggctgagcgccgtcacgcccgcgcccagtgccacgaaaagagcctcagtggtcggggcgttgtccccagaccccaggccccctgacccgccatccatcctgcgggccgagggctgagccgcaggccgagggtggcgaggatgtgcgcggtgcgcgggcggtggatcgcgagctcgagcctcgacccccgccgccgctccgccgcgagctccggctccagctccggctcccgccatccccgcggcaccgccgcgagcccagggcgccacttccgggtccgaagctcccatggcgcccggcggcgaggtcactccccgtcacgtgacggggccacgccccctcaccggcgtcagggggcggggccggggcgcaccactccaggccgcgggggagctcgggagcgtggtgcggcgggtgggacacgccggatgtggctccccggccggttggaggcctagcaggacactgggctgcgggccgggggtcaatggtggcgggcagccggggccccgggctcgggagctgtggcggcagccgcaggccggggcgctcccccgggatgcccagagcacgcgggggcggggttcggcgcctctggctgccagacgtccccaatatggtctgaggcgcttccaagccacctccctggcttcgggagttttctctgcagttctctgcccgcccctttgcggcccagatcccagtcgccgcggcctgcgtggaactctgcgcgagctgaatctcctgctgcaggacgagccccgaccccgagcccgatcccctccgcggtcccagcctctttgtccgatcgcattttccatctcctctgccaggaatgctctcccaaccagagcaaatccagatgtcccctcggcgactgtgggcaccctccccagctgtggagccttcgcacgccttcctcagagtccgtggttgtaaaatttgttttgctctaaagtatttgactgtctccctcactagatcctgagggttttagtgagtgcctcagtgtgagcacatgcaggcactgctaggcgcctgtagttgattcttagttaatacaagtgaataatcacaactagaccttaaattgcagggactatgtgacaggcactttttaaaatgctttatacgtgttgatttaagtgtaatcgtcacaagaaccctgcgaggaagataggacagcaagtgccctgttcctgtttgtaaacgtgcccgacactctgcaacaacacctacaacagaaccgtgctagttttgggggttcgcaataaaagtttctgtttgaacggatcctagagtgtgcagggacacagcaatggaagacctggtccctttgtctgtacttagtctatagccagttcattgtgagaaatttctttagatcgacacctgccactgttagtccgggtttcccagtctgtcctttctaactcccttcctgccttaccccctaaaaagctacctcccctcttcccactcctgataatgaacactatgtactttccacgttcaaagcatgccacactccctctctccctcaccttggcctccctaacccaggcttgtcctagtgaaatcacttgcaaagcctgctaaccctttcaacttgctgtgttttctccatcaaacacaattttcatcaaacatcccccaggagcaccttaaatgacttccttttgcctaggttctgatttagctttctcaataaggacctcaaagtcaagttcctagtgccacactaactctctacccagaagaggcgataggttttagtttgggggtggggggtgggggtaggggaggatgatttacttccccatccttctgaaacttcctcacaggaaccttttccttctttgggcttttcgtccccatttttctccaactgtctgtttttctttctgaacttggctgttcaccgttgagccttttactctgccttacatggtcacctaactttgggcctatactgtatttggccctttcaaactgtagtttcatgtgaagcagcaactttgtgttgtcttgcattgttttgtatcttccacaacatcagatataggactatgcacatagtacatgttcagtaaagtatttctaaatgatcgaacaatttctccaagtgaagaaattgaaggaaaaatagatcagctaaaccagttagacccgtagggtaccaagcagaagcaaatgttaaactgcacaatagctgtatttctacaactcagggctcacagagactccaagaggaagaaaaaaagaatcctcacaataaaaaatgtatgagccgctcaaagaaacgtgccatcatgagagagaatgggcaaaacaggaagaacttgagataatagaaccatctcaaagaaaattaaaaggaaagaagtaggtttcaaatgaaggcaaagataaataataggaagtactagtaaaaagaacaggaattgtaaaggaaaaaaaaaaacaggtgtatttgaaaaggtgccaaacagaacatctagaaatgaaaagtatactcactgaaatgattgaatgaaagaaaatcttcctcagcagtcaagctactgagcaacctggcaataaacctttagagctataaaggagttagctctggccaggcgcggtggctcacacctgtaatctcagcactttgggaggccgaggcgggt

SEQ ID NO: 585490 - DNA, 4001 bp, Homo sapiens
ccacccaaatctcaccttgaattgtaattatcctcacgtgtcaagggtggggccaggtgaagataactgaatcatgggggcagcttctcccatactatgctcgtggtagtgaataagtctcatgagatgtgatggttttataaacaggagttcccctgcacaagctctcttgcctgccaccatgtaaaatgtgactttgctactcatttgccttcagcaatgattgtgaggcctccccagccatgtggaactgtgagtcaattaaacctctttcctttataaattacccagtctccggtatgtctttattagcagcatgagaacagactaatacagcttataattctcaggcctaaatcatcctctttccattagatttattctggatttattgagctttaaatattgaacttgtttataaattaccttgaatagaagttttaatgtatctgtgcaataaatgtaattctgtgaagctcatgtctatattttgcttcctttgtatcttctgttggcatttgtcctatcaggtaaatatgttctcaataatcttatccctcttctaactcaaatcatcaaagctatactattacaaactcacctttgttccaactaaaaagaagcaacaactttgccttaaatcaaatgattacatataagtcattttcaaaatgaaacccaagaacaaatacaacagatccattccaatccaaaacgacatttacctgttctacaggaacgccaaaatattccagcatctctcttaagatattcagtatgagagacattgatgaagcaaatacagaagccaattcaaaggaacattatcagtttcttggtgcctttggggaaaattttagaaaatgttactcttgacaaataaatgccaaattgtactacataacctggaaaagtcctcttgatacacgacacagtcaactaatttctcctagccagcattcttttaagtcagagaaaaagaaaggaaggggaagtctgggggaaagagagggttgtaaaggaaatttcaattaattggttagattacattaaaacctcgtaggatgtttgagcctagttaatagagaccaatcaacaaactggacatctacttagtaggcaaggcttcaagttacatgccacagcgaagctcgctctttcctgaaagctttgggctgagactcttagcagatgggtgagtttagccaacccttgaaagcaggcaagggacgactcagtttttaaaaaaataaacagtagctcttctcacacacatatcctcacgtgtcaagggtggggccaggtgaagataactgaatcatgggggcagcttcccccatactatgctcgtggtagtgaataagtctcatgagatgtgatggttttatcaacaggagttcccctgcacaagccctcttgcctgccaccatgtaaaatgtgactttgctactcatttgccttcagcaatgattgtgaggcctccccagccatgtggaatgcccatccctcctcactcttttaaaatgagaagcatgaattccagatacgggacgtgacttggtcacccatctagtaacaggccgtgaccagagccggatcgcgtccctcgctttggtcacaagcttcctggtgctctccaaacacagcgtggtagccttgctcaccttcctccgaagccgagcccccgggaatcaccagaacatcaagcggagggcgttaggaatcctcaatcaaattccagactgcgccactccttgtgcagatcgctcagacgtctacccagacctcgacccagtttccacccgcgcgcctcggcttgcagccacaggcggtaacgatgccctcagcgaggaataagaggtcaacccggtgcccagccctggagcctcacgctcagccagggtaatgttatgggaagcgcgcccccgtcctcctgcgcccaaccaacccacctgctagtccctaggaccggactgctacttccgcatgacaggactgctacttccgcatcccaggacgaaatcaaactccgcgggccaggacccgtaaccagcctcattgggcaaaactgaagatcgctgcttctgattggtcattgcatgatgtcaggcaattcgggaagcgactgcttttccttctcaagaggcgggtcttccgagagtcagccaataggagctgacgggcagggcaggtcgcgttaggacagcgtcgctcccgcagggcaaggttttaggtacaaactcgtgagctggactcgcagtccggagttcgtaccccacagaactcttcgcagggagtgtcttactcgctacagccggaccctaagcgcatccgccttcccaagttcatctgacacaaaatcgcgatttattttttggtcatttcatttgttcagctaatattaaaatacttgtggaactggcagaagccaagcactacccccgagggttttgcagctttgcagtggctaggattcattctttcgttcactaaatacacctacgtatccaggctaccgaatattgggccggacactctcctggcttagccgaggatggcaagtgatatgacaggtgatatcccagttttcatttctgatttgaggttattggcttcatacgaaatagcttcctcttctgaatttcagcaagacgtgcactggagtgatataacaatttaagatgtgtgcctgctactgacataatttgaaaatctaagttttgaactaatttatctatggtcaacatcacttattcattcaaccaataatagatatctactacgtagcagacaccattctaagcacggaaaataccttaatgagagggcaggtcctcgtcctcctggagcttacaggccagcggggcatctcgttccattctaaccctaatttgcttttctctatagcacttatcatatatatttagttacgcttccactaccaccaaacaaaattgtagactccaggagaacaggaagttgttttgatccatgctctatctttccccagtgctttagaagagtgtctggtatataataggcattcagtctatttgttgaataaaatacctaaatgtggaatgacagaaaagatgataatgatttgggactaagcaactagcaaaacaattgatagcaataatagtgatatgcccagtagagctggatacggctgagtgagcgcagaacaaggatgatgatggatcagaaaccctagatggagtaattttctcaagttccttgtccttccctttgcccttgtgaataaatcacgactttataaccccctccctttcccactctcttatcaaacagcaaacagacagggccagaatgaaaacatccctccagaatgagaacggaaccactactcttccagctgcactattaacataggttaatattccaactgatttaagtagcaaggaggacccaggtcaaatactacatccataaatgctttgctgacaactttcttctaaattcttcagagatatttcttccagtttactaaagcattcataattccattttgacaaaaacattttatgtgattggacatctttttccattgctcatttttacacgaaattagattttcctgaactcttagaatgagatagggtccaagaaagcttttctgacatcacaaagctagcttttctgttgtctctgagtagtgttcaaaaatatagtggcttgctttctggagttttcctgtgttcccctcccccagtttgatccaggtagaaaacttgctattcacaagctgcatgttaacactttttaaagtatctagttgtcaagtattagctcattatattgaattagctcactatattgagctagtaagtctatgtccctaagattttttacctactgactctgatttctgtcctttaaatatgtaacatgttaaaatgaggagatcggacaagtatcaaataccagtctcctgatcctatgtgatttgaacatgtctcttctctagcaaagccttt

SEQ ID NO: 585491 - DNA, 4001 bp, Homo sapiens
accgaagagacggctgtctcatgaagctcatattccaggtgggtgagacagacaagaaatgagcaaagaaggaagtttcaggtaataatcagtttacctagaaaataaaacagcatgacgggagaagtttttttgccgcctatcctggcttcagactctaaccggtaagatgagtctcagcaacgtgcaggttaaaacctaatgacctgacgtgtaattaatcccagcgcttttgggggcagggatgatggcttgcgcccaggagttccagaccagcctggtaacagagtggtgctctgtctctatgaaaataaaataaaataatccgggcatggtagcgcacacctgtggtcccagttacactggaggctaaggcgggagaatcgcttgagcccaggaggcggaggctgcattgagccgagatggcaccactgaactccagcctgagcaacaaagcgagactccatttctaaaagaaaaagaagacagagaacaagaaaaactaaataaatggccccttaaaatcatccgccacataataaagagcctaggaaacgtattttactgagatgggagaaggggagtggggaggaaaatgggagagcagagggaggaaggaaaggcagagagaaaggcaagcaggcaatgactaagaaagaaggctagaaggaaagggaagaggatgtgaatggaggaggtggtccgctggccggggaaaccgcatcctggaactcgttcctaatcccagttccgagggaggcggaaggggctttcttgccacccccaagttgtcccgaagggctcgccctgcaaggcccgagacccgtgcgcccctctgggcgagggcggggaaggctggagcccaggggcggggaccgggacgggaaaggccgggcccggggctcccagttcgctctgggcccgcagaaaaccctgcaaacccagctgcgcggggactccgtgggcgctgcgcggcgaagctggaaaccagcgctgagacctctcggattccccccggcggctgtcccgggggcccggctccacctttgccgttccgggaaaagcggacgtcagccacagaccccagcccagcaggaggggccgcgcgcggggaagggcgcacaacaccagggagcttcgcgcgggcggcgctgggcccgagcccgcctctcccgagctccgcttgcccttcccgaaccccgggccagccggcgcgccgagccgcagccccgccctcctcctgctcctcgccccctcccctggtttccgccccagccgcaccgcccctttaccgtctgggtcgcgcccggcgcgattgcatcagagccggcggccggctgcgcacgtggagccgggcgtgcggtccatgccgctaggcgcccattggagatgcccacgcccacctgcgctgcgggcccggtcgggtactggatcccccgttctccgccagcgctcccggccgcagtgcccaagcccgcgtttcccgacacaccgcccggcccccctaatgagttggcaccaaacactcgcagccccgcgccccgctccccacggcggtcccgggcgctccgcccctgggtcggggccacagccgctggagacctgggccagggccagacccgacactcacctgacgatggagtcccgcgccgcgggcgttcggccgccggggctgcagctgctccgggcctggccatcctgcggccgccgctgtccaagcaggccctcccggccaccgccgccgcctccgccgccgccgctgctagcgcgacagggcacacggaggcggcgcggagggcccgggggctggggcgggcggcggagctggcgcaggacgagcggcagacgcgtgcccatggcgcgggacggctggttctcaggggacacggagctgcggctgccgagggcggcggggcgcgtgccaggggagcaggcggcggcggcggcggcggcggcgggaaggacctggcgcttcctcctcgtcccaggggcccctagggggcactgcacccggcggccgtgacgtgcggagggcgggggcctgcgagccgccggccgggatgtcacggctttgggcactttggtttggtaagctgtaccagacagagggtggggtgcggagtgggactcagactctgccctgagactcagcctccctcccttcagcctgaaaggccgaggtgacccttggtactcagggcgccaagtttagacgggagggcttggatttgctgtactggaggtggcctgaggataagaggctttgtaaccttaggcaggggcacttaatctcggtgagcttgcggggtcttcgtcagtaccacagagataacaatgctcttcttaaaaccttaaaaggattttatagtcctgattggttccagggcccctccaggggacccacgtccacaaatgctcaagtccttggtaaaaaaaaaaaaaaaaaaaagtgtttgcatatcacctacacacatcttcccatcataaactttaggtcatctccacattccctaagtcctcacctaacatcgtggaggggttcttggaaactgaaactttaagccaaatgactgtaaggaaaacagtttgaccacaggctaattgatatgagtgaagttcctacaacatatctgtggtcacaaaatcgcccctaaacttcgaaataaagaccaaaacacttctaatattaaacattgaaataagtgtgagccatgcatatatttaaggaagatttttagctcacgcctataatcccaacactttgggaggctgaggtgggcagatcacgtgaggccagaagttcaagaccagcttggccaacatggcgaaaccccatctctactaaaaatacagaaaattggctgggtgtggtggcgcgtgcctgtattctcagctactcgggaggctgaggcaggagaatcgcttgaacccaggagccagaggttgcagtgagccgagatcatgtcactgtactctagcctgggcgacagagcacagctctgtctcaaagaaaaagttttttttaaacaccccctatccctctcgcttagagaaaaataaagattaataaaagtgagatcatttttaccggcttattccaactcagggcacctcacagggtgtgctcacacacacccacactcacactcggatcgtgtagatgcaccaatttacctaaagtgcactgcacggctttgggatgtgacaggacaccagaagacagagaaaatccacacagacatggataaaacgtgacagtggacccagccagaaatctatttttttctcatcattataagaaaaccactgagcaaaatgatgaaatgatgttattccaggacctgctgtacttataatacctaatacaatgtaaatgctatgtaaatagatattacactgtacttttttatttctatgattttttattattttttgttattgtaattttttcaaatactttcagtcccaggttgattgaggatacagagggctgaccataagttccaagtaaagtggatatcagattgtaattttatgattcccaagtgagggtcagattgttaactttatatttttacaaccttatacccttataattcccagataaggtgggaataaaactagtccaagttacagagattggttttccattagccgagcaccatactgggacagtgctggaaggacccttcatacaatcctaacaaaagtagggaattgagagctattgtcttgaccttcaacctttggaaactggggtccagagaggcccatctgtttactggcagagctgggagattgaggctgcaatgagctgtgagcgtgtcactgcactccaacctgggcaacagagtgagaccctgtctcaaaaaaaaaaaaaaaaaaaaaaaaaggcttcctgaagaaagtgaaagaggtggcagctggaggcaagaccttagcagttgagctaagggaaggtcagctaagggaaggaaatgagctaagggaaggtcagtgtt

SEQ ID NO: 585492 - DNA, 4001 bp, Homo sapiens
gccaccatttgttgagggacttgtcttgtatgtgacagtcctgggctatgtattttgcatgtgtcctctcacataattgtttccataaccccttgaggtaagtactgttactcctcccattttcctgaaggaattgagtttggagaacccagtgcaggccctaaagccccctactaacctctttactcatctctaaggcagtcatggctttaaacctaaaagtatgcatgaatagcccaggcgcggtgggtcacgcctgtaatcccaacactttgggaggccaaggcagtcggatcacctgaggtcaggagttcaagaccagcctggccaacatggtgagacatcctgtctttactcaaaatacaaaaattagccgggcgtggtggcgtgctcctgtaatcccagctactcgggaggctgaggcaggggaatcgcctgaacctgggaggcagaggttgcagggagccaagatcgtgccattgcactccagcctgagtgacagagcaagactccgtctcaaaaaaaaaaaaaaaaaaaaagaatatgtatgaataaaacccacagatgaccccaaatcttgaagcattccttctgtaaccatttcacaagtgcttattacatgctgggcactctctccaggacctaggatatagcaccgaagagacggctgtctcatgaagctcatattccaggtgggtgagacagacaagaaatgagcaaagaaggaagtttcaggtaataatcagtttacctagaaaataaaacagcatgacgggagaagtttttttgccgcctatcctggcttcagactctaaccggtaagatgagtctcagcaacgtgcaggttaaaacctaatgacctgacgtgtaattaatcccagcgcttttgggggcagggatgatggcttgcgcccaggagttccagaccagcctggtaacagagtggtgctctgtctctatgaaaataaaataaaataatccgggcatggtagcgcacacctgtggtcccagttacactggaggctaaggcgggagaatcgcttgagcccaggaggcggaggctgcattgagccgagatggcaccactgaactccagcctgagcaacaaagcgagactccatttctaaaagaaaaagaagacagagaacaagaaaaactaaataaatggccccttaaaatcatccgccacataataaagagcctaggaaacgtattttactgagatgggagaaggggagtggggaggaaaatgggagagcagagggaggaaggaaaggcagagagaaaggcaagcaggcaatgactaagaaagaaggctagaaggaaagggaagaggatgtgaatggaggaggtggtccgctggccggggaaaccgcatcctggaactcgttcctaatcccagttccgagggaggcggaaggggctttcttgccacccccaagttgtcccgaagggctcgccctgcaaggcccgagacccgtgcgcccctctgggcgagggcggggaaggctggagcccaggggcggggaccgggacgggaaaggccgggcccggggctcccagttcgctctgggcccgcagaaaaccctgcaaacccagctgcgcggggactccgtgggcgctgcgcggcgaagctggaaaccagcgctgagacctctcggattccccccggcggctgtcccgggggcccggctccacctttgccgttccgggaaaagcggacgtcagccacagaccccagcccagcaggaggggccgcgcgcggggaagggcgcacaacaccagggagcttcgcgcgggcggcgctgggcccgagcccgcctctcccgagctccgcttgcccttcccgaaccccgggccagccggcgcgccgagccgcagccccgccctcctcctgctcctcgccccctcccctggtttccgccccagccgcaccgcccctttaccgtctgggtcgcgcccggcgcgattgcatcagagccggcggccggctgcgcacgtggagccgggcgtgcggtccatgccgctaggcgcccattggagatgcccacgcccacctgcgctgcgggcccggtcgggtactggatcccccgttctccgccagcgctcccggccgcagtgcccaagcccgcgtttcccgacacaccgcccggcccccctaatgagttggcaccaaacactcgcagccccgcgccccgctccccacggcggtcccgggcgctccgcccctgggtcggggccacagccgctggagacctgggccagggccagacccgacactcacctgacgatggagtcccgcgccgcgggcgttcggccgccggggctgcagctgctccgggcctggccatcctgcggccgccgctgtccaagcaggccctcccggccaccgccgccgcctccgccgccgccgctgctagcgcgacagggcacacggaggcggcgcggagggcccgggggctggggcgggcggcggagctggcgcaggacgagcggcagacgcgtgcccatggcgcgggacggctggttctcaggggacacggagctgcggctgccgagggcggcggggcgcgtgccaggggagcaggcggcggcggcggcggcggcggcgggaaggacctggcgcttcctcctcgtcccaggggcccctagggggcactgcacccggcggccgtgacgtgcggagggcgggggcctgcgagccgccggccgggatgtcacggctttgggcactttggtttggtaagctgtaccagacagagggtggggtgcggagtgggactcagactctgccctgagactcagcctccctcccttcagcctgaaaggccgaggtgacccttggtactcagggcgccaagtttagacgggagggcttggatttgctgtactggaggtggcctgaggataagaggctttgtaaccttaggcaggggcacttaatctcggtgagcttgcggggtcttcgtcagtaccacagagataacaatgctcttcttaaaaccttaaaaggattttatagtcctgattggttccagggcccctccaggggacccacgtccacaaatgctcaagtccttggtaaaaaaaaaaaaaaaaaaaagtgtttgcatatcacctacacacatcttcccatcataaactttaggtcatctccacattccctaagtcctcacctaacatcgtggaggggttcttggaaactgaaactttaagccaaatgactgtaaggaaaacagtttgaccacaggctaattgatatgagtgaagttcctacaacatatctgtggtcacaaaatcgcccctaaacttcgaaataaagaccaaaacacttctaatattaaacattgaaataagtgtgagccatgcatatatttaaggaagatttttagctcacgcctataatcccaacactttgggaggctgaggtgggcagatcacgtgaggccagaagttcaagaccagcttggccaacatggcgaaaccccatctctactaaaaatacagaaaattggctgggtgtggtggcgcgtgcctgtattctcagctactcgggaggctgaggcaggagaatcgcttgaacccaggagccagaggttgcagtgagccgagatcatgtcactgtactctagcctgggcgacagagcacagctctgtctcaaagaaaaagttttttttaaacaccccctatccctctcgcttagagaaaaataaagattaataaaagtgagatcatttttaccggcttattccaactcagggcacctcacagggtgtgctcacacacacccacactcacactcggatcgtgtagatgcaccaatttacctaaagtgcactgcacggctttgggatgtgacaggacaccagaagacagagaaaatccacacagacatggataaaacgtgacagtggacccagccagaaatctatttttttctcatcattataagaaaaccactgagcaaaatgatgaaatgatgttattccaggacctgctg

SEQ ID NO: 585493 - DNA, 4001 bp, Homo sapiens
acccacctgaatgtatgatgagaaaagtataatcttttaggaaatcatatagcctcctctcccccacccacaaaaccgcagttaatagtatatatttcttcacagttatgagctgaatggttattttaaagaagaatttcaggaataaataagtgatttattcacaacttttacaaaacaagtaaatattctaattactgctcgctcctaagcaaaaggaaggaggaaagacaaaagtatacataatttacaagttgatgttttagctagtatctatcatgatgctacagaacggccatccaaccattacccattagagcaaaaaaagtactgtccagtactaaacacaaaatccagggacgacaacccagaaggaatataggatgcaaaaggtagcatggcgctgggcacggtggctcatgcctgtaatcccagcattttgggaggccgaggcgggcggatcacaaggtcaggagatcgagaccatcctggctaacatggtgaaaccccgactctactaaaaatacaaagaaaaaaaaaattagccgggcgtggtggtgggtgcctgtaatcccagctactcgggaggctgaggcaggagaatggcattaacccggaaggcggagcttgcagtgagccgagatggcgccactgcacttgagcctgtgtgacagtgcaagactctgtctcaaaagaaaaaaaaaaaaaaaaggtagcatggttcttccaaaaggcatcacaaaatcttgacagaaacacaaagatcaggctgggcagagtactgagcacctgcaatcccagctactggttaggcagaggcaggaaaagttcttgagtccagaaagcggagcctgtaatgtgcaacgatcgtgcctatgagtagtcactgcactccagcctgggcaacatggcgagaccctgtctctaaaaaaatgtttttaaataaaaacacaagaaccgtttaataaaggatttttttattttattaatattatcattattttgagacggagttttgctcttttgcccaggctggagtgaagtggcgcaatctcggctcactgcaacctctgcccccgggttcaagcgattctcctgcctcagactcccgagtagctgggattataggcgcccgccaccatgcccggctaatttttgtatttttagtagagacggggtttcgccgtgttggccaagctggtctcaaactcctgacctcaggtgatccacctgccttggcatcccaaagtgctgggattaaagaagtgagccactgcacctggccataaaccattgttaataatgttaattcaccctttatctggagtaacatagtagaaggtaaacgcagcaatgaactaagaagctaccagcgagtagttggtagctccctttcccaaggcactgaccccgaaccccaacctcctacaacggacgactgtcagcagcagcataatctatggttcgcagaatagactaatatagagttctggcctggcccgcctgatccttgcgagacactgatcgaggctaaaaccacagaaggtaggattctcactagctttgaggaaaggaagaggtcccccgcttcagaccgggggaggcgggaaggaagcagcctgcgtcctacgccaagttccacagcacccgcgctcctcaccgatcgtgtccacgcggtgagtgaggagcagagtccgagagccgcaccgagcggcggcggtggctgcctcagtcccggcatgtcctccaccaatgactatcacgtcgaagtgcggagtccggggcgccgcgctgtcactgctcaaccgtgccaacggaaattgctgcttggtgaaggaaaccgcgacccaacggccacagcctcggaagtagaacatgctgggagaaaaatctatctgactttgaagctgacacgagtgacggtcaaaaaaacttacgcaacaagagacaatctgcagggcgcggccatcttgctttaatatcacggggtaggacgtctacgtccagcgtcgccgctgattggcggtttggagctactttcctggtgagggagatgggtgatcgcacggagggccggttgtgtattttctttcctagttcgtgcgggctttttttattattattattttttatttttatttatttatttatttatttatttatttatttatttatttatttatttatttatttattttgagacagagtctcgctctgttgcccaggctggaatgcagtggcgcgatttcggctcactgcaagctccccctcccgggttcgcgccattctcctgccttagcctccgagtagctggggctacaggcgcccgccactacgcccggctaattttttgtatttttagtagagactgggtttcaccgtattagccaggatgttctcgatttcctgacctcgtgatccgcccgtgcgggctttttttgatttcctgtggttctgggttgggagctcctactaaaggtcatcttttgtactttcttaggccctgcagtccttatcgccaggtggccacctacgatcaatgaatttgatcactttgccttatcagatctttgtgatctgacaatctgatacaccgtcaccttctgtttgtctataaaaactaagggctgaaaataagaatagattcgggccgggcgcggtggctcacgcctgtattcccagcactctgggaggccgaagcaggtggatcacaaggtcaggagatggagaccatcctggtcaacatggtgaaaccccatcgctactaaaaaaaaaaaaaaaaaaaaaaaaaaaaaaaattagccgggagtggtggcatgcacctgtaatcccagctactcaggagactgaggcaggagaatcgcttgaacctgggaggccgaggttgcagtgaaccaagattgtgccactgcactccagcctgggcgacagagcaagactccgtctcaaaaaaaaaaaaagaaaaagaaaagaaaaagaatagattcgaaaggagttcaaatatatttgtggactgaaagattcatgatggtgcctgggcatggtggatcacgcctgtaatcctagcactttggaaggccgaagggggcagattgcctgagctcaggagttcgagaccaatctgggcaacatggtgaaaccccgtctgtactaaaatacaaaaaaaaaaattagccaggtgtggtggcatgcacctgtagtcccagctacttgggcggctgaggcaggagaattgcttgaacccgtaggcagaggttgcagtgagccgagatcgtgccactgcactccagcctggcgacaagagtgagactctgtctcaaaaaaaaaaaaaagagagagagagattcatgatggctaattggttaattagaagaatcggttggttggaggttaaatgtccagccttttggaattcacagcctttctcaattcacagcctttctcagaaaggcaacgtttgactggagaataaaacaagtgtggtattgcaggatctggccagcagcccacaatgcaatggggctctttctttgttcccaggcggattggcaggtcgagaaataatagacacacagaagatattgaaagctgggtccaggggggtcactgccttctggtcctgcaatgctgctaatacactggatataccagcatttattattaagtttagtgagggcaggggtaggttagtgagggatttagggtcatttgattatgaggtgagatggtcacatggggatgaagtaattctttaacataacatctgtatgcagaagtacagtatacagagataagaatttacaatatattgtgtgcatcagtaatttctaacagagccttaaaacagaaacagtctttccataacctatgattagcaagatattaatcagcagtaacagttgcagcaaaagctggttacaaacaatccatagaaacaggatgtgaagctagacaatcagttagaccagaaattctcagaagggagtatgccttaaccctaa

SEQ ID NO: 585494 - DNA, 4001 bp, Homo sapiens
ttcagtgtgagctgaaaaggttgttttacctttctatgtcaggtactacggattttttttttttttttttttttttgaggcagggtcttgcgctgtcacccaggctggaatgcagtggcaccatcttggctcactgcaacctccacctcccgggttcaagcgattctcccacctcagcctctcaagtagctgggaccacaggcacgcaccaccatgcccagctaattttgcattgtttgtagagacagggttttgccatgttacccaggctggtctcgaactcctgggctcaagtgatcggcccacctgagcctctcaaagtgctggaattagaggcgtgagccaccacgcctggccaaggatctcttacttcttgaaattttctattggcttctacagcttcatttatttatctacttcagggtcacaaagctctggctgtttttttcttgaccttttatagccttcttctctgcctgctcctcaaatactgtgtatttctggccttgttagacttgtttctatcttaacacattttccctgagtgttctcatctacttctaaggtttaatttaccacgtactgtatatctcgagagctctcatatgattatttgggctcaatttttctcctatgtcagtaattttttctcctagactagtacagatatctttattggaattccttttcacaggtatttttaacttaatatggcattcaatgcaaaactcatctttttaaaaaattcggtccaacttttatactttcatcttaattaacagtaccactcgtgctgaagccagaaacctaagacttttcttagaactaactctctccctcatccttctcagggcataagccactaaatcctaacttgtttctcaaaatgttttgtgagtcagaactatgcctatcaccatttcttctttggattgtttcaactgcctcctccctggcctgtcagccaccagcgtttctggagaatactccaatttatcctcagcgcatgccaccattaacttttctttacaaagacgtgaattctctgcttaaaaacatttgctaactttccatggtctataaaaaataaatccaaattctttgtcttgcaaggttcttaactatttttctggcttcatgtttctatgacatcatctcccacctattctatacttaggccatactgaatttcccaatttagtacctttacccacgtataggtctgagattctgagtcctaagtctgctattaacaagcactgccctgatactactgcaaatgggtctccacaccacactttgagaaacaccgctgtggagcccatcacagggacagtgccttatttatccttgctgagctaatgagctcttgcccgagtccacaactaataagcatgtaaaaggcggcagagcgccgtggcaaaggagcacaagagagcccacaggagaggatgggatcacagcacgtaatgatgtcctgacctctgatccaaaataaaaacggctgcaagtgagtaaagagtttcaaactcgggtagtgtgggcagtggaaaagtcaaacgaagagtcaagaatgtgctctgacgcctctcccccgggcccgacccttaccgtgcagcaagtgctcagtctcccgcagctcccgctccttctcgttcagcagtttgatcaccgccagcaactcgggcctcctgaccttcaaatgggcttcagaccccgcctggcgctcgaggaaggtccgcaagggcccgccccgggtgaacagctcctccagcggcgggctaccggagctcaggggccggcgggctgggccaacggcccggcggggccagagccaccgggcagcgccccacagaacccgggaccgcatccttagtccgagatcgcggaccctgaccggaaccggaagttccggacacagcagccctcgcgacaacacccagaatttggagataagggtgagagcgcaccaagccccgcccagcgcaagcgttgctttttaaaggattttccggaagccttggcgggaacttcctgccaagcgtgagaacgctgcgaacttcccggaggccaaaagttgagggggctgagcggagcgtgattggggaggggcgggcctgggagaccttgggcgcctcctctgaaagcctcttggtaggtatccggttgatgggtgacgtgtttggccggaaagggagagcagcagattgcccctctgttttctgatagtgaggatttctttcccatgcactgagtcggggcctccagagccgcagtgcagggcagtcgagggtccgctgcagggcggaggtcacagccgcgcaagtcgtcagtctccggtgcagggctgccgctgagtcttcaagagcgagttttattatggacaggcgtgtgtttattcctcctccttttttcctgcttatgtttctcttgtccacggtgggtgaggttcgtggtaataaggacttgataagtgtattatgagataaccactgaatgaatttgcacaatagacgtgcgtgcccttcatctgccgcgtcatttacttgctttcaaaggactttattattcacctgcccattcattttcacttagtcccacttatcgtcagctttttaaagaggtggagtgattccgtgttacagcaacctacagcccaacaaagccttcagatatctgcctccaggagtccaaccctcatccctttccaaagaactggtagcggataggtgccagcaataccgacatttattggcacaatgctttgcacttttcaaaagacctgttcacagctcaacggagaaataaatatgagggaataaacacaaccaagacagtcctgggaatgcaagggctaaacgctcaatctgagaactgccactacctaactggtttgggcagcgtctactaagtggtatttcactgttgagagaggtgatatattagaagtacgaaacttctaatttattcataaaaaataaaatggtaaaaaatgggaacccttatcaaggttaaaatatccttaggtcatctaatcgaaactgttaagtataaacattcttagaaaataacgtttgcattgcctctctcttttcatctcttagcacgataacaaatgcagagtgagtggaagaatgaaatgactcttcaaacatcaggaagcaaaaatagttttttgctacttaaaggctccacctaattatctcagttcttttcactttgtgtattcaagctacacaactttatacaatcgttctgctgttgaaacccattttattttaatcctgatctgaggatagaacaggactgatcaggatgtttttatctctattagaacaattgtttcccaagtctgaacttaactttgaatttatcttaaccatggaaatggtgagaatcacttgaactcaacatggtatatctctcagttgagttctcagaacataagtcatttcaacaatatattttattatttataaaaggtgaaacattttaataattaaaaccttatagaacaatgtaaagaatctagccagaattttattttcccccaagtgcataagcaatttaagtaacacatagaagtgtaccttttattcctatagtgttatataccaatgaggaaacagtaactttctaaggatacattgttgaattctttattaattcaaaacattttaagaaagtcagtgtaatgcatatgcattttacaataacatccataggtttccacaatctagtaaaatgaaaacagctgtattttgatttactttgaaaactcaaacctatagttcgagacttctgaatatttttacattactgtcatgctcaaattctgttacatggtgaaaattctagcattttccagaagtatattattgtacataggtaaaatgataaaattgattctaggaagggggaaaaaaaaacccagaaaaacttaaattggaggaaacataatctggattatctattcaatttgtgaatacccaccgttattc

SEQ ID NO: 585495 - DNA, 4001 bp, Homo sapiens
tttgttttgttttgggggaacaagtggtttctggttacatggataaggcctttagtggtaatttccaatattttggtgcacccatcacctgagcagtgtacacggtacctaatgtgtagtattttatccctcacccctctcctacccttccctctaattcgccaaagttcattatatcattcttatgcctttgtgtcctcatagcttagctcccaattataagtgagaacatatgatatttggtcttttttacctgagttacttcatttagaataatggtcttcaactccatccaggttgctgcagatgccattattttgttcctttttatatctgagtagtattctatggtgtatatataccacattttatttatccactcattggttgctgggcatttaggctggttccatatttttgcaattgtgaattgtactgctgtaaacatgtgtgcaaggcctttttcatataatgacttcttttcttctgggtagatacccagtagtgagacttctggatgaagtggtagttctacttttagttctttaaggaatttctatactgttttccatagtggttgtactagtgtacattctcaccagcagtgtaaaagtgtttgctttttaccatttacgtgccaacatctattagtttttgatttttaaattatggctattcttgcaggagtaaggtggtatctcattgatttgcatttccctgataattagagatgtttagcattttttcatatgtttcttggctatttgtatatcttcttttgagaattgtctattcatgtcctttgcccactttttgatgggattatttgtgtttttcttgctgatttgtttgagttccttgtagagtctggacattagtcttttatcagatgcatagtttgcaaatgttttctcccactctgtgggctgtctgtttactctgctgattatttctttctctgtgcagaagctttttagtttaattaggtgccatctatttatttttgtttttgttgtatttgcttttgggttcttggtcatgaactcttggcataagccaatgtctagaggagtttttccaatgttatcttttagaatttttatagtttcagatcttaaagtttttcatccatcttgagttgacatttgtatagggtgagagatgaggatccagtttcattcttttctctttttttgagatggtatttcgcccttgttgcccaggctggagtgcaatggcatgatctctgctcactgcaagctccatttctgagttccagcaattatctcgcctcagcctccaaagcagctgggattacgggcccccgccaccacacccagctaatttttgtatttttagtagagatgggccaacacccaccatgttggccaggctggtcccaaactcctgatctcaggtatccacctgcctcagcctctcaaaccactgggattacaggcatgagctaccacgcccctagggtaacttgttccgttagtcaaattattggatcaattgtacgtggtaactcgttttgactggtgaagtctcagcatatgttgctcggaggttgggttatactccgaggtcgccccagccgaaatttttaatgcaggtttggtaggttagagcctgtgggcttattgggtgttgtttgcattggtaaattgaagctccatatggtcttctcgtcttgttgtattatgtccgcctcttcacgggcaggtcagttgcagtggttgaaagtaagagacagctgaaacctcgtcgagccattcatacaagtccctatttaaggaacaagtgatcatgctacctttgcacggttagggtaccacggccgttaaacatatgtcactgggcaggcggtgcctctaatactggtaatgctagaggtgatgtttttggtaaacaggcggggtaagatttgccgagttccttttactttttttaacctttccttgtgggcatgcctgtgttgggttaacagtaggagtaatacagtttcatttttttacatatggcttgctaattatcccagcaccatttgttgaatagggtgtcctttacccactttatgtttttgtttactttgtcaaagatcagttggctgtaagtatttggcatcatttctggcttctctattgtgttccattggtctatgtgtcttttttaataccagcactgttctgttttgtaaactagttagtatagttagaagttgagtaatgtgatacttccaggtttgttctttttgcttagtcttgctttggctatgcaggctcttttacttttacttttttttttttttcctgagacagagtttcgctcttgttgcccaggctggagtgcagtggcgcaatctcagctcactgcaacctccacctcctgagttcaagtaattctcctgcctcagcttcccaagtagctgggattgcaggcatgcatcaccacagcaggctaattttgtatttttagtagagacagggtttctccatgttggttaggctgatctcaaactcctgaactcaggtgatccgcctgccttggcctccaaaagtgttgggattacaggtgtgagccaccatgcccagcttggctcttttatggttccatatcaattttaagttgtttcttttttttctagttctgtgaagaatgatgatgggcatactttgatggtattgcagtgaatctgtgtattgcttttggcagtatggtcattttcataatattgattctacccatccatgagcatggaatgtgtttccatttgtttgtgtcatttatgctttctttcagcagtgttttgtagttttccttgtagagatcttttacttccttagttaagtatattcctaagtattttatttttttgcagctgttgtaaaagggattgagttcttgatttgtttctcagcttcatcattgttggtgtacagcagtgctactgacttgtgtacattgattttgtatcctgaaactttactgaatttatttatcagatctaggagctttttggctgagtctttagggttttctaggtacacaatcatataaatagcaaacagcgacagtttgactttgtctttaccaatttgaatgccctttatttctttgttttgtctgattactctggctaggacttccagtactatgttgaatagaagtggtgaaagtgggcatccttgtcttgttccagttttcaaggggaatgctttcaagttttccctgtttaatgtaatgttggctgtgggtttttcatagatggcttttattaccttgaggtatgtcccttctgtgccaattttgctgagggctttaatcataaaggtatactggattttatcaaatgctttttctgtatctattaaaatgatcatgacttttacttttaattctgtttatgtggtctatcacatttattgacttgcatatgttaaaccatcgctgcatccctgttatgaaactcacttgatcttgatgtattatctttttgatatgcttttggatttggttagctagtatttttgtgaggatttttgcatctgtattcatcagggatattgatatgtagttttttttgtttgtttgttatgtcttttcctggttttgtatttgggtgatactggctctatagaattattcaggggagattccctctttatcttttgaaataatttcagtaagattggtactgattcttctttgaatgtctcattgaatttagctgtgcatccatctggtcctgaacttttatttgttggcaattgtttttattactgattcaatctcgctacttgttatatgtttgttcagatttttttatttcttccttatttaatctaggagagttggatatttccaggaatttatctgcatcttctagattttctagtttgtgctcataaaggtgtttgtagtagccttggacaatccgtttgtatttctgtgatatcagttttaatatctcccatttcatttctaactgagcttatttg

SEQ ID NO: 585496 - DNA, 4001 bp, Homo sapiens
tctgcacttgtggagactaagctaagtcaaccacccacccacaatgccagagttacatcatctagtttcactggtagctaacctttttccacattctgctatgcaagatacaatacagatataaagtattataaaagaattataggactaggtgaaactagtatatactgatcaatttttttcttaagtagtattgcttccttcttggaaaatatttctcagaataatattcagaacacacttatttcagaattacttaagggagcatgttgaaaatattcttaagcaaatcattccagactaaatgaattagaatttgagatggggcccaggagtctgcatgtacaacaagaagccaggtgactatatgcattcaagttccaggggcccttgatcactatggccaaggctagagaagaacgagttatatgtagctcaaatacataagagctcccaggaataagggctgtaaaccaacgtctaaaggtagagggaaggcttttaacttcttggaggcttggctggagttaaggttatgtcaaatttttgcccttgatttcccagaaggatgaagacattcaacctccccagcctgtacgtgggaagctgacgaggaattaggtgtaggggtaggagagaaattgagtttgtagaatatagaagagtggtattttattttattttattttattttattttattttattttattgcttatttatttatttgtttttgagacggagtcttgctctgccgcccaggctggagtatagtggagcaatctcagctcactgcaacatccgcctcccacgttcaagcgattctcctgcctcagcctcctgagtagctaggattacaggcataagccaccccgccaggctaatttttgtacttttagtagagatggagtttcaccatgttggccaggctggtctgaaactcctggcctcaagacatccacccgccttggcctcccaaagtgctgagattacaggcgtgagccactgagcctggccttattttattattttatttttttgagacagagtctcactccgtcacccaggctggagtgcagtggcaccatcttggctcactgcaacctccgcctcccgggttcaagcgattttcctgcctcagcctcctgagtagctgggagtacagggacaagccaacacactcagctaatttttgtatttttagtagagacagggttttgccacgttagctaggctggtcttgaacttctgacctcaatgacctgcctgcctcaccctcccaaagtgctgggattaaaggcatgagccaccgcaccccgccagaagagtgacattttaaaagcagccgactcttcttgttcttaatatttaaaaccccaaccatattacacaggttgttaccattttacagatgcagaaatcgaggcgcagagaagcaactgacctaaagtacacagttaatagatggagccataattcaaatgtaggcaatgtgagaccagagcccaattttaaccactgtgtctgactgcttcctgcatgacataccttgttaggctgaagtgattcgagtaaaatgatgatcctcactctatggaagagaagcagagctggccccagtagtggtcacatttctctcccaactcctcaaaggttctcagaccacccgattttaaataaaatcactcaccagcttctaaatgcaatagtagaccaaacataaggagaacatttcctttctgcatcttcatctgtctctttgtggctggaaagcaagatgcctgggtcctagatgtaccaagactttagagggcaaagaacagaggattcttgagaaaggggacttgaaggtgaagagataaaggctggtgcttccaggagcgtgggtctcctacgtttgtgttcctgggaagaatcttggactcaggcgtgggcagctggatgcctgggttccttaggcttcctccaggcaatgtagttgcctctttctctgttgtgaaagagctgcaggggcctttatagcttcatatggtctgaggaggggtggggcagttgacctgacagtctgccaactacaggcaggtgagagaacgataccaagcctgggacggaatagagcaggggtcaagaggaaggtgagaaaggagaatgacatgaccacactaggcagggtgcttggctgggttgcagcaggaagtagaatgggatgaggagatcatggttgtcagagtggaagggacccaccctttgaagcagggatcgggttagaaacctgttgcagctcaagaatttgttttctggtcaggaagtcctgtgggcctgctttagcatgaaagaagccctaatgaactgagccaagagagtaggacctcacatctctacagcaaacagtaataggtgacgcaaaagagaccagtaactaggactctgggctcctgggttatgggcagaagacaaatggagtattactgagtatgcagtaagcactcaacaatgcacattgaaggaacaggggaagagagatccagaagacataatgaagagagataatgaaaacatgtttggggtctctggggcatgagaactgagggtgtgggagagtattgaatacgccccctgtcagactcatagcaggagaaggaaggtagggtctccttctgaccctcaaccataggagctcccctctgttttgtttttgttttcagacggctgtataggagcctttccaccctgagatccttctgatgtgccttagcatcagttccaaggaagcgtctctcaggagagtacacaccttagggagagacacagtgccatatcgggacacagtctgatgggaggagggagatcaacagtccaagtcctggaggaggcttgaatttggtctggacacttgggtatggccagcagaggggaaacagtcagctaaaagagcgtgactgaagagacccaaatgagcagagggtttggggaggtctgagatggcatctgtgaccaggctgatggggttccaatatacagtctgtattttctgtcatagtccattggtgttgctataaaggaatccctgactgtgggtgacatagagaaaagaggcttatttgcctcacggttctgcaggctgtatgagaagcatggcaccaacgtctgcactggtgagggcttcaaaaagcttccactcgtggccgaaggagaaggggagccggtttgcacagatcatatagcgagagagaggaagctggaaagaaggaatggaggaggtgacaggatcttttcaacaaccagttcttgtgggaactaagagtgagaactcactggttgagaatggcaccgagctgttcatgagggatctgtttcaaccacccaaactcctcccaccaggctccacctccaacattgggaatcaaatttcaacatgagacttggcagggtttaacaaccacatccaaaccattgcaatgaccaaagtgagttgtctgcatttcccccaacaatgacgagaagcttcctggaagacacagtctctcagatagtttatttgtaggcgaacgagctttcctgacatgcaagttctgttagaaggaagctggcaagcaggaggtggctgaagacatgaaggagctctgaatgagtgagctggagaaacagaaagggtcagcggtgtgctgggaaaggctcagaagtgagtctgcctagtggctgtgatgggaagttccagagggtcaggtatgcgggaacgctcagtgacaggttgggtcctggactcccagcaattcttctgatgtgccagtattctgcagctgaaaagccaatagcactctaagaattttcttcttccagaattatttagaaactgagatcctggattcaagtccaaatttcaccttttagagggtactctgaaaattgtagcgcgcatacttatcagagcctaatgtaattaatatctttactcgctatcaaaataacacaaagacctcagaacattttaattcgtattac

SEQ ID NO: 585497 - DNA, 4001 bp, Homo sapiens
gacgagtcatcataagggacatgtcgggaaaattaatgagttaagagcaggttgctcgagtggagctgactggtccgagaacatttttttaaatgcctccttggagagtctgagtcatgagggttctgatgactaggaaggaaagagcaaacaggggttgtgggcttaggacttgggtttgttttagagagtaagagattagtttcgcacagagtagggaattccagggacccggcaattacgtagagtacacaatttataaacatagcatagatttgaaattcgcccttgaatgacctgtgctgaaagtttgatttaggaaaggcctgtgttccagattctcgctgccatctctctcaacctcaccctgtaccggcttagattttcttcaacctggctggacaaggggtctgctttcccttctaattttagtttacccccaattcaagtagagttattttcatcacaaggagtctcaatggtaccttccatatagcatatagttcatcagaaagtaacaaaaagaagaagattttctgtgaaatatagcctgatatggtctatgtctgtgacccattttcccacaaacggaccactctgatggcagccactgtccctggatttggagatctctcctacagctgcttaagcttcttcagctatctggagccaccatttgtgtagaaatgtcctatgtgcttgagtgcccatcttcaaattttctgttgtgtatacgttcaaaaacaattttgaaaagctgttttccctcctctgtctatgtttaatctaaattttttatcatacatttaattattgcaaagaatgtaatttctaccatattgtaaatgtagacattgaaataataaaagtttttactactctttaaaatgtttccagtagactctaaacactagcagcatctcaatactcatcattatcctttttttaaattttattttactttaagagatgtggggggtctcactatattgctcaggctggtgttgaactcttgggctcaagcaatcctcccgcctcagcctccccaagtgctgggattacagacgtgagccactgcacctagcttccattatccttttgaataacatataagcaagctcttcctcaatagtctaggtttttaaatggttcctcctgctctacgaacttatagttccattttactttccccatattattctactggtctctctccatatatcatattaaataccagtaacataaatattctactgctatacatatatcacagtatgtctaattaataaaccttatctcttagagcagttttgggttcacagcaaaattaagtggtaagtacagaggtcccatagactccctgcccctacgcaagcacaacctccccacctcgttgacgtcagggtttactcttgtatattctatgggttttgacaaatgtacaatgacaggcatccaccattgtagtatcatatacagtagtttcacgccctaagaatcctctgtgctccacctattcatcaccccaccctcgtaacccctggcaaccattgactcttgactgcctttatagttttgtcttttctgggatgtcatatggtctgtaataattttttgcttgaaaagcttttattgatcaccctgtcatactcctctgcatcaaaagatatgtttataaacgtctaaaaaatttcctgtgccttgtaagactctgtgttcaatttatagcccccagtaactttttggtgaattaagcaaaaatgcttctcttatgatacgtctttccatattttcaagaaaatatgaatcattaacttacctaacattttttatttttcatttttttgagacggagtctcgctctgtcgaccaggctggagtgcagtggtgcaatctcggctcactgcaacctccacttcccaggttcaagctattctcttgcctcagcttcccacgtagctgggactacaggtgcctgccaccacgccagctagtttttgtatttttagtagagatggggtttcaccatgttggtcaggctagtctcaaaagcctgacctcaggtgatccacccgcctccgcctcccaaagtgctgaaattacaggcatgagccacctcgcttggcccacttacctaacattttaaaaataacacaacttacagagcgcttacgaaatgcaggactattctaagccttcacaataaccccatgaagtgggtactattttcactctcatgtttacaaatatggaaactgagacccagaagaattaaggaatttgtggaaagtcacaatgaaattggatttgaaaccagaaattcgagctccacaatctgtgctcttagctgacatgccgtatggcctctctaagtgtcttttatcttaaggtgtaacattaatcagttggagcttacaacatctttctccttgaaatcatgccaaatacacaattgttacctaaaccaagaaactagtgaacaggaagctctttccccttacagaaaatggtgtacaattcagggaagtgtgcttcatagcacattgctttgtcccagcaagttgttgacaaatcttgaatattctaaaataggcagacagacagataaggtgggttggctgccatgggatttttctccttggttaaataagccactgcctcctctattctttctgctgattctgctcttgctccaatctcatgagatactccctcaagagggatgcatttttaaagagtggatggaagagaagagattgttaaaaaaaaaagaaaggaaaaaaagaagtttttattactcctgttacttcattctacagtgtatctgcgtaaataacaccttaacacatgccaaaattaccagttccttacactccacgtagcccttcacaggaatttatatgaggcaggagaaaacaggaagtcctactctgggtatatgatccctaaattagaggtggtttttgaggtatcccttcactaaaaggctttatttgacaccctgaaatgttctacaccctgcggaaatgtggtaataataatatgggagctacagaggaaatgttggatgttcatcaaagaagagtcagaaaagtgtagccctgaccacagaggtgccctcagacagatcagttctaggccacaagcacatacggaagttgaagatctggaaaatggttcccatcaaacaacccacgcctgcataatactcttcaggaagtctttatgtacgcccaagatgtgggggcacagatgccacgtgaagatcattgtgctaaatccacagtgcaaaggcacaggtctagatgggcagccctttaaccctgtccacttcctggacttttgcttgggtcacgcatgcttggtgggctggggctttgtcacattacaggagtaggtgtattccatgacgaaagctgggtaatgatgcttccaaactctacctgcacaccccagttgctgggagtaatgagatactcacagcacaactatgtgaatcaatcacaaggtaaattgctcaccagggactccccccttttctccttcctctagctcaaaatgcccattcatttgagtcatttgttgtttatttttggaaataattttttaaaatttgagacagagtctcactctgtcacccaggctagagtgcagtgacatgatctcagctcactgcaacgtccacctcccaggttcaagtgattctcctgcctcagccttccaagtagctgggactacaggcgcgcaccaccgcgcatggctaatttttgtatttttagtagagacagggttttgccatgttggccaggctggtctcaaactcctggcctcaagtgatctgcctgcctcagcctcccagaatgctgggatcacaggtgtgagccaccatgtccggccaggaaataaaaatttttatttacataatgtgcctggtaaaaatttaagagctgtattgagctataatttacataccatatagttcacctgtttaaagtatataa

SEQ ID NO: 585498 - DNA, 4001 bp, Homo sapiens
aaaaagttaaaaatgtgttatgcatagtttcccaaaaaaagagaaacaaactcaaaaagtagtaagtaaaagactcaagacacgtaattgtaagtgcaacaggttcaactatgtaaaaagtacatagaacaaagtctaaatggaaacataacaaaaaaggctgggcatggtggttcacgcctggaatcccagcacttcaggaggccgaggcaggtggatcacctgaggtcaggggttcaagaccagcctggccaacacggtgaaacccagtctctactaaaaatacaaaaattagctgggcatggtggcgcacaccagtaatcccaggtactcaggaggctgaggcatgagaatcacttcaacccgggaagcagaggttgcagtgagcagagatcgtgccactgcactccaacctgggcaacagagagagaccccgtctcaaaacaaaacaaaaaaaccttccatttttttaatactagcacgatttttattctttaaatccatggggtccttgtcatccatctttttgcaagccatccactacatttactagcttaaaaggtggatgaaaaaaataatgaagcaacaactaaactgtttcaatagtaatcctgtaaaaggtaatttgaaaaccacctgagactaaactgttggcaggaaatatcacactcatttcacgtgggctttcctaaatctgaacaactaataggaaagagccccgtttaagtgacttcctgaaaatcacatgtgaattggtggaggctggaaacagacaccatttttagataaaaacacaactactgcggatggcaatacgacctctgaattttctcagaagaccatcaagagaggcctcaagcattcaaagaagcaacatgcaaagcaaatatgttactgacaactaaaatgagttaaagagcaatgattaatcccacccccacacctcaaaaacaaatcagtgagaaaaagatttcttgaaccaataagtttcaagctttggctgctgacgtatgattgcacattaatacttcaagaaggtactttgatgttcaactagttgggtttggagatggaaacatagggcatgaaaattatatttgatattagcataagtacatcattaaacacaaaattatattggcagaaaatcatcaagtggtttaaaactttacacacatacgttatccagggcttcgagcttccctaagaccaccttctttctagataaaactgagaacgagttagtaatgtaagcttttatgtcaatttagacctgtcttttctattctacctctcactcttaacactgtttacactcttaatcctgtttacacacagaaaatcacttttattcccgaaaactcttagaaaaaccctgacaataacataacccacaacctagaagggaggcagccatgaagcaggcgcatccctttggaaccatacaaaaagtgacctctgccaacgggaacagttcagggtgcttaagtggccaaagaagataccgacatggcccctaaagtattaaaagcaccttctttccagaagtacctccgaattgccagggacttcgcccaaaactagaggttggtcgaagtgaaaatctaaacctaaggagaaggcagagagtgggatcccgtcacagtaggaaggtaaagaagacagaagtaaaggacagagcgggagagaaaggacaaaagttcaaaatacaggggtagaggagggacaggagccagaagaatggagcgatctgaaaggtgtacgtcctactcactggtaggcctgttttggactccgctgtgggagagggcggctgcacttctgcgtcccccgcctcacctgtcagacatccacacagccaggcctccccgccctcaccaagcccacacaaaccgcgccaccgccagcgtcagccggacgactctgggggcgtaggccgacaccgccctccctccagccaatctaatagcgctctcatgggcgcattcctgatgacgtttaggggtagggttagatgcccgtttccgctttcttcccacccacttccgggtctcctctgtttacgaatgtttgggcgcgaattactctaagcgcggctctcagaagggtgcaagaagaatcagtggtgagtcgtgatatccttaaccggctgggtggatctaaagttcagggatgagttttaaagccaacgcgtttgtggcagactccgcagtttgcatttgaggatagcgaggggggattgcttacggggaaatgcccgatgtcctaaaagatctgcccttaggatcctgagattgagatgtttgattaggggggagggagcaaagccatgaatacttcctatttctcccgaatcatcctcatggctcatcctcattgctaaatttctcccgcgggcactagtgaagtcaagtgcagccttggacattagtgtctgtgtttctccaggagtcctactcactcttgtgcccacatagaggtctaaattgaggtaattgagtcccatgagtatcaacaagctggtaagaaaaacaagacaacctagaatgcctccctctctcctaaagcatatagtctggcggcaaactactgtaccagccttatttcttttcacttctcctatacacattaaaagcctcgctggattatcctgtccctgaacacgccaggttttttgtgttttttccgagctttcctgccgtccgagttttactgttttcccttggatgcttcatttttctactttttggctaaatatttcaaaatgttattagaataatactttttctatgaataatgtacaaacatacttccgagatattgcggggtcggttccagaccaataaagcctgtcacacgatttttttggtttcccagtgcatataacagttgtatttacactgtattgtaacctattaagtgtgcaatagcattatgtgtaaaaaaaaattacatgctgtaattttaaaatattttattgctaaaaaatgctactaatcatctcagccttcagcaagtcctaatctttttgctggtggagggtcttgcttgatgttgatggctgttgaccaatcagggtgatggttgctgaagattggagttgctgtggcagtttcttaaaataacaaaataatgaattttgtacagcagttgactcttccattcactaaagatttctctgtagcatgtgatgctgtttgaaagcattttacccactgtagaacttctttcaaaattagagtaaatcctcttaacccctaccattgctttagcaactaaggttttgtgatattctgaattctttgttgatatttcaagaatattcacagcatcttcaccaggggtagattccatctcaagaacttcgctcattcataagaagcaacttcttttccactagttttatcatgagattgcagcaattcaggtacatcttcaggctccactatttctcttgctattgccaccagatctttcatcacttcctccactgaagtcttgaacaaagtcatgacctttacaaagtcatccatgagggttggaatcaactttttccagactcctgttaatgttgatattttgacctcctcccgtgaatcatgaatgttcttactagcatttgggatggtgaatcatttccagaagttttcaatttattttgcccagatccatcagaggaatcactgtctagggcagctatagctttacaaaatgtatttcttaaataatataacttgaaagtcaaaattattctttgattcatgggctgcagaatggatgttgtgttagcagacatgaaaacagcattaatctccttgtacatctctatcagagctcttgggtgaccaagtacgtggtcattgagcagtattattttgaaaggaatctttttgtgagctgtaggtctcaaagatgggcttaaaatactcagtaaaccgtgctgtaaacagatgtgctgtcactcatgctttgttcttccatttccagagcacagacagagt

SEQ ID NO: 585499 - DNA, 4001 bp, Homo sapiens
ggttcaaactcatttcgctgacctggttaatataatccctgccgagttgacgctcgcccttgcaagaaacggctccgagcccgcagtcgggtttctcttcccctgaggcaggttcaaggctcccgcccctcccagccgcctcccctctgggctacctggagcctcagggaacctgcgcggccccgccccgcgggggcggccgagacctcggggcgcggagccgctgccgcgcctcctcccagcacccctgcccgactccctcctcctgctgccagtttcagctctcgaaaaaaaaaaaaaaaaaaaaaacagatgaccccggtagctgtcctgtgaagtcctaaaggcgaaaagtggagccctcgaggggcagcacaccgtcctgcgcggccaggctccggagtaggcatagggagcccggagctcccccaagtcgccctctcgtccccagagcccaaccaagccccggcgctgctccccgcccagcccagcccgcgggtgctgctgcagggtctccacccacgctctttgcaacttcccagcgccgcgcggggaccagcgcccgcaggctcaacaacaaaccagtaggagaaaatcaaacaatctaaggaaaggcgaatggatttgctttgcctccatggacttcgccttagaactccttcgcgagggtctgtccggtcaccgcgcctcggccggggcgacctaaggcggctgaaggagggtgcgagaaggcgcggcgacctcagccgcatccacgtgtgcgcgccgcgcagggacctttcgcctgggggcagagcccgcggggatcgcgtcccggttgcgcggcagcggccttgggtgctgccggcctctgtccccttgagccgagtggcgactgcgacggctgccgagctagccctggcacccgccgctcgcagggagccccggcgtgtgctgctgggaaagtccagaggccggtggagactggggaacgagcaactgacagttcggacgaggatttccctcctcctcctcctctccctcttcccatctgtccggccaaaaatgtgaagggactgcacccatcttcccggcgagcctccctaagtgcagtgacatgtgcgacggcggcgcgtgtgggtgcgcgtgcaatgtttgcagtggaagtaaaagcctttcagagaaaaatgattcgaacctccaaaaccaggtcttaagacaatttgcaaaagtagagacccctttatccccctaaaatctgcttttcagccgcctgtcagctgacactggtcctcgcctccataaagaatgaatgaaatttaaatgaactacctgcagctactaaacaatccagcattttccctgtatctgccatatgctctgcacttccaagtccaaacatatctcaatgcatccagcaattacgctgcggatccctcgccgacacccgcggcatcaagccaggcacctggtgggctccccggggctggtgggcaccgctctgccctcggctggaacgtgctttctttttccccctaaagaaaaatgtatccccatgcaacttgcaaaatgagccgcagggcgtgcttcccaacgtccggatacatttcccgcaaagactcttccattcatcagtctctggagcggcttctgctgccgaggcaggggctccaggtcctcggagggtctgacagcccctcagatgatcccggaacgaattcccacctgctcccgggagcctggcgccccgcgcgcccccgcgcgcccccgccctcggccgcccgcccggctccccgttacctgtgccggggtcttcgggccatggcgcggcgggcgcggggctccgccgagagccgcggggaccgcaccgggctgccgcctcccgctgcccgccgcctgcctgcgtccctccccggctgcgcagcggcgctccgcaccgctggggcgaagtttctcaggagaaagaggaggaggaggtcacggaggaggaggagaaggaggaggaggaaacaggttgatattaaagtgtaaactctgtaaacagagatgccatcaaacaaagagctttggacactccccctcccgccaaatctggcgcccctgcagtgcgcacgcgccctgcccgccgcctccgcggtcgccctggctgccgcccgcggggctgccgggctggccgggtcgccgctcccattcggcgctcgcgccgccgcggtgcgcctagcgcgccgcgaggcccgggaggcgcgcgggcagggagcccggggccagggaggggtggccgggggccgcgacggcgccttttcctgagcaaaccccgctcccgggtcgcggcggcgccgacccgcgcccagtcccgccgcctcccctcctccctggctgccgcaccgcggtcgcccggctccgcgtgctcccgggcagcgggaccagagctcctccagctcccactcactgtcgcgggggcggcaagcggtggggggaaattcccgcacagaagattggattttcgtcaaggtttacaactgtgccctctggagacggggaaattaggagttggaggagtaggggatgtgagcatatgtattcataggctgtttggctagggttttttttccttcttcttaaataaataacatctctaatttaacttgttagtgacaaaggacgcttcaatacaagtgggcggcaaccatcaccgctcactaatggagcgccccagcggagctttcactcccctcccggatcctgcagccgccaccgtcgtattgtcacatgtccttcactctcaccccagcacacacccgggccccacccaccccgccccgcccggcccaggcggtgcccaccgcacacctttgctcccctccctgcacagagcgcgcaccctggattgcacacctgcaaaaaaaaaaaaaaaaaaaaaaaaaaaaaaaaaatacacgggggtccagacagcccgcccctagcagaactcaggaaaccccacgtttgcatgcatggttttagaagtaaaacagtttgtgattttggaggtcggtatccctgcttagtgtcatttgagggctctattttacgagataaaagtcagcaaaggctttcgtgttgtttaatgagggtctccagaagtaaaggaagaagataagtgctgaatttataaggattgatgactggggggattttaggggagttttagttttacttccgtttatagattagaaccattggggatttttttttcattctctgtacacactaatgtatttttcctttaatcttttaggagtttgagacttctgctgactgggtttgtgggtgtcccatgtgccccagcagttcaaacttagctcagaaagcattttttcttactaaaaaagcatgttcttactaaaatgagtcataattttattaaacggtgaagcatgcgaggtttcaagactatctggtgttttagactttctttaaaattgttatatagtttaaatctttatcaagtgttagttgctagtaaggttttaacattcctttcctcctgagaagaaaataacactgaaacaaaattattgtgagatatttcggatcacaattacaaaggacaaggcaaattaatacttttaaagccaatatttatttctagattctataataattttctttcttcacatcaaaaataaacaaaatcttttaaaaatatctagaataaacatctagaaaccacccctaaagaaattgcattctggctttcggattgctttatgaatctaactggcaagattcccaattgctgagtctcttggacacaatgtgagtatctgaaccctttgtgaagtgagttcatagcctctttttcaagattttaggaggtgtgtaactactcctaagttcttgaacccctttaaagtagaaagatactaagttcagttttcctttttttctttgtaaatcattttcctatgtatcattttgagaatttataatttttcatttcccagatatagttttacatttttccctcagttgtatgacaa

SEQ ID NO: 585500 - DNA, 4001 bp, Homo sapiens
aacaggttttaattccctcttaagcacagatttccatattaaaaatatctaaatttttagaatcaataggtgaactccaactaaacattctcttattaatatcaagtttattttaatcttttagtcagtgaataatgatttgtttttttaagtaaacctgaaatttaattttgaatggtttgaaaaaaatagattgacttctacatattaatttttgcaaaaactactttacttttgaataatttatacagaacacttttataatgatgaatttgatttagacagactctagctctttttcagtgtgcatttagcacttattttctctataagtgaggacagcaaataatattttaacaagcatataatcagacatctacaattcaaaggcttctgtctagtgctagctacctaaaataacctattaccaaagcctttctttacaatgtactagaataatcttttttcttcttcttaattctgttacataaatttattaggagctcaccaatatccttccttttcagtcttccagcaaacataaatgtaggtgagaaaaaaagaatgagttaattcttttttttcttatgctgaattttaatatcttttaaaaccaataaatatttgtccccacatttttcatctaagaaagtacataggttaaaggactggagtgaattcttttcatgcaaatttctgtgatggtagacatatagattgctgggaaaagtcggccactactgctcactgtttatgtgaaagttcccaaaaccccaccttgaatcacagcagaaagtctgaattgtacactgagaggattaaaaacttgttctggccatataaacagatctgtccatatatactattttcttcattaaagtgtttttctgaatttaatttaaattgcctcctttaatataaaaatttccctgaacccaagagtacatgtcaactccccatgtgagcccatcttctttgtacctctaacctggagcaactgagttttgacctcagcacagtcccattgtcaacatcagggaacactggactgttagctgtggctggactcagacaaaaaattctccaaaaaatacttttgtattgttctttccccccaacccctgtgataggattccattgaatgttacacgtgatgttatttccacttaatcttttctactatagttttctcaaatttcatattattccatgttttatttgttatactctaaagtcattcatttattttacctgtgttattgcactttaaattcactcatttaagtacagatgttattaggattcactttggaaattaaagcatataacattcacaacataagtgaaaatagcctctatggaaaatctcagtttcataaaataaaatatataatctataaccttcaaacaaatgaaagttaatttttccaacaaaatctacatgccatattctaagcaggaattacctccaccttatgttttttatttttatcctcactatttcctaattatattttgtaacaccagccaaaatctgtacttaatacccagattcttcttgaatatcttcatagaacactataaagacaaataaatatataagtatatatttatatctataaatatatttctgctaataaacgtatgaaatagatttctgttaataaacatgaaaactttaagtaatcacattatagtaaacaaaatgtctcagagattttcactgttttaataatcacgcagtgcatttcttacatcctaattttaaattttaaacagtaaaagaaaataccttaccccaaaagttttctggccatggactccctaaacttgttgtgttattagccataatatccacaagaaatagaagaaagagaagaaaaacagaaagaaaaaccagtatgtcgaaaaaaagcagtttgattctatctctttgtagtacagcaagagaaaaataatttttacacaacccctcatatacttgtgttcgcataaaaggaaataagtgtatcatgtttcctgcttttatactcaaattagcaactgtttttcttatcttggaattccacatggttcctgagacacaaaacaatgtccttttcatcatttcctcagctaagttcctaagttctctcctctcagccacctccaaaactgcttttaggataacagggttgtgtgtgtgtgtgtgtgtttgtgtgtgtgtgtgtgtgtgtttcctcatcccctactgacatggaaaggaagactccaaactctcagctacagcaccttgaattaaatgtatacagaattgagaaatagaccacgttccaatgcttgaaaattaaatttatatagtaaattgggggaaaggactattcaaaactcagatacttactaaattctttgttgttgttgttgttgttgtttttgagacttagtctcgctctgtcgcccaggctggagtgcagtggtacgatctcggctcactgcaacctgcccctcccaggttcaagcgattctcctgcctcagcctccagagtagctgggattacaggcgcgtgccaccacacccggctaatttttgtatttttactagagatggagttccaccatgttggccaggctggtcatgaactaggcctgacctcaagtgatccacctgctttggcctcccaaagtgctgggattacagccatgcgccactgcgctcggccactatattcttaacatgtctgtttctctatttggtatacaaattttgaaagttatttaattcatttcataaatatctaagtgtaatttatataaaatttgtgttactctttacttagtatttagtatgaaaaaacagtttctacattgaagaaatatatttaaaatcaaggagggaaaacataaatgcaaaatttttcattacaaagtttgttaagtgctataacaaagggtacaacgatctcaggaatttgttttttatagagaagtttgagaactgatataggaaagagttacatgaaacattttgagaaacacaagttagttaacatttcaagagtctttcctcaagctttgcttgtttagactggatcctctgaggactttggaggcactggaaattgtgaataacgtgtcaaactgcacctagtaactgcgctaaactgcattccatgatctggcttcatcaatctttgagtaactctagcctgaactcttgcatatatcttgtattaatcatattctaacttattagtcattagaatatgacttagtgcaaagtagtattcctctttgtgaagtctgtaatatattcctgagtagttctaagaaaacaacaaaaaaagacagttatattaatttttgcagtcctgcttcttccaaaatgaggttgtttctgatcagtctcatttttttgtgaatttaagtataaatttattagaaattaaaatataaatcatctaagagaattataaaacgtcatagaaaatttagagaattcactgagcaaatataaagactcacctctataatattcttgctaaagtttattttcaaataatccagtaaataaaagctcctactattacttaacagacaaaaagggcttacatttcaacagttgtctttacttttcaatattgttaacaaagttcataaaaatagaaaattaaaagaacatgttatttctgaagaaaatgtaatctggatgaaagtatattgaaatactaatcactttactgttctaaaagcatcgagtacgattcttaattactaaatgtatttttaaatacacattttgcattattaaaggttacctgattgcaataaatcctaatttcaaaggtgtatataatttcctaaacactgcatagattgcattttccttaaaataaaccaaaatgagtggaatgggtaactgacattgtctcaactgccttctgtgcagaaacagagctcattccatttcagggctgggatacaggctgacacttcctttcattgttctatgttgaactatgcag

SEQ ID NO: 585501 - DNA, 4001 bp, Homo sapiens
tgctatcaggaagtcagtcactcgggtagggtggtttctttttttttttttttttttcctggggtagcacttatctcaagtgtttgtaagaattcaaccctgctcacccatcaagtttataaagacaagaaaaactaaaagaaggattggaaaatgcactcagaccaagtaggtagctccccctccacctcaacaaaaggacctgcatggaaaacctaagttaagatggaactccgcatcaaaacaaacttgcctgtgagtatctctgggaaggtgcagcggcccttctaaagggaaccaaaggtcaatttgacattggtttattttagctcactttacctagtctgctcctgtaagatgagatgaggctccacgaagaacttgactctaagtttaagcctgtaaggggctagcccatccatctgctgggagatccggtttctcaggtttagccataaactttcacctttgctacccgtaaactgcagtccaaaatagtcaacttctatgattcccagtcgcctgcacacctaaaacaaaaaggaatgcagcctggatgagcaaatggtacgtatcaaagcaaacccaacggctccctgaggctaagattgctggtgctttttacaaagttcaatggtgttacaattcctgatctaaactggaaaaacaaagttccacggctccaatgataccaaaccacgagctctagtatggaggctcataattccttttaacgtctagggcatgaccaattgcaatagagaaaaaaggagtcctcaaaagtagccttccaaaagatgaggaggggaaactacagggtattttccttcgtattccaatcaccggaattccctccaccagcatactctgcacagctgatttttggcgacttattatctgggcaattttaaccatttggactccaaaaatcaaacacattgagggaacacgccacaagtgtcagctaagcttcacaagcggttttccaaacatctcagagctagaggggttgagggcacagcgttttcctgggatcacatgtgctgtctgccataccacctctgcactatttggcaccgatctccctcactgttaaggaaacacatgcttaaaaacaaccgagcagtagatgacccaaacctattcctcccgtcccccgcaaacccggagatgcaggtgaacggtgcatttgagagcagcagcctgagaagcagcgtgagacaagggcccggcttgtctgccaagaacccctggggcccgagactgcttcgagccactccatcccatcctggcacgcgggtggcactgccaggcgccgcggggacccgacaggcggcatcacgcacatacctgcggcaggtgtgcggagccgccttcttccgggaaagtgctgggttggggggatgatggggcgctggggggtggatcccggctgcgggctgcgcccggccctcagcgctggggacccccgctgcgcgctttctccgcgcaccccacgcgcgccaggaggagaccgcgcgccccacgcccgtggagaggaggggacgcgctccccccggctgccgccgcagtgcctcccggcccctagtagggggcgcgccagagtgccaggcgtcgctgcgaggcccctcggcctcgcgggacccgccggggccccttcttgcccctcgccctcacctggttgaggcagtcctcgccgttggctttcgcctccacctccacctccatcagcaccgcgtccggcctcgtcacataacacagcatggctggggctgccgctgccgccacagccgccttctctttggtgtgcgcggggctgccgccttgtcactggtgggacccagccccggactcggagagggctggccctcgaaggctgcagctctgcggacccttgtccggggccccgcggccgccactcgcgtccccgccaccccctcacccgctgcccgccagctgcccctgtcctccgcggtggcgccgcactccagcagcccaactgcctgcgctgcgacagggactctgctgatatagcggccccgcccccttcagctcgggtccccgccaatcacggcctccctgcccctcctcccccgcccgatcagccaatagcggcgcccctcgaccgcggcccccgcctcccagagccggctgagtttccctggccgccccgggaggtggcagcttgcgggcgccgagtgctgcgggaagggagggagaccccggaacacaccagccgcctctgtccgctgggcgacgctgctcagagtgagcgatcgcccggggctccaggcggggacgcctttctgccgtctcgaatttacggtgattaaacacctccaagctgccactgttcttcaaatatcttggatcactctgagcacgcatttcggttgtgaaagcaaaaaggaaaaggagcaacccaaagcctaaagaaaactgttctcgtccgggcatggtggctcacgcctgtaatcccagcactttgggaggccgagatgggtggatcacctgaggtcagattcgagaccagcctggcaaacatggtgaaacccccgtctctactaaaaatacaaaaaaaaaaacaaaatagccaggcgtggtggcgggcacctgtaatcccagctacctgggaggctgaggcaggagaatcgcttgaacccaggaggcggaggttgcagtgagctgagattgtgtcactgcactgtagcttgggcaagaagagcaaaaaaccctgtctcaaaaaaaaaaaaaaaaaaaaaaaaaaaaagaaaagaaaaagaaaaaagaaaaaaaaaagagaaaaagaaaactcttttccaccaggattagccacagtgggttgcttggaggcagaattgttgttccttattaagacctcatcattgagaaaaacaaaatctgagtatgaaagtttttgcagctgaccagtgagccaggtgtcttggtctagtgctggtgtgttacactccggaagggcttctccttactcgttctgctgaatcaaaacgccttacagggtaccaggccctctctcaggttgctcattctacctcctgtcttatctcactcattcattaaacatttgtgcagcacctgataccctgcctgtcccttctcacaggcaaccagatgttgtcctcgtcttaaggtaaggtgctcatctcctgacctaacaggtggcattactgcaatattagctattaaaggtctacaacccttcactcatttaccgcttgttcctctttgccaatatattacatagcctacctttttgatttctttataggagccagatgatgtgggtttcagccgtggaaacttagcaaacttacttcaggccagctcgatggctcacacctgtaatcccagcacttttggaggccgaggcaggaggatcgcctgagcccagcagtttgagaccagcccggtttcgcaacacagcgaaaccccatctctacacaaaatacaaaaaattagccaggcgtggtggcgcctgcctgtagtctcagctacatgggaggctgaggtgggaggatcacttgagcctgggagttcgaggctgcagtgtgctgtgatccccctactgcactccagcctaggcgacagagcaaaagaccctgtctctaaacaacaacaacaacaaaaagaaaacaacgaaagaaaaaaaaagagaaaacttacttcatctgtctgaagcttggtgttgtcaacagtaaaatggagatggcaatatctgctctgtctccacccagcattgttgggaagcgcagcaaagataataacgttcacaaaagcatttgaatgtccccgtgtatgtaaggggagctataagttcagtgccttcactgcttaatgatgacttttcctgtccctaccccccttcacgagtcccaaggatctgttagtggcctttatttccgaacaaccaggtacgatatcagagcccaaggctaaaaaaaaaggagggatcctcccacacacagttctttgctaaagct

SEQ ID NO: 585502 - DNA, 4001 bp, Homo sapiens
tgaagtcgactgctggcagaaatgcagtttcaaaggcctcctaattatttaccaaacacaattgtatagtcgacacacacaattctcactgaagcaaagtggaatgatgcctattcataaactttccttaattgtactcacaagcggctccatgacattagaaaagataagatagaatgaatactttttaggagactaaattagaacatgattacctcattatgtccagatcttgaatcctggtccccagaatttttttccagaaaacacttcactttctccacctcttccctgcactgaaaaaaggccattttctccagctggttgctgttataacacgtgttgaattcttccagcctcttcacttttaacatcttagtagtgagtccgattaagctactttctggagtgtggttttcgtctccctctgtctccgatttataaatcaggacacaattatgactcttcagtgcttctttctcttgactgcaaagaaaggaaacacaaaaagttctcatcacgtattcatgcatttgacttcttgagaaaatgaccagtgagaatttggaagtcccttctgtttaaactggagagaggatccaaaatcaggaaaagaaatactaacattcatattgagtttccaacattggaactttaaaaggaaaaaaaattttttcactttaaaactacaaaagcaaacagtaagaagcaatgtcaagattcactggtgatgaaatatgctccttattgcacaaaacaagccgtagatcaagtggccagcttggatgtaaattataaagtatctttgggtttaattggaaccgcaggttttgcagccccgtgggaagggcttatcacagaaggggtctctctgcttcccctggcctccctctgcagagggatcgctcccgaatgagtccttttccagaactcttctctacctatgccttaaaatgtgtggtgtttatttgtgaaaagaaatttatttccttacagtcttctcacgtggacagcactcccagatacctttccttgcatctgcattaacagctatgtaccgagaagttcagagtcttttcactctccttaaaatactttcctcgcaaatgaagtaatgcagcatacataattcgctttgatactagagacatatacgcatgtctatatgtacacatcacttgattgcatagagaggcagggagagggagagacatttgaatttgtgctagttccgcatggctgacaactgaggccccctggtggagattttccgaaaagcgcctcttcgagcattttctccgcttaaaaaccgtattgtgattctcatcagaaaacttaatattttgttttgtcagttcctatagtaaaatgatactcttgagttccaaagtgtttaaaattcactgctctaacaaattatacttatccacataaagagcttacattcaaacaaataaaaatgcaaatattaatactatcaaccagagctctacagatatattacagatcattcttagcattctttcaaattgccctgaaaaaattattaaaataaggaaacaaatgcatggctatttctaaggcaaactacgactaaaatactatggttaattgcagatgaaactcaagttggatcaggaagccacacaaaattaatgtattaaaacaaaagcttaggattaagatacaataattttgcaaagaaatattaaacattaagctctacctgaagtttggtacaatttgttattgaaggtaacttagaaaaaaggggaggagatttgagaggttataacaataaacaaagataattaccattgataggatcacatcgaagagcttgagccactccaagtctagagcatacattccagaagataaagagaaattttgcagaattcaaactgactatgaaagtctctggtaaaagttttgactctcagtcgtataaatcttctgaaaagacaagtgtccactacgagaggaagtatcttctctctcaaatgccactttcagcccctgtttaaattaatatggctcttgatctcacgttgctcagctgttgccttcttagtcagatggggaagaatattaattttagacaccaggcttttcaaggccaatggctccatttcagaggtcaggtaaggagaggatgaaccgggaacactggatgaaatatcaccttcacctttccctcgtatcattgtgtcaatactctcggatttacaaagctagatttgtcctcggcaatcatctgcctggaccttctgcccctttcagactcaggattatttaagtgctcattaaatttcccccagtagggaaaatgccaggtgtggcaaccccacagccacctctgtttgcccatcttacgctttgagcatatccaactgcaatatagaagatcttctgaaagcagttagcaagtttgttttatttttctcagttcttaaagatgtttgcaaagtctccaaccatttctagctctagggaaaggtcaaaggcacaggcatccaggaaacaggaataaatttttcataaattctccttaagcaacactaggacttcatccgtagttttctgcacagaccaagaaaggggaatttcaacccacctgcccgactctcacagtagtgcatccctagattcactgaagtggcataaaactttgattgcccagaggctggactttgcagtcttgaaaaccctgcaatttttcagggcctggccaattgtcacctcttatttggagcctgtgttagcccctctatgccccattctaacaccagcctctgctgctcttctgcttcttttaaaaaaaaaaccttatttttaattcagatcgatgcattccatgtgaaataaaaatacatatttttccattttatgtagtattaatgaattacagcaaaatcttttttaaaacacaaaacgcttgttatttttcagattggagagctttgttcttcagcaaaagtaatgaagtggaactataaatttgtggagataaattatctgacaaaagtattatacaaagactaagctggtttgaggttaccaattttgttagtataattaaattgtgtagaagtactgataaggcaacaaatgccctgccagaggcaagatgtgtgtgggctgctgctgatccaaccacatcctccacccggaccaccaccacgcaaaagcagacttcctatctcgttggctccagcaaaccaaccacaggcttgagtgagccagaggccaggagaatctgctccttagcttatttttttgtaataaacttttccttttagagtagttttacatctacagaaaaggtgcaaaggtagttcagagttccccttgccctgcaccccgaatcctctgtttttaacatcttacgttggtatggtatacttgtcacaattaatgaaccatggtgaacgttattattaactaaactcaatactttattgttgctgggttttttttttccccaaatgccccttttctgttccagaatcccatgcaggattccacagtacatttagaatcagtaggatttatgatagattgggtatggggtatgaaagaaagatggtagacacctttgcatattttcttctgagcacttgaaagacagagtgaacattaactgagatggagacggctgtgggaagggcaactctggagggaaaggtcaggcatgaagtctttggcaagtccattaaacgttcaagttgaataggctgtggagatagaaactggagttccggggaggggtgtaggctggagataagaatttggaaggcatccacatatagacatttccatgcacaatatacattcaatacatatttgattaatgactagatagaatgatctttaattgtgtctacttgccctaaaaagcaagtcaattaaaataatccatgctaaaagtgactgattgtctggttctgctgcatcacactgttcccagcttccgatggcatacaggacaagcacactgc

SEQ ID NO: 585503 - DNA, 4001 bp, Homo sapiens
aagtctgtgagctattttgaacggcagcatggtttcaagctctggctatagcccactttgtaacatttgtggcggtttctacaattaaggaaaaaaggcacaaaggtaattttttcactaaacattctccagtttgaaaaccacaacccaagacatctaggaagttcagttaatttgtacagaaatgctgttttgccgccaacctttgtaccatgaccactaccagtccaagttcaagattcacgttttatggtgtgaagataagtttcagctaaatcttaagaatgttaattttcaggccaggcgcgggggctcaagcctgtaatcctagcactttgggaggccgaggcgagtggatcacctgaggtcaggagttcgagaccagcctggccaacatggcgaatccccgtctctgctaaaaatacaaaaattagctgggcagtggcgcgcccttactgtagtcccagccactcgggcggctgagggaggtcaatcgttcgaacctgggaggtggaggttgcagtgagctgacagagcgaggctctgtctcaaaaaaaaaaaagttaatttttaaaactctcaagttctgactttatttagatagactgcatctataccaccagagcattaaaaaaaaaaaaaaaatgaggcttatttagcccgtacagttaagtctattaagttagggcagtgctcctcatttctcactaatacttgtaaatcaggatttaagcatccctccaccacatcactttatgccaggtaagatgtaaagaatatttggccaggcgcagtggctcacgcctgtaatcccagcactttgggagaccgaggcggatggatcaagaggtcaggatttcaagacctgcctggccaagatggtgaaaccccgtctctactaaaaatacaaaaaaattagccaggcgtggtggtgggcgcttgtaatcccagctactcgggaggctgtggcagagaattgcttgaacccgcgagggggagggtgcagtgagaggaaatcgcaccaccgcactccagcctgggcgacagaccaaggctccgtctcaaaaaaaaaaaaaaaaggtaatgaattttttaaactgtatggaaatacttttaaacacggatgttctagcaataaccccatcaaattgtgtcctacttaaaattaaaatcccagagtttaagcattttaatcgttttagggagtttttggaaattaacaaaaaaagttcttgttcagtagcatatccgtaaattaacatactcaaggtactggaccacctggagactaagaataaggctttagaaagtctcgatctggtctcctacatgattagactattaatggtatcatttgatcttcacatctcagagcaaactgcgctccccctgcactgaattttaagcgtgtttacaaaagagaaaataaaactatcacggagtgtccaagtccgagttaggcacctgagtgctctgcttctacctgggagccagggaagaaacacaaagggaccttggtgatgagaacccatgaaaggagactgattgtctttcggtggaaacgagaaccaccgccggccccactgctgcccagggcccacccatccatcacctgcttctcccacccgcgtcctcgggcagtgaacagaagcgtcggccccggagctgctcgaggaggcccgggagcaaggccgggccagggaacgcgagaccccggcgccgacgccccgcagtgggtctctgggacactcaccggtgcgggagcgaaggcaggtgcgcggcggcggggctacctgtacgggtgaagctggagggcgcggtgagaagtgatgagggccagtgaagagggcgacgacgcggacgggcaccaggacagggcggcgacagcggccgggctgaggctggcttcctgctcggacagatcccgagtcggtctccgcccgccggccggcgccccgccgagtccccggcactgcggcgtgcacgtcacggctacggagcgcccgaaggggcgggggcgccggggccgcggcaggccgtcgggcgcgcgctccgggagggagggcgcgctccgggagagggcgcgcgacccccggggtcgccccgcccgcggcgcagagcctctggggcgagggtaggcgccctgcagcgcagagaggggctgcccctggacaagccgggagttcttgttcttcccatggcgaaacggcctcttttgccgcggtagttgtttccagtcccggcaaagcaggtcctgtccggctggatactgtgactgtgcagtctaccaacagcgagaatcagttcaagcagggagaaagttgttcggagaaggggcgaggagtccggggctccgcgcgggggacccaggaaccaggtgtccgcgcttgggcggcagcgaggctgcgtggcggttgcggcaagaaccactgctcactcggccccggatcgggccggcttggactgggctgccctgcataggggggaaccttcccgcacaactaagttgccattcggtctttggaggagggggcttgggatgggaatttcgcacccctttgcctcttcccgctcctaccctcgccgacgcatttactttatttagagcccctaccttctcagtcgtttaaatgttactgtttttattagtgacatacctgtgagtcaccttttaaaatatgaagtacctatgcaaatttgaattatatggtaaaaacacatcacctttacaatgaaaacagcttcttttaaggcaacgaaataacaattgactataatgctaaatgtatccgctgaaaaaagcctacttgcacatgagaattacacgtttttctgcaacatttatatgtagcgacttggaaacttctggaaatctagaagattctgacgaggagacaaatttctgatacttaaagactccatggttctgtgggtggagaaataaaaactctaagttctgataagatgttttagaattcaactaaaacaataaaatattaagagtaaaatagggaagtaagaaagaggaagagaaacaaagaaaggaaataatttacagcaatctcagaaatttaattccaaattgccagaaggtaagtcttaagtatataaaactaaatttcaaaacaaactgaaaaaaagagggagaagatgaagatggctgtctcagttcacactgctctgactcaattttggatttaatactaaacttcatttggcaaaccaatagaagtcaatacatttttttaattttcttaatttttttgttgttggtaaacacaggggcttgctatgttgcccaggctggtcttgaactcttggcctcaagcaatccctgcccgcccccctcccttggcctcccaaagtgctgggattacaagtgtgagtcaccacacctagataaatcaatacattttaaagatttttttgtagctaatgactttcgtgattgttttctctcctttgccccacacttccaatccattactgagtgcttttgcttctggctctataatatctctctaatgtatcaaattcctctttatacccactaccactatcttgtttcaggccactatcatttcaaatcttgcatactgcctaagtcacctaaccagtttcccaggccgcagttttatccccttctaatccagtctttacaacgtcatcagtttgtcttttatgtactccactatttaaatttctgtaatggcactctctgactcttgatataaagtccaaaccacttaaaatgtcttgtaagatccttcttgatttagccaccagtcacaaactggctgtttttgtttgcctaacataatggggatttccttttttcctcttttttttttttttttttttttttgagaaagagtctccctctgtctcccagggtggagtgcactggtgtgatctcggctcgctgcaacctctgcttcctgggttcaagcgattctcctgcctcagcgtcccaagtaactgggactataggtgtgcactac

SEQ ID NO: 585504 - DNA, 4001 bp, Homo sapiens
tgagctgtatatataaaagtctgtgagctattttgaacggcagcatggtttcaagctctggctatagcccactttgtaacatttgtggcggtttctacaattaaggaaaaaaggcacaaaggtaattttttcactaaacattctccagtttgaaaaccacaacccaagacatctaggaagttcagttaatttgtacagaaatgctgttttgccgccaacctttgtaccatgaccactaccagtccaagttcaagattcacgttttatggtgtgaagataagtttcagctaaatcttaagaatgttaattttcaggccaggcgcgggggctcaagcctgtaatcctagcactttgggaggccgaggcgagtggatcacctgaggtcaggagttcgagaccagcctggccaacatggcgaatccccgtctctgctaaaaatacaaaaattagctgggcagtggcgcgcccttactgtagtcccagccactcgggcggctgagggaggtcaatcgttcgaacctgggaggtggaggttgcagtgagctgacagagcgaggctctgtctcaaaaaaaaaaaagttaatttttaaaactctcaagttctgactttatttagatagactgcatctataccaccagagcattaaaaaaaaaaaaaaaatgaggcttatttagcccgtacagttaagtctattaagttagggcagtgctcctcatttctcactaatacttgtaaatcaggatttaagcatccctccaccacatcactttatgccaggtaagatgtaaagaatatttggccaggcgcagtggctcacgcctgtaatcccagcactttgggagaccgaggcggatggatcaagaggtcaggatttcaagacctgcctggccaagatggtgaaaccccgtctctactaaaaatacaaaaaaattagccaggcgtggtggtgggcgcttgtaatcccagctactcgggaggctgtggcagagaattgcttgaacccgcgagggggagggtgcagtgagaggaaatcgcaccaccgcactccagcctgggcgacagaccaaggctccgtctcaaaaaaaaaaaaaaaaggtaatgaattttttaaactgtatggaaatacttttaaacacggatgttctagcaataaccccatcaaattgtgtcctacttaaaattaaaatcccagagtttaagcattttaatcgttttagggagtttttggaaattaacaaaaaaagttcttgttcagtagcatatccgtaaattaacatactcaaggtactggaccacctggagactaagaataaggctttagaaagtctcgatctggtctcctacatgattagactattaatggtatcatttgatcttcacatctcagagcaaactgcgctccccctgcactgaattttaagcgtgtttacaaaagagaaaataaaactatcacggagtgtccaagtccgagttaggcacctgagtgctctgcttctacctgggagccagggaagaaacacaaagggaccttggtgatgagaacccatgaaaggagactgattgtctttcggtggaaacgagaaccaccgccggccccactgctgcccagggcccacccatccatcacctgcttctcccacccgcgtcctcgggcagtgaacagaagcgtcggccccggagctgctcgaggaggcccgggagcaaggccgggccagggaacgcgagaccccggcgccgacgccccgcagtgggtctctgggacactcaccggtgcgggagcgaaggcaggtgcgcggcggcggggctacctgtacgggtgaagctggagggcgcggtgagaagtgatgagggccagtgaagagggcgacgacgcggacgggcaccaggacagggcggcgacagcggccgggctgaggctggcttcctgctcggacagatcccgagtcggtctccgcccgccggccggcgccccgccgagtccccggcactgcggcgtgcacgtcacggctacggagcgcccgaaggggcgggggcgccggggccgcggcaggccgtcgggcgcgcgctccgggagggagggcgcgctccgggagagggcgcgcgacccccggggtcgccccgcccgcggcgcagagcctctggggcgagggtaggcgccctgcagcgcagagaggggctgcccctggacaagccgggagttcttgttcttcccatggcgaaacggcctcttttgccgcggtagttgtttccagtcccggcaaagcaggtcctgtccggctggatactgtgactgtgcagtctaccaacagcgagaatcagttcaagcagggagaaagttgttcggagaaggggcgaggagtccggggctccgcgcgggggacccaggaaccaggtgtccgcgcttgggcggcagcgaggctgcgtggcggttgcggcaagaaccactgctcactcggccccggatcgggccggcttggactgggctgccctgcataggggggaaccttcccgcacaactaagttgccattcggtctttggaggagggggcttgggatgggaatttcgcacccctttgcctcttcccgctcctaccctcgccgacgcatttactttatttagagcccctaccttctcagtcgtttaaatgttactgtttttattagtgacatacctgtgagtcaccttttaaaatatgaagtacctatgcaaatttgaattatatggtaaaaacacatcacctttacaatgaaaacagcttcttttaaggcaacgaaataacaattgactataatgctaaatgtatccgctgaaaaaagcctacttgcacatgagaattacacgtttttctgcaacatttatatgtagcgacttggaaacttctggaaatctagaagattctgacgaggagacaaatttctgatacttaaagactccatggttctgtgggtggagaaataaaaactctaagttctgataagatgttttagaattcaactaaaacaataaaatattaagagtaaaatagggaagtaagaaagaggaagagaaacaaagaaaggaaataatttacagcaatctcagaaatttaattccaaattgccagaaggtaagtcttaagtatataaaactaaatttcaaaacaaactgaaaaaaagagggagaagatgaagatggctgtctcagttcacactgctctgactcaattttggatttaatactaaacttcatttggcaaaccaatagaagtcaatacatttttttaattttcttaatttttttgttgttggtaaacacaggggcttgctatgttgcccaggctggtcttgaactcttggcctcaagcaatccctgcccgcccccctcccttggcctcccaaagtgctgggattacaagtgtgagtcaccacacctagataaatcaatacattttaaagatttttttgtagctaatgactttcgtgattgttttctctcctttgccccacacttccaatccattactgagtgcttttgcttctggctctataatatctctctaatgtatcaaattcctctttatacccactaccactatcttgtttcaggccactatcatttcaaatcttgcatactgcctaagtcacctaaccagtttcccaggccgcagttttatccccttctaatccagtctttacaacgtcatcagtttgtcttttatgtactccactatttaaatttctgtaatggcactctctgactcttgatataaagtccaaaccacttaaaatgtcttgtaagatccttcttgatttagccaccagtcacaaactggctgtttttgtttgcctaacataatggggatttccttttttcctcttttttttttttttttttttttttgagaaagagtctccctctgtctcccagggtggagtgcactggtgtgatctcggctcgctgcaacctctgcttcctgggttcaagcgattctcctgcctcagcgtcccaagtaactgggac

SEQ ID NO: 585505 - DNA, 4001 bp, Homo sapiens
ttttaaagcaggaagacactgtatcttgcaaaccctcatttcacaatcccctggctgtcaaatttggaaactgatgtgtttctataccgaggagaaaacagtttaaattgtgtatctatatcacacattttgaatcatttaagaatcacagacacttctacatgttttatttctacttttgcctgtgataaaagacatgataattagatcaaacctgaaaaactcaactctaaaataagtgaatacatcacttattaaccaaatcattgtttcctctggcgtaacttacaattttctttaaaacacgacttttactttttaaattgtgtttgagagcacagttgaagttggcatgattaccagtgagactggaaattttgcaagcttagacatgaaatgaacttaagagttggggagaattacctcataaccttgatgacatattacagaaagatagcatatggtcctaaagatgtcagaattgaaatataaatgttaaaataactgagtttgcctatttatacaaagaggcaatttttgaaattcaattaaatttcaccggctacagaacaattctgtgattctaaattgtggtttttagatgaaagcttgaaacacagttcattcattcaacaaataactaatgggtacttattctgcataagatgcagaagattacaggatttaaaaaaaaacagattcaagattctgtcctatttgagcttatactgagtcacttctccaaatctctatacctaagtgactataaaattggagcttacagtgatgcatttttcaaaactttaagccttattgctgaatataaaataaaaaatgatagtctgggaagagggaatcttgccaaaagctctgatgtataaactttacacctagaggagaaaaaaagcattaatacataaccagtttctgagaaatacagagcataacatcgagttggaagttaggctgggcacaaggctgcctctgctggctgacccggtacatctttccagcagaatctcaactcccgacacctgtatcaaagttgccactcttaaaacacatcccttcacgtaagcagaggctcctaaatactcagcacaacaatatcccagcctcatcgatctccagaataatctgacttctagaaggaccttctctaaattggccctaacgtgttgacggtaagggtttgccccatcgattttatataccaactagctagctctgaaatacacaaaaatccacagcgacttctacatgccactaataaccctttgcctgtctacatgttttggctagaaagatgggaagaacgcatctgctaatccagccggaaaaacacagtgacatatttccacctgagctgctgaaaatccaacggtcttctccccaaataagccccatgccaacctgtcctccccactctcgtactggcgcgcacccccacgagccccccaaggggtgggcggggaagggtcaatctctccttcgcccccgctcggcctcccgagctcaagcagaggttttcaggttcacagggggctacgcccagcgccattagcacacctccgagcgctccaccgagcccccggcgggaggcaagtttggccggtcctggaccctgctcgcggcctctcggcggcagcatcagcggcgggcggcggcgagggctgggccccgcctcaccacctacctacagggcgggggcgccggctcctggggtccgggagaaggggatcggtcgcatgcatttctgggagcggtggcctctgctgctgggcgccggggagcgcatcctctcggcgggtggaaggaggggtcaggggaggaccgtacgccgaggaggagcaagaggaggaggcgggagctccgaggcgcgcgcccgcggggccccgcgtccggatcgggtgtgcgcagccgccgcagtcggggtgtcttaggcctcttcccacgcgcgacgcctcgccagccccgcagctgcgccccccgtcagggcatgggccgctacggggtcccgggcccggctgaaggcgggcagtcacgggtggcgcgacgctgtgcagacgcccgcctctagctcctcccggccagtggcgcgcgctgcgcctcacagcggttgcgggggcctgggagctcgcgccgggctctgccgctcggactgcagttgcggcatcctccccgccccccgcgacctccgagctgggaggctgggcaccccggctacccgcggctgctgcagcctccgctgccgcgatcccggcggctccgccccggagagctgcgcgtgcggcctccgcaggcctcggccctttgtggcgcctcccgagtgcgggcgccttgctgccccagcgaaccgccgcctggcagcggcacctaggagggtcctcttacctcaccccgggccgcttcccccttacagttggcccgcctggcccctactcttcgtgggaagtaaggctttgacagcagagcaggagttagagcttttccccagctttaaagccctttgactttccttccagctcaggaccgatggccacaataaattcatcctgtgtcccttctggcgttgcgtttaacagaggggcccaccatctccttccccctcccgttcccggtacaccatcctggatgctgccaaattgcagtcattacagcaataagaacatagcagttgggccctccagccgactcttggcagagactcgagagaaccttggagggggaaggtttgcatcagctgcggggcctgtgcctgtgagctccccatccccagttgggtgctgttccctctgcggtcccatgaccagcactgcaacatgactaggaggatctggccgtggagttcattcactcttatacgcagaaaaatatcccaaggaagggcctgcaactactctgttaacagtgtgttacaggccttccacacagataaactagatagcagcctcctctgggttgttgacgcagcttaagctgtaataacctctctggaaggcggagcaaagcgttaacagtggtggctttggcatttcagcagcaggtggtcatgttatactgtcttgcaaatgtggaataattgcccagttttgcactaagcacgtattaatttagacgtcaggtttatatctttgggatttgaatgtaaagatgttggattttttttttctgtagccattgtgttatttgtaaattgtttagcatttagtaagggaaaattaggttcctaaagtataaagagctgattgcattgtatcaaaggaacatggtttgagatctccagggaagctgagctgctctcacagttctttgatgagtgcttttatgattttgcaatctaaggttattgaaaatcaggcaaaagaaaaacatgttccctggcaaggacaaattgtgactaaatagctaagattttttgagatagttcttttaagcaaattgaaggttgggtgtgaggccctgtgggagctgcactgcgcttgtccaggaagcacccagtggggtgtgacttggctgcttcctgacactggttgatctagagccccactttattttcaaaagataactattattatttatgatattttcccaaacttagaattacttgattataggaatatgtatgtacatatctgatgtataagtaacacgttgaagtcacttaggagaatttggcagttgcttactctttaacaaaatttttaagttttgaatgtagtttctgaaggaagtgtccattgacttacaagttttccctgtttctcatccttttactatcaagaggcccctgttgtttttctctctatggactccatgttttgtaaataaattaagcagtgatgtttttattagacaaaaacctataactgagtatgaatttttaaagttgtgaccatcaattataaaacgtcagtcttctggccaggcgcagtggctcacgcttgtaatcccagcactttgggaggccgaggcgggcggatcacgaggtcaagagatcg

SEQ ID NO: 585506 - DNA, 4001 bp, Homo sapiens
ttctgtagttcagaagtacaacgtaagtctcagtgggctaaagtcaagatgttggcagagctgctttttgtctggaagcctatgggagaagaggaaccgcctgcattccttggcttgtggttccccttcctcccttttcaaaggcagcaatggccagatgagtcttttgcacatcacatcactctgacctgactcctctgccccccgcctctttcactcataagaacgcttgtgatgactggggcccatccaggtaatctaggataatctccatctcaaaatcttaatcacatttgcaaagttccttttgccatgtaaggtgacatgtcaacatgttctggggattaggacagtgacatctctggtgttgtagggtgaagtggacatttctgcctaccacacttacccattacaggtaatgtgatacactggaattatgtgcattctgatataatgcacatatcacttaggatagttgtcctgccagaagaaatatttaaattgacgaactttctgaaactattgtcctccactattcaaaaaggtcaatgatgtaaaagaaaaaaggctggggaaactgttccagagtaaaggaaggagactacagatacgtgacaactaaatgcaaggtataatccaagagtgtagcctagattaaaagaaaaactataaatgagattattaggacaactagaaaatttgattattgaccatataataaatgacaatgtggaattaaatttcttgagttgataattatattgattgctcttagtagatgcataatacggtgtttagtatgtatgataaagcatcatgctgtctgcagctaaccccaaatggttccaaaaaaaatagagaaagcatatatggaaaatattaataattgatgaatctagaacagtactgtaagatagaaatataatgtaaggacatgtataattttaaatatcctagtagctacattaaaaaagtaaaaagaaagcaaaattaagtttaatattttatttaacccaatatatccaattattctcatttaaaaatgtaattaaagtaaaaagtattaacacgatattttacatttcttttttttaaatactaaggcttaaacatacagtgtggatcctgcatttacagaacatctattcatactggctacattttagtgcctaatagccacaaattgctggagctctaaattggaaggcaaaggtatggatgaagggtatatgtgtgttcaatgttctatagttgcaactttctgttgctttgacatgtttcgaaaccaaaaagttggaggaaaatgaaccagatatgtgttgtatgtgcatagattatttctgggagatacagaagaagctggtaacactggttacttctgggaagaagaaaggagtgagtaggaggatggttttcaccatacccttttgtactttgtgtaaaatattgtgactaaacctatacaaatttaaactaatatctgcttaatctttttattcaaaaccagatggtctaatgctgaggtctagcaaccccttaagtaagagttaagagctccacctactgaacttgatctaagattccttgggataggaaaaaagggtcccacttaaaatacaataaagtgtagaaatttcttctgatgatttttctatcttattatcttaataacccctttaaatcttcctgttctcatattattacatattttcagataaagtatatcaatgatttaaactccatctctgagctgctgaaaaaaaagaaacgagattcaagcacaggctcacctaattttgtggtaatggatgatgactgcaagtcacagtggcggcggatgttgtgagcaagttcattacaaatttatgtcttacttaagcttccttccatcttgcagcggagcgaagtctcttgggtcagatttcttcaactataacggctgacattttcaaagttgagttatatcttactgccctctgcatctactttatgagggtttctgaattaaggctgggctgtaaggtgtcttgactcctttggtaattgcatcatttcctggccgtgtctagtatataacgcggagaagtgaagcaattgcccagataataacacagtttggaaagtaggaggataacaaacacagtgggtttgaaggacttgcttggagccttgggcagatgtcctgatccttcactaggcataccacccacagctctctcagcctcgttagcctgcgtgtgccaaataaataaaatagaaccgcgtgctatgaggctacgtgacccttcatcacccatatttgttgagcacgcgctctgcacccaggacagcgcgtcgctccggctcttcgccgagaaacgctctcagctggtggcaatctatcgttagatttagtaaaatgtttagagggacttaacatccgcgtgacagagaacgaagaaagacggagagggacagaacttagatttggaaagagcagctaaaatggttaataaaataataaagcaaattacaaggctctggacagtacgcgtccagacaacacttgtcttggtaaagagatttacatgttacgtaaagaatgagaatttccaggatatattttccagcatggcaataggaagaggattagatttggagggtataggttttttccttaaggggccatcccggcgcttccgagaatttgcttcaatttcaggaaatagattcagggaccaggactcagaacaagaacaaagtgggtgtggcttagacgcaatactctatcccctactggttagaggaattaagtgcagatttttaacacaacaaatatatttaggaagaagcgttgtgcaagttccctggtggtctagtggttaggattcggcgctctcaccgccgcggcccgggttcgattcccggtcagggaagtcttgtttttcttgacattcgtatccttcatgcaatttagaagtcaagagttttgtgtagttttcacttgctggttgggtttttttttcatagtttttttttttctttatagttttttttttctttttaaatcataagttttatgtacttttcattcgcttgttggggttttttaatcattaaaaattgaccgttttaaaagtttatttaatctaaggcttaaaatacgccatctctatttacaggtaatgtaatttataatcaatcaaataacataaagttctgtgattctaaaattgtatttttcagtttttaaaaataatttggatgtgtttacaagcagtcagttaagcctttgtttaaccttgattttgtttgactaataaaagaggaagatagttttatgaggaataatacttattcagtatcatgcttagagttaatttttagtttttctgtacattaagattatgtactttggagattatttgcctatattggagctattcctactctcatctctataaatatgagatcttttctgagatgtatggttggacatagctagtttattgtgttttaataacccatttagttaatgtttttttggctaactttaaattttctctaagagatttacacaaatatggtaaatgtgttacatccagagtatcaattcccactatataaaccatataggcccctcaaaaatgcacctacttatcattagtaattcccacattcagggtaaagtagaattctgggagttcctcaaaggaaaatatggcaatgttggagtcaaaaaaagaaaaatagtgttatatagacattaagggtttttttgatcctgaaagttctaaaccatcctaacctttgccacttactgagctgttggatttttttttttttttttttaatttgagacggagtctctctctgtcgcccaggctggagtgcagtggcgcgatcttggctcactgcaagctccgcctcccgggttcatgccattctcatgcctcagcctcccgagtagctgggactacaggcgcccgccaccaggcccggctattttttttttgtatttt

SEQ ID NO: 585507 - DNA, 4001 bp, Homo sapiens
ttgtccagtctggtctcaaactcctgacctcaagtgatccgcctgccttggcctcccaaagtgtgaggattacaggcatgagccactgtacctggccaagggaaatatttcttaaagcctaggaacccccacccttggtggccagggcgagcccacctgctcgatgtgcatattctccaggagcgcgctgtggggccgtaggacaggcagcacctcttcgtcctcgtcttcatagtagctgcatgtgctcttcctgcgctttgcctcttcaacagtgatgatctgaaatgagaaaacaagccaagaaaaataacttattggcttttcttctaactgctaatttaaaaaatcactctagggacacccgtgcttgaaaaggtgacgcttcggcagcaggaaatcaactgaacaggactttggggaaatggctaatttttcagtttcagaacaaatgcacaattaaagacagtacaatcgaggcagttaatatgtataaattaaagtcacaagtcacaaggctagacgtggtggctcatgcctgtatgcccagcactttgggaggccaaggcaggaggaagatggcttgagcccaggagtttgagactagcctgagcaacatgatgggacccctatctccatatagaaataaaataaataaataaataaagtcacgagttttccagttttagtatagctgctgattgctcggtcactgagaatagtatataacaccagaagatttctacctttgaaatgccctaaatgattctcttttagcctttagatttaggatctgaattgttaaaggactaatcggagatcattcagtaggtaagtcttctataaatagggagtttgcggtgatgaggatagtttttaatcaggttcctgatgttttctcttaaggttgtgcacatagaaaccacttctgttagaaataacgaatgataacagctaccaggagcatgagtacaaagaagtgtgaagctttagtctaaattacaactaggttacaattatttatgtactgttcagagatgataaaaatagtctccccttctaaacctagaaacatcatattgtacaaaacatttattatttaactctagctatgcttatgaattaccaaagttcattttactctaaaatccatttttggcccttcttaaattatggataaatcactggattactttcagattgaagagtgtatattaggcttcttggccttttgtgtaagatcaagtgaaggattatattagacaactaattcaccaaaatgtactagtattaatgattttatattatagagaaaaacatttaagttaaatccagtgcaagttgtcaggcagtagtgcactactcaatttccaaaatgcacaatgacagatacaaagtacccgctggcgtctgagccagatttacaagtaagaaaattaagcttactaattttaccattttctgggggagtgtttccgtagtgaaaacactatcaagaatcacaaaccaagcattttaaatgaatgaaataaaacactctgttttcagcaaactctgtgtttatcacaagtataaaatgaggctgtggaatgaaaaaaaatcaaatatggatttctggctccaatgagaagaggcaaccacaccataaccctctccgcaatgaataaaacacctgctggtagaaatgtcagcacaatcctttctaattagaacgactttcaaaagaaactcggaggtacatcactgagaattcaccagcaccttattagccctcgggacgcactccaacataccttcacaaaaggctcttcgtcaggtctggcacaatagaaaatctggatgtccaagggtaatctttggcctctcattgtgagcagtgagaagtgtggctctctctctaatgaggaacaagttttctctctactctgcttccacaccacagttacttgtagccacgctgagctacaactgttttctcagtatctagtttcctgcatgattgagtttctgtttccctcaggagaagtttcaacatttctacaggaacacacccaaattaggatttagagcaaacacacttcctgccaggcatcgctgtgagactgtaaaaggacactttcacctttgaaacggtggtttcccaacactatgataaaaccccattgttcattttttttcttttccttcttatactttttttcctaatcgtccctccagtgaacctagcttttctagccctgccttttcagagttttttttcttttttttttctcccccgcccccagcaccttctttaaggctaaagctccatttaaaatggtacgtgtgatccctggtataagcttgaatctcaaaggaaggatgaaaaggagccttcggtggaggtaggcttcattacagttagaacaaacggcatttcacttcaatactatgtcatgtttgttggtgggagggacttaaaagaatgggaaaacatctggtttacatgaggttgtgaaagatgtcatcttacatgtagttttataaaacagttggcagagtaatacttatctttttacattttggaattagttttaatgactaataagcaggatgagtcctcctctacacttcagatcacatgtcaggaggttagaaagaaatacagatcagcactggatcaattttcagtgatatttctgtgattcttccagatccgaagtggcctttcagtcttgggcacagctgcggggatcagagtgtattgtattgctcacactgggggttataaagaagactctagcagatacttagagaccagtccacggccagcagaactgactctcaatgcaacagcctgagcacaacctgggacagaatgccagcaagacaacactctcctctgggcccctgggactccaggacagcggacatttattatttcctatatgatggtgggtgccaggtgctttgccaggcacagagacataaagctgctcacagtctccagcaggtgaggagacagtagagaaacaattctaaataaatgggtgccattccatgtgattgtaaaaggaaaataaaatcttgggatcacaaactcactacaaaaaaagggaaaattaagctttgaaactgagccacacaaacaaaaaccatctttccttttgtttctaaacagctgtctccccaggtggtctccctcacctggacaatgtaaattaacagcttattttcacaagtcggaaacaagagcagactagaaattgaccttactgctcacctccagaccaatgcatactggacttcttccacgactctgtttacttcatcttatgtaaagtgcagatttactgcgcacaaggcatacatgattgagggttcctctaccctctcctttgcacatgcaacatttggattcagtgcacactaatcaaagactcacaagaaagtaaccgtttgtctcattttttctaccctcctcttttctccttcctctccagcccacttttccccctttaaatactgaagccctcaaaaccctctttggaaaaagtgcaggacacagatcctactgtggcttgtgtctctttttccctccctaaccagatgcatcctcaaccttagcaaaataaacctctaaattgattgagatctgtctcaggcattgtttttggtttataggatacagatgccaaaatctacagcagacactcaaaggaggttggggtgacctggggggttctgagatagcttattcacagaggagatggtgcttcagtttgagagcaaggatagggtgtgagaagatgttccagggacagggcacagcaggaatgcagagatggattctgggttcacattggctggagaagagacagcaaggaaagcagtgatgaggaaggtagatgagacagaaaaggtaggaggagcagagaaaaagaagagccctgatgccacgaaggagcttaaaacttaccctacaggtcagtgtttccaaaacataactgtttggaaatcat

SEQ ID NO: 585508 - DNA, 4001 bp, Homo sapiens
tgaagatgcattttgaaattacagcatcgcttgcttccttttgtaaaagttaaatataaaactgttgagcttgtcggaattgctttaaaatttcttctatttctgacattatacctccgtgagaccagttttctgggcttctactgtgagtattattttaaaaaaaatcaacacaatttctttatacattatctcctaagtgatgtggtgtcataaatagttctcagattaggaaagttaccaagtaagaaaagtgctcatttgtcacattataatccttaaaaacggaaagacagggtgtttgtttgaagggtgcatattggcatttaatatggagaactgcaatttcccttctagctttgtacttagttttaactgaggaatgacaaaacgttatgggtataccgttaagccactacatcaatcacctttaggcacactttcaaatgaacaatgtatacagtttttataaatttttccctatgtgatatttgttctgattgtattcattaaaatgtaattttatgtttgtcaaatttaataaatgttgggcttgtactttatatatctttttcttatttttctagtaatttttttttactgtattttacaaaaaaaattactcatgtgaattgcagatttttttttagaaggtcctcttccacaggaactgtgggtagctctgctctgagcaggagtttggcacactttctgtaaagggtcagggatgagccatgtggtctctgtcacagctgctcaattttgctgtcacagcatgaaaagggccacagacaataggtaattgagtgggcatggctgtgttccaaaaaataactccacttataggcactgaaatttgaatttcctgtatgtcacaaaatattgtttttcttttgattttttttcactcattcttagtttttttcactcattcttagtccccgatctggactatgagggatacccatagtatcttggtatctagactacccagataccactggctctacatggtgggggcagccagtggatgcacctttcctgggcacctactatgtaccaaagatgccgggtggtcctgccctcctgtagcagggtcatataggctgactggtcagcatgctcaccgggtctgtttcagcatctctcaggaggcccaggctgcaggcttgggagtcatgcagactgtgagatggctgctcttgtgcacatatgagttccccctgcacctgttcccaacagccttcccaggagactggggcgtgggcatgggtggcttccacgattgggaaaccaggggtgatggaggcaccaaaagggggtgaggggcacccctctgaggaccctagggaaagagctcacctggagataccaccagatagaatctgacggacttagagacagagttgtcagaagggcggtagattctacaccagtaatgtcctgagtcttcctctctcagatcagtcatggtgacagtgaagaagccagcatcagggtcgtcccagattgtgaatcgagaggtccaagccatcgtcctgggcttggagctggtgactaacctgatgcacacaagtgctgaagcctccttacaccagcctttcttctcgtagagactgcccgtgggcgggtactggcatctcacggttagcgtctgccctgccacactttgaagtacctgagccttggattgtgcctgagagcctggagaatgatgaagtaacgcataggtcaaggccacgcgcacaacctgcctcacagcaggcctctggccacagagccacctgctccctgaccctgctgtcctgacagtccccaccacacccatctcctctgctccctgggctcctcctccccctcacctgggaacagcagcagcagcagtagcagtgggtgtagggctcgccaggccatgtggtccttttcctgtgcgctcatgggaggggacacctggagaagactggggagagggaattgggagctgggcctgattctgctgctcttccagcacgtctgatagaaaaatgagacaggctgaggcctgggttggggagatgggagactgcaaagggcagattctgtgggcacagggaagtggggatctccagctgtaggtgagtctgggtctggtgggctcggcgctgtctggcacacagcttcccaggcctctgtagaagatgcctgctctcccctgtgcccagctgcccctccccaccatgacctacccctgagggaggagctgaaaaggccaggaggaaactgtgggcgagttatggactgcttcccccttgctccctctgtgtgctgcctctcttctttgcagggccctagctttgccgccctttccagggaaaggcaggctgagggtggatgacaaactcaggggcacttggaaccctgatcacaagccccaagcctcactggtcacaggatggccagggacgtcatgcccaggcctccatggtgggtcagtgatgtgcttccactctgggagtttcgtgggtgcgggaaaggagaggggagaggaggtggagattcaaaaccagcaagggaggctagggagggtccctggcaaaggtcggggaggggagggtgggaagagcacacggagcatgggatgcatcagtggggtggggtagagggagcccaggaaccaggacctggcctcatctctgcatcctggacctctgccacttaaggaccctggagaaatattgtttaattaaaacataaacagatgaaagactctagcatatttttctttagttaatgtcagcactttgaagattcagttttaaaatacgatgcaatttacaaagagaacgagctaatatatcttaggactggtagagacactgtgtgtaattgcagttgcaccactgggggctctgctggactggcgatctgctgccgggagctctgtgaacagaggtaataactgagacgggaattggaacttgtcaagtggactcgattccaagtccactgctttgcctgcccctggactcctgctctccactccatctcagtacactgcccttctccttacagtaggagtatgcagagactgagaatgggaaaggcagaggggtatgcaaaaggaggacacagtagggctatcagatgttggcgcccaagggcccaaggtgggaaagcaggctggagctccagagctagaagacagctcagggagcgatgcccgccactcactcacacaagcattatttacaaagcattctcatgcacactttctcaagaccctcagcaggttcgcgagggagacattacttctctttttcacagatgtgagaactgaggcccagatatggtcagccacctgctcagagtcacacaggaccagaacaggcctcctgacttcggtctggagccttccggctggtctggttgaaatgcgacccacagacatgacaggaaaccaggggtgagaaagaggctcccactgaattgcacacacaggcggaggtgagcttttagggggtttcctcgccgacagtggggcccagcttctccctgaacataattacataccaaatcagggtgggggcatcctcccgagggggaggaaggcggccctgtcctcagatggcaccgaggcacgtcaccgtgtgtgtgtgtgtgtgtgtgtgtgtgtgtgtgtgtgtgtcagcaactgtgttcccatgctgactttccccttctctgacccctgctgactctaagtgacagctccttcttgtagcttacaagagcaccccttgctatgtgccactagctgtgtgtctcttcagcctgcagccagctctgtatcgttctctgctgtgtcagagtgtgtcgtctctccccaggggacaggagctctcaaagcggggaatctgcccctctctctgtgttgtggcttccccacctgtgtgagtggggtgggcaccctccacatagacttggggccttgagcaccctagggggaggcccctgctggaaccatctgcacgctcagcttcctc

SEQ ID NO: 585509 - DNA, 4001 bp, Homo sapiens
cccaccaccacgactggctaatttttgtattttcagtcgagacagggtttcaccatctggtctcaaactcctgacctcaagtgatccacccacctcggaccaggctggtctcaaactcctgatctcaagtgatccacctgcctcggcctcccaaagtgcacccagccactcttggttttcgttaaagaaagtaactaattaaatctccaggtgaagacgtggccttaattggttgagattcctatttaacccgtccatgttgatgaattaaaccaaatattaaaatccctgattaaattatctacttagggaaatttacaagtcattctatttcagtggttctcaaacttgagtgtgtatggaaattacctggagcatctgctagaacagattcctgggcctaccccccgagtttttgactcagtaggtctggagtggggcctaagaatttgttctaggttcccagaaatccacattttgagaactcctgcatttagttaataatatgcctgatagttaaggtctctcagttcattaaaaacagtttcggccgggtgcagtggctcacgcctataatcccaacactttggaaggccaaggcgagtggatcacctgaggtcaggagtttgagaccagcctggccaacatggtgaaacctcgtctctactaaaaatacacaagttagccagcagtaatggcatgcacctgtaatcctagctacttgggaggctgagacaggagaatcatttttacccaggaggtggaggctgcagtgagctgagataccgccactgtactctagactggacaacagaatgaaactgtctcaaaaaaaaagtttcaccaccaggcgggcgcagtggctcatgcctataattccagtaatttgggagaccgaggcaggcagatcacttgagatcaggagtttgagaccaacctggccaacatagcaaaaccccatctctactaaaaatacaaaaatggctgggcgcagtggctcaggcctgtaatccccgcactttaggaggccgaggcaggcagatcacctgaggtcaggagttcaagaccagcccggccaacatggtaaaaccctgtctctactaaaaatacaaaaattagttgggtgtggtggtgcgcgcttgtaatcccagctacctaggaggctgaggcaggagaattgcttgaatctaggaggcagaggttgcagtgagccaagatcatgccactgcactccagcctaggtgacagagcaagactccgtctcaaaaaaaaaaaaaattagccaggtgtggtcgtgcgtgcgtgtagtcccagctactcaggaggctgaggcaggagaatcacctgaacatgggaggcagaggttgcagtgagccaaaatcgcaccacggcactccagccaggcgacagagcgagactcagtctcaaaaaaaaaaaaaaaaaagtttcaccaagaaatttatcatagatttacttggatctctcaaactaaaaagcctcacagtgggtgacacagagagactgtgaattgggggagtccactgagtgtcacctttggagcagtcccactcctccctcagagccgtgtgtttcagcccccaccaagcccgttccctatagcatctagtccagcctcctggatctccctcctcccacccacactccttggggtcctgagcgcacgccctgtcacctggatggaccatgatcaagatgagcaacagcatccaggccatgtcggaagatgtcccagttggcgaaggggatctgagcagtgaggtctgggtggaggaggaaggactcactacttgtagccaggcctttggtcaccagatggggatggggagcttcctatgacacacgggactcacacatcacttgccaaggaccacaactgccagggacctcgagcatcaaatgcttgcctccctgaggagagaggacagatgctgctggaggagatgtcagggtctctaggaggccaaggggccagcttgtggcaggctagctaagcgtgtgagggggagggtggggcttagatggctgctaacccaagggtgagtgggcggttgggcgggtgagaccaggatgtgggttcccccaccttccgaggttcaaggagaccagcttttacccagaacaagcctccaggagccctccttggcccagaagctaacctacttaccctccctgctgctcaccagtacccagacccatcccacccattcccttcctggaatctggcctcactgcaccccagggctactccaagatttctatgagggattaggagaagcaagctgattggtgaagctatatttaatttgcatagcaatcaccttgtgtgtgtgtgtgtgtgtgtgtgtgtgtgtgtgtgtgtgtgtgtgtgtgtgtttggttgggtttttttgttttttgttttttttttgagctggagtctcactctgttgcccaggctggaatgcagtggcacaatctcggctcactgcaacctctgcctcctgggttcaagcaattctcttgcctcagcctcccaagtagctgggattacaggcgcacatcaccaagcccagctaaattttgtattttttgtagagacagggttttaccatgttggccaggctggtctccaactcctgatctcaagtgatccaccagcctcgccctcccaaagtgctgggattcctgttttggttttttgagacagggtctggctctgtctcacccaggctggagttcagtggcgccatcacggctcactgcagcctcaacctccagggctcagttgatcctcccacttcagtctcctgagtagctgggactgcaggcgcacaccaccacaccaggctaatttttgtattttttgtagagatggggtctccctgtgttgcccaggccggtatccaactcctgggctcaaacaatccatccacttaggcctcccaaagtgcatgagtcaccatgcctggcgaaatgtatttcttaaataatgagacttgaaagtctaaattactccttaaaccatggactacaggatggatgttatgttagcaggcaggaaaacaacattcagctgggcgtggtggctcatgcctgtaatcccagcactttgggaggctgaggtgggaggatcacctgaggtcaggagtccgagaccagtctgatcaacatagagaaaccccgtctctactaaaaatacaaaattagccgggtgtggtggggcgcacctgtaatcccagctactcgggaggctgaggcaggagaatcacttgaacccaggaggcggaagttgcagtgagctgatatcgcaccattgcactccagcctgggcaacaagagcgaaactccgtctcaaaaaaaaaaaaaaagaaaaagaaaacaacattcgtctctttggacatctccatcagagctcttggataactatgtacattgtcaatgagcagtaatcattttaaagaaatcttgtttttcggagcagtagacctcaacagtaggcttaaaatattcagtaaaccagcggggcatagtggcttacacttgtaatcccagcactttgggaggccaaggtgagaggacggcttgaggccaggggtttgagaccagcctgggcaacatggcaagaccctgtctctacaaaaaaatttaaacttagctggacatagtggcacacacctatagtaccagctactcaggaagttgaggaaggaggattccttgagcccaggagtttcaaggatgcagtgagctatgattttgccactgcatttcagcctgagcaatggagggagaccttgtctctaaataaaatacaatttaaattgggaatagtagtaaatggagtttaaaaaaaaataattttggctaggtatggtgggtcacacctgtaatcccagtactttgggaagcccaggagggcagatcacttgagttaaagagttggaggccaggccaggcatggtggctcatgcctgtaatcccagcactttgggaggctgagg

SEQ ID NO: 585510 - DNA, 4001 bp, Homo sapiens
aagttgttggcacttccttggcctttaatcaaactttacccctaactagaatcttcctgcccccaaaaactcatctggttaactccaactgatccctcctcaggcctgaacataactatcacttcctcagaaaccatccttgatcctcccatttcaaagaggtccctccaatatactcagcagtgcacgtacttttcccataattatggtcacattgttgctcatttgtttaatggctgtgtccttcacaacatcataggccctgtgaaaataaggactagttttgttcatcactatatacaaagcacttgtgcccaggacttacataatacagaatatggatttacacataggttcccattcctaatgtattctttgatccttctaattttaaatatcctatctgaatacatccttaaaaaaacaaacaggaacaccccacaaaatccaacaacaccacttactaaaggagtctctgagattagaacatacctcaatccacagaagaatgagaaaataatattaaagctctgcttttgtcactcaaatgacaaccactggaagtaatgccttaccaaatcctacaaattctgaaatactatgaaataattcacacagttgcttgtatcaatacttccacaagttattttagaattctggtaaatatccagtgaaccaaggcataagtgtcttgctgtcttacaccagtgtgcttaaactttgccaaggcgtgtagattgatcacaacacacacttgcagagcactctttttactacttgccacacttaatcattttcctgaagccccaaaataagtaaattgtgtattcacttaattaaacacacatttacctgcaaggaagacacaggatctttggaatcaacatacacatcttttagaaacgacagcagcttttcatctttacgagcaatctctcctttaacttctggatagactaaggaaaggaaaaaagtcacaatattaaaatcaaggaaaatttcctgtaatatcctaaacgcttaacacaaacgctttcttttattttcttttttgagtcggagtctcgctctgttgcccagactggagtgcagtcgcgcgatctcggctccctgcaacctccgcctcccgggttcgagagattctcccacctcagcctcccgacaagctgaggctacaggcgcgccaccacgcccggctaatttttgcattgtttgtagagacggggtttagccatgttggccaggctggtctcgaactcctgacctcaggtgatctgcccgcctcggcctcccaaagtgctgagattacaggcttgagctaccgcgcccggcctaaccactttaatttttttaaaaaataaacataatcatttggactgttaggaaaatactttagatggaaatcaaaattccaggtcaggctctgcgtccatcgtccagtgaagacccctagagaaagctctgtgaccctctcggattttgattccctgtatcaagtccgtgacagcagccggcgagggcctggttagcgggagcactggctgctgcctctgggtctcggaagtaggcggggccgccgacctcaccgcgggcgcggaggacagtctcaatgtcaccggcctggcggctcccccttccaacgctccgccaacccgagcggctgcggccgagcaggctgacgccgatccctcggcctccggacccacgctagggacagccgggcagcacagggactccgcgcccccgggccccgaaacgccctcgcaccactcacgactaatctgctctcgcaggaggctgttggtagaggggtgtctgggagcgacagagggcttcatcttgctgatttcccgttccgctcggttctctaggttgaaattcctgataccgcgaatcactagtgctcccatctcctcataacattatgcgctcaggttcaggccgcacgtgggaacaccggcgcaggacaactccgggacacccggagcatgcgcacaagtgaggggaagccccgccgcgggcgcttaaatgcgtgcccgtcgccccctagcgctcgggaggccacacaccgcttctctgcccagggcatttaaaagggagcccctcccttcggggcgagtgacggctcccacgagggccgcttccggcgggaggtggcggggcttaagtccccagacccacggttgcttttaacgctggaactccgagggagtcacccgggaagctctgtaaagttctgtgccgggccctaccccagactttctgatttaattcttgtggagtgaggcccagcattggataagactccacgtgattccaaagtttcagtgaagagctgaaaatcaaagtcgtaaggaagttgaccttgaagttgtttcacagggcaatgccaccaaagagttagccgataaaaatggaacttactgaaccagggtcaaactgggctctcaagttgccctttcctgcttttgtgaaaggaaaataatgaaaggatgttccctttcgatgagtatttgttctcagccgctctcatttaaatgcctcttattttcctgtccccccgcctgatgcattttcaagccactgtattctttttccattattttttacatcccgttctcatttgacctaatggtatcgattttagttatactttcccttatcttatttttgctactaatttacttctccatgctactaaatgctgagtcattccctctcctatttctcttctctcttgccttcttcattctttttaagcctctgtgtaatttaatgaaaggaacagacaataagacgtcagaaaaaaaaaacaaacaaacaaaaaaacgagtgttacattcaccttctccgtctctctccatttcctgaatgggttactgtagtgctgcttttatttaagaccctttagaaatattgttattaatctaaaataaaacccaccaggaaggaagcagtaggaaggaagttacagtatttctcttactgtggctgcaaaatctatttttagtgttctgatctctgcttagcaaaatgaagtagagtggatgtttttaaccagcttaaagtaagaaaatattgatgtaaagataatcgaatagaataataataataaaacaagaatcaaagaaccaaaatgaagaaagggaaagttttttaaaaagaaaactaatgtaatcattaagtataatgcttaatcagagcaaaagcactgcaaggaagacggcttcagccactctaatttaaatgccctttatttaattatactgaacatttttacagggattggtatttggaatttatagaagctgaaatcagtgatctcagatagcattaactgggaagttatcctgaaggtggcaggctgctccaagatttctatctttgatacttttaagcatgcttgtgattcagggctttttaggcacggtatttctatttctatgggtgctaagaaattttaatctgcctcattatgtctatgtgctttaatcatggtagcaattcgactcactgcctgttaaaatattttaaaagtgaaaatctcattttcatagaaattccaccgaacttcgggcagtatgaaaaagtaatgttagaagtgactgtcaggacagtagggattacaatatgaaataattatttgaattcacacattccaatagagcttggattcaacattgaaagagcttccagcatgtgtcagctgctttgcctgatcctggcccagtgctgctcaggccctcaaattgcaaaacagaaggcagatgcactccatcagaaactcacaattggctgtcaccctttgggaatcatggaaataaaacctgaaccataaatgcataattccagctcttcttgtcaaaacatataaattaacaggaactctgaacttaagaactcctgttgggcttatgttaaggattgaagtcagatccccaaggaaagtataactaggatgctgcttagaatgaagcttccatctgagtggagtattatga

SEQ ID NO: 585511 - DNA, 4001 bp, Homo sapiens
aggagagaagccatgaagggccccgccactgtgggcaactggagcttgattccgtgtagattattccactcaagactgagggagctggaatatttacagcctttgaggagttcatttctgggaattttcgtctgccctttgggcaattacagttgtccctgtgtggcttggagaaagctctcaggtcatgagataaagactcaggttgtcagcagccagctcagtcacagtgaggcctggaggagggaggcaggacactgactacttcggataccccttctctgccagatgcttaaatgtttgctattcaatctaatccttaccacagccattcaagatagctctttccccttatttacgtgtagaggaagaggcaccgggaattacatcatgtgacccttacagcctgtcctctcctacacctctgcttttatatcttcctagtcatcgtcttcttcttcttcttcttcttcttcttgagacaggatctcactctgtcacccaagctgcagtgcagtggtgcaatcatagctcactgcagcctcgacctcctgggctccagcaatcctcccgccttagcctcctgcatagccgggactataggcatacaccaccgtgcccagctatcttgtttaagtggtgacgtacaaagtgacagccactaaatagctgttaaataaactaaccgattaacaagaaatggtggagcgctagctaaacactgatttcacatcctttcttttccaccaactccactttccgcattcttagaaccaggaatgtcctcgaaagtaaccaagcttggaagaaaacagaaacaaagaagaaaactatttggcagattcccagtattctgtcatggacaattgctcttcacaccccatgctgggtgggaaaccagcttctgggcaggggaaggagggactccccatgcaggagtttaaatgactagagcgcctactctcacttctcaacacaagcaaagggaaaagattggtggccgatctctgcatagcttagaattatgtataaccctttcagaacgattgtcccctttatgattacagatggtcttcattttgaaaaaatttcagcaagataaaaaatttgcctcaagtccttggtggaagaaaggcaattgaatgaatgaatgaaggaagaaatgaatgaatgggctaagtgaaagaataaacatagagaaaagtaagggtggagctcttgggcggctcactatggacagggagaacacagtgtgctgtcacttgtcctcagccccttggagatgatcctaatgactacagggataggacacgcacagaatccaatcctcagtcaccatttctcgccagtcaggactcatgtccaaagaggctgaaaaggacgtaaatgattctaatccaccataaagaataagtgacggcccacactttgaagtactgaaataattcaggaaaaataaaagcttagttgctgtcaggtaagctctctgacgacagtaggaagaggggaggggccatgtacttacacaccaggaagcatctacccagaacaatttcataagtagaaatcatgctggtttgaatgttgcactaaaaccagcacctccaggtcaacttggagaccgggagtcactcattcctcttctggggcatgtggaggtcctccctgccccagttgaggagtgttcacagtggggaaacaccaccagatgtctggcaccaactcaggaagtaggagcctgaatgagtccctcctctcccacaggccacagcaagtggctgagaactcacccaagtgtaggatggaaccgctggtggatcatcttgcctccccgacgctctggccctctctgggcaggcgggcgggaggtgacagctagtcctgctgcatgctcatgtttccctctccatgcagcgagcggacttgcttctagaggcagctgtaagcatttccctactgagcaaccacacacgtcggatgtgagtggcatatgtatgtgtgtgtttttccttccggttgctgtgaggtgatgttgtcttggttcatttcctctctgtgcttcttcttttttttctctgtcatactttctgattcgctgaggacactttgtagtttagggacaggtaagaaagcttgttctcatctggcctctttgctatttttagaaaggtaggtgatctttaaattcgtattgcaaggaaatttgtcaaaatgtattcttctaagtggcataagctccctcctaggccgcactgaagcaaaagttaggctatttccaagccaactgaattgggattttatggttttatggactcagtatgttgcaaagggttccactattaattgacatgaaacattctttcctatgacaagtacttattgagcttgtacactggaatagacaccatgctagaggctaggtgctcagagagtttcctacttacaatgtggtatggaagcctagatctgtgtatgtagaagggaattcgaaagcccaaaccctttgtcttcttcattctgtgctttcaagtagcagacaagtggctctgagacaagcctcctgggtttgaattatggctctgctctttaaacacttctggcctttctgtgccacggcctcctcatctgtaaaatgggaacagtcacaggattgttgtgagaattaagtgaattagtacatgtaaagcactccaagaatgcctggcacaaatagagtaagcgcaatataagtgtttgccgtgatcattcgtggcaactttgtattattatcagctgagatctttgctattttcctacccttcctcattttccactccttgctcatgcctagcaaacgacttggggacatagagggttgagaggaaagagagagaggtggtttgataatggatgttccccaaatgatcctgtggtgcttgatgtttctgcttcaactccttcctgctccatcatgaagacaaagaaagggctgcccttggtcccacccatcagactcagctcatgtatgttgcactcttgtggcatctcttttgttgttgttgttgttgtttgttttgttttgttttgttttaattttctgtaagacttctctgaaattcatttatttttaaatgtttgagctggttcaaatcttgctaaagaatattctgctcatacaaaggtgccacacttaaagcaataaacactcagctcagtgccatgtacactgggtcttatgaagaaatcaatgacaagaacatcgatattaatcatcatatattgtatatattgtatacatatattgtacctgttaagtgcaattaacaatattcagcaaggtatgcttttattcttctttcctctctttctttctccttacaaaaccattcttgagtacatgctatgtatccacatcattccagatttgagctagaattattctactctgaagtttttattttataatacagagtgtttataataaattgatggaggtagagaagtctggatagtacatgttttatcaaaacgtccttttatgcttttccccttataccgtatcaggtaaggaattattttcttcatcaggcatttaattagtataactttaaatgtacaaactttagaaaacataattaataattttgtagtatgacttgaatattaatgccatcaaattgtctgcataagtcagttacactctagagatattaaaaatgctaagcttgggctccttttacataaaatacttgagactgacaaccttattatcctgaactctgttttttcatcttcatcctatggcttcatttcccacttccagctgcctggacctcccactgctgagtttttcagaacagagagcgagcgagcatgtccttcaaggcaaactcaggaactgagactttgtccaaaaacagatcagacttattttagaaaaacaagttaaatatttttcccatttgcaaagatgccggttttctatgtctgttttcctacttacagtgttagattttcttctt

SEQ ID NO: 585512 - DNA, 4001 bp, Homo sapiens
aagttagcttttttgctggtgaaggtgcctacaaggtaataaaaatcatgtatttacatcatttggcaaggtgttcaacaccagtaaggcccagtggagaagcaggtttctccatgaatgccaatcgcagtttacgctgtcagtcactttatcagttgcctttagattttctttccataaagagtaaagctaaccacgatgagatcattgaataaaagtgacttgagactttgtcgctttcgtcactttctagattatagcactcaatgttaatttcagccatttatactttccaataatagacatatgaacatactttctcttttttctgcaagccagttcttattcaacaacagggaaaggaggagcaaaaaagtcactccaggctgagtaatatctggtcctatcattgttctaaataaggaaatatggggtgagccactttaaggaagataactttcctgccaagtagagggatttgtttctggttgcatcctaaagtcaaatattaatagtcttcaggatgaccctttcctctgatcttccctactgatgaagataatagaaagctgatgaaacagaaatagctgatacctgtgtcttcagacagtggtaacgtaggcattactataaagacttttgacatttagacttaaagcttttgaataagattcatagtttttgaacaaaagctttattactgaggctagtcagtggctatcagttagaccaagtatttacaaccttacatcaaaaaaggatggaccagaaaaatttagaaaaaaagcgaagtagcttccagctagtgtacagttaatataaattgtcaatccacaagcctagcacccttgcccaaatccatcttaataataacacttttgtttaaaatagcataaaataaaatagtagcactagcactcatgtctattcatcattcaagaaaaattcatgtccaattcattgcagtctgctttctttgtgtcccctggaagctgcttgcctccttagatgggagtgacttaaaagaaaaaggggaggggggaatatacggagcaagtcaaaaatccttttggcaagaaaaatccacaaacaatggtgtaaaatgcattggaaaataatgctgctgaagtactatgactatgacactctgtaagctttcaggcacaatgagccagcctgagccttcgcactctcaccccattcaaactccaataaaaatgttttcaagaaatggctcatacttatttattcctacatccaatataacataaggatgtcaaaattttccatcctcagctgtgtaatctgggcttttaatttctcccaccaaaagtgcatatggcatactccttccgagaccaaacgattaaagcaaagtctggaaaactttgcactaagagccagtctgagacagactatgcagtcctcattcctctcattacagttccccagggcagtggaagccaggcctggggaagccaaggagacttgagccaatgcctgccgcgattcaagtcagacaccctctgatctccagtggctgctgtgaagcggctccaagtcttaacttctcaccgaggtatttccccggcaactttcagagcagatggactcgggtgtactgtgaacccctggagtgggtctcaaagaccgggtctctgcttgcttgtctgcttgcatgtcaacctcagtgaccgagactcatcttagaactctccgggacacacaagggactgacagtaaggaacacgcatacacaagcacacacccgcaggcacagctttcagcttgcaaggtaacctgtaaaaggcactctcttaccttatacttcatttcggcagcggtgggttgagccgttttcctacactagttaagacagcattaagcactgcggtgcccgcccctccattgagtgcagcgctagatgaaagcgagaaggtcccgggcagagccgcttgtcagtcgcagcgcctccctcaagtctctgagctcactgttgtgactgaggcaggctgatcgcggacctcatttgcatgccgccccgccattggctagtgggacaaggtaatgctcaggccctgcccacccctaattctgaaaaactgacaaagaacttgtaatgtgatcgcttctttttgctttatcagacggtggaaaataaaacagaaagtggggaaccgtcctgaaccttactctgtcctcccgcccccgccaaaaaagaagacagaaagagaaagaacaggaaaaggagatacattctttttaagattaacccaaattttaaagaaactgaattcacaaaagcagtctgacagtcgcgcttcctgtgacctagcaactccttcataaacccatttcgtttcaaagccattcacctcacaatctctacatgaaacgaactccgggaacaaaaggttttctgtctccgggcccctttttactaaccacccctgctgatacctctctctctctctgtccctttttctttccccctcctcccgcctactttttgtgtgtgtgtgactgtttgctttttttgttcttttcaacgttcaaagtactttgcgatgtcagtctgcaaggagctggaagacaattctcccttagtgaaaaggaaccctctagcacacgcaccagcgttttcctggacagcttctcaccagggcctcagagttgcgggtcacacatattgagcgaccttcagtggctttgctgaggataaaggttagatgtgacctctcggatggggttggccagtgcacgccctatacatcatcaccgtccactgagttctgtgttctttgacggctggcatttctagctccagctttgaacactgcagtgtttttccttctgacctctgtcctgaggatgacccattaacccaccaacacttattatccaggagaacgaaaatgcccactgtttgatgagcctggttaaaaagaccagtctctctccagcgaagcacagaacataatttctataaaggttccattttaggatttctatagagaaagagaatcacccagaaaacagaaatggtcaccttctgcaactcttctcacggacagagcagtgaggcgaaaaattcctttttcccgggcaagactgagactcggtgaatccagacaatagctgtccctgagtgggatgcactccaaccagactacatgacttggatggaaaaatcagcccttatttttttttttcctgaccaagttggatcagaatctgattcccttcgcgtctaacacacaaattcccaatggatgaaaactctacttttatgatctaagcaaaaggaatgagagaacagctgtcctacaaaagtggtttccagatacagggttggcaggttagtttgcagttcagtgtggcactgattccagggacatgaccccccaggccatcctaatgaggttgacatacctgttccagcctgtattaggccttgcttctcctcatttgtccttagagcaaaaataagcctgagtgattgtgcaaggcctttctgaacacaaattaagcacgcagcatattgcattgtaacgatctccttaagaatcctgcagactgaccggagagtcgttagtttgcaggaaattgtttttggtgtctacctggataaaggaggacaatgattcaaagcccttcccatctgtaagatgagtcttgcggcctccaagagatctagataacattcctttggcttcctaagtggtcaagctgaatcctttttctgttttgtttgatgaatatcattgagtaagtgagtgctgtcccatcctattttaatgttttcaaacagtttcctaaagtttgtgctggggtttttttgtaatttcattctctagctagtggccctcctgctttcctgtttctgtcctgtaaggtaagtaagacacatgtaatctacccgaagttcatttcaagaaggcttgggtcagtatatagttagctgcctaaaggaaagcacaagggtgttggaatcaggtaaa

SEQ ID NO: 585513 - DNA, 4001 bp, Homo sapiens
atcactccagggaccgtctttcttgatgccctcagagtggtacactgatgtgctctgcctcttgcctctggtcccctagatcatgtatgatgctggaaattcctaatctaaccaaaccacggaacccagaggttttccagagtgttacatttttgaagttgaagacaaataactcaatcatggactagaatcctaggatataagctgcaagtaagtataagtttatgtgcctttcctggaagcttcatccatctatttcctgcatattgaatgaggcccagccatgacttcgtaacagggatatccaggaggctaatgcattgttcctaccctcaagaagcttacagtctgagaaataaaatacattgagttagcaatacaattataagaggtgcagattattcatagctgaaagctagtaagattttctgatgtttaatggctattaaactaggccctctcccgtatctctgcacaacacagagaggagaagggtattttagaaaaagaaaacagggtggcaaagatgcagagataagaaggctttgggaatgcatcttttggaagtagtgaatagttctactttactagacaaggctgccaaactaaggttttgaggcttttttatagacaatgtgaagccatttatggtttttgagaaacagagggagcagaattttgtgttttcaatggatcatttgaacaggagtgaagaagtctgttcaaaaaaaaagactgagaaatttgttgagagaccattacaatggcccacatgaatgtcaataaagccctgctcgggggaatgcacagtgaagaataaacaggaaaaattacttcaaaagaagaaacaataagacttggcaaaggtttgactatgcaaatagtggggaagtcagagttttgagtccaaacatgtggcagaattggtgtagtcaatcttatttggaagatcaagaatagaaagatgatagcttcaacactgagtatctgaagtttttcagtataacactggatagaactggaaaaaacaaacttggggatcatcagctcttaagcggtactaaaagccatgggaaaggaagacaatccatggcaaattgcatagaaaagacagaaggtccacaccaaggcttgggaaagcccacctctcgaagctacactgtgaggtgatatgtctctaggtatgggccagaaaaacttccccattcgctcacactcaccccatatcttctcagagtgcagagtctgtgaaaggttaggccatgtccacacacagtccctcacctttttcttgagcttgttgaatttcttctgcagagcctcctcttcctcgctcagtccggggggtatcaccaacatggtggctcctagttcaggggcagggcccaagacatctttctccactgttaccacccggggttcacacgccgtccacactgtacccaaccccaccccttcaggtctgcctactcttgtctttggctttccctaccccttgcttaaaccaggctgctgtccaagctcccgctggtcgggatcatccagcattccctcctgtctccagggatcacagacaccagcacctttaggtaccatgtggttcaaggagggacaaatatccactccgtcggaaagacgatggcacccgacccccctaccctcgctagggtaaggacaaccgcggggtttgaacggcagagaaggcggtggagccagcgtagcgcccgcagagcaacgcaaagaggaagaacagagaaacggctatgagaaaaagggccgaagagtgagaagcagagggccttacccgagggggcggcaaccgggggccccacggtctccggccgcgcccgcgctggccgctgatagcgggctcacaacgatgacgtagcgaggagcggaaaacgcggtaaccaaggcggccccaggcgcgcacttccgcccggccttccaccggtccaggtctgcccctccgcagcgatagttcacgctctcggcggggctgtaccggaagttgcctctacttccgcccgttccggggcggggcttacttcgcagcgactacttgccgcacttccgggctgccaggcagctgctgtggctccaggatgatggagacagagcgacttggtgagggggaggggagggaaatggaacggagtagccgatatggaatgaactttgacccctgacttttgacctttccccgtagtgctaccccctccagatcccctggacctaccccttcgggccgtggagctcggatgcacggggcactgggagctgctgaacttgcctggagctccagagagtagcgtgagtgacttttgaccctaacctttgacccgcattgagtccaaacctccttcaccctcctcacagtaggatctagcttaaccttgttcatctgtgcctgtactcctgtccatcccagcctgaaggggtgctggacagattacagcccagtgtacctgcagtacatgtgaggacagagcagaaagggctggggatatttttgctttgagagctgctctttcaaatgtggcatttctccgtggagctcccttctgtatccaagcaccagggcacttggtgactgagatgataggctttgagcctccaacctttcatccttaggtctgggacccctttttctaaaatcagtgagtctccaatttcagtgtgcttcatgattagccagggagctttttaaaaatgcacattcctaggtccagcctccatgtttctgaaatccaaaatctgccccaggtaattcagtagcaggtagtttttggccaagcctgattgtcctagtctgtttgacacatctgccatttctgatctgaacacaagtcccatcatctcttttgtctgcattttatcctctttccttacctaatgcctctcatcttgcccttgtttcagcttccccatggcctccctccttgtgccccagatctgcagcaagaagcagaacagttgtttctgtcatccccagcctggctgcctctgcatggtgtggagcactcagcccggtgaggagtctggaggggcttagactagggtgatgggttcctgaaggaagctgggacagaggaagaaagaagacccaaaagttactatttttctctccagaaaatggcagaggaagacggatccctggtctcttttggctgtcctgggagccccagtcccatccgacctacaggcccaaagacacccaaccacaggccagatactgggttacaaagaggtaggaggtcaggggtcatgagaaacagttggggagaaggggaggtggtcagagacaagctcagcctcattggggctctgatctcttgccttaggtcttgctggagaacacaaatctctcggctacaacctccttgtctcttcgccggcctccagggccagcctcccagtccttatggggaaatccaactcagtatcccttctggccaggtgactcttgtggagatgggatggtagaagagggtgtctttaatctccagggaagggttccccacctatctcgtattaccctcatcccatgaatccctgtctgtcctgtctcttcccaggggggatggatgaacccaccataacagatctgaacacacgggaggaggctgaggaggagatagactttgagaaaggtaaggtggggctctgagtctgagccttgaggaggaagagcccaggctatcactgggctactgctagccctcccatgtttttgagaaaattagaaaaagatattctgtccataacaacctttactgtcatctgctgggaaatttctacaacaacctttactgtcatctgttgggaaagtgtcatagcaaacatccctatctacagcatctgtcctgtaaatggtatcttttaggtttatataatgtacacaatttgttcaccagtgtgcagtgacctgatttcatgtccctatcctacagatcttcttactattccacctggtttcaagaaaggcatggactttgcac

SEQ ID NO: 585514 - DNA, 4001 bp, Homo sapiens
ctttttctactttgcatgagggtattgcatggactaacgcagtcctgttgacaatgccaaatgggaagccaatggcagagttccctcttctcctgataatgtgttcctaccaggatgccctgtctttcaaggaatcccacccaagccagaaaatctgacttcagagaatcttccccttggaaaggagtccatttgggggtatccctcagactctccacaaggcagccccctccacctatctcctaggacagagacctgaataccagagcccggtccaggggcaaacacttcagtgccaatatccagggagagattccggggtgtgctccaggaaacaccatcatccttgctccataccaacatggtagaggccacctggcagccggccttgtgagcacaaagggagtagaaaagaaatactactcctgtctcaacatcgctcactactgccccaaggttcagcccatcggggacatccccatcattgacaatgaacgctgtaggagaccatgtgctgcctgaaaaaaattggaggaagaaacccagagtgagcactctgcaggtaccctttctaccacttcccgttaatttcccaccttctgctagggacctcaggccttccgatggtcccagggtgcaatccaacacttgcactatctatacctcttgtcctgttttatttttctccattgcatttatcaccttgcaacagacaaaaaagtttacttgtttattatgcttgtctgtctccttccagtacaatttaaatcctgagggcagagatttttgatctgttttgttcgtggctatattcatgaaacctaaaatagtgcctggtataggtatatagtacccaataaatgtttgctaagtgaatgtccaactccttggtgatcccaatttccagatcactgtcctagacacttgcccttctcgggttccctctacccctcagggactcaggcaaccaaccctctaagttcccctatcctcagggcccttgggctcattgggctgcccacccatccaacctagcaccggctctttcacccagacatctttataccctggtccatggacctccgcagggcgatgaacttggccccctcatcggatgaggacattttcctcgcctcagcaaaggcgagaagagtgccccgcggagtggctgtgatgagcgggatgcggaaggtgtccactgagccgatctgtctcccgctcacccacagcagttgctccatggtcaccagcggctgcacctgtcatgggaggaggaagggtcaacaaagacaaacttgtcttgggggttttaggaacccacgttccgatgggagagggaggatctaatggggatcccgagtaggggatggggtcccagaacaagaaagaggaacacgaaggggagtttggagcgaagctggaggctcggagcaggggagggtctacgaaaggagaaggcgccttcagggagggaaggggaccccaaaagaggaaggggctcgaatgaggagaaggacggggacccggagagggagaggggctgggagcggtaggaggaaacggggtctgggagaaagaaaagggtcctgtcgcggaaagtcggctcagccgcccgcgttccgggggacactaggtgtcgatcacctgcgcgggtcggggatggggctatgcaaagggtgactcaccagaccgaagtcgttctcagccttggaccaggaggctgccagagacagcagcaggaagatcgcggcaaacacccaaaccctacagcctccccagaagcccagaatccgcggcccccagcgtctgtccgggagcgccgtgctgggtcgctccccagtcatctctccccgcagctgccgcgaccctggcagctagactccacagagtcgggagtcagctgacccggaccctttaaagcgcagatgtcacccttaagcccgccccggtctggaggccccgccgcgcttcccggactctaattggtcttcaagtagctcatctcctcccacgtgatcacgcagcatctcgaagcttgcccttccgattggccctcttggaggccctcttggaggcccggagcgcgtgacccgaacgggaagcggactggctggggtgaagaagggactggcaccatccttattgggctttttgattggccgcggcaccaggacacgtcacaggggcggggccgattttaaagagccgggcgcggaaaaaaaaaggccgcctgtcgtcgtggagagaatgagtcacagatttactgagttaacaaaatatctttaataaaatctttttgtttgtttgttttgttttggagacagagtctgtcacccaggttggagtgcagtggcgcgatctcggctcactgcaacctctgcctcccgggttcaagcgattctcctgcctcagcctcccgagtagctgggatgacaggtgcatgccaccactctcggctaatttttgtatttttaatagagacggaggtttcaccatgttggccaggctggtctcgaactcctgactcaggtgatccgcccgcctcagcctctcaaagtgttggattacaggcgtgagccacggcgcctggcctaaaacctttttttaccacaaaatggagacctgtaaggcgaagtgaggttggatggctggacggtgggggtggggtgcagtcctggatcagggccggagctgtcacttcttcctcttcttgttgtccgggggcgcctcgttcttcttgcccagaatctttagaaggctcttggacatgtagtagggccggtccagggagccgttgttccgctccaggtcttccactgagccgcaacagagaccggttagagcggaccctggggccaggaaatcggggactgggaggcaagctgcctgcgggatttggaatccaagctgcaccaccacccttacccccgggcaggttatgtaatctcagtttcctcctgtgaagtggggtcgggaatattatgttgcatagagcgatgataagaattagcggaaaaaatgcatgtcagtcgcttaggaggagactggcaaaccctgaatggatgcatgctgtagagtaagaaaatcccctgccgctacagccacctgctgggaagtctctctaatggctcttttttttttttaatcttttttctttgttttgagacggagtcttgctgtcgcccaagctgaagtgcagtagcgcaatctcggctcgctgcaacctccgcctcctgagttcaagcgattctcctgcttcagcctcccaagtggctgggattacaggcgcccgccaccgcgcccagctaattttttgtatttttagtagagaggggtttcaccatgtgggccaggctggtctcgaactcctgacctcagggtgatctgcccacctcggtcccccaaagtgctggcatgacaggcgtgagccaccatgcctggcctctaatggctaacttctacccgagatttcttagggaagatagcagagacctctccatcagaatgctccttctttggagagcctaccggcctgggggctcactctcttccttcttccctaaacgcctggcctcaggatgtcacaagaagctccctctggttcgtttagctcacaaaggcattgtttctagaagcaccaaatctccaaaaaaaaaaaaaaatgcttgaacggctcagtactttaaggttggggacaggtggctgggggtgtcactcacggaagcagaggaagagcgtgtccacacacatgccgaaaacgctgaagaagccgctggcgatgacataggcccccaggatggaggtctggaagacatgacccgttggggttattgggttcctctggggagttgggggtggagcagcagagaggggagtcactcaccatgatgggcagccagtaatagttgaggtgggggctcttaaagtctttacccagccccgggatgcgaccggagaaaaaaaagaaggacaggacccctgtggaataattctgggggtta

SEQ ID NO: 585515 - DNA, 4001 bp, Homo sapiens
cacacacccaatctggacacaacacctgcttctaactagagatggaaaaggctggggctgagaggctaacaaaagacggcaatgtcaaaagtcccctctccttggatcaaaggtcatcagaggtatcttgcgtgcagcccccaaaaccttggggttctgggcctgagggctggtgatccaggcagagtacagaaaggactgggtcactcctctcccacccactgggtccaccagctgtctttatcaatggccacccaggattaggaccctgcatctccaaaaagcaggttaggacagccacctcctgcctcccctactcctatttatatgagcacccttgaccagggattccagccctccccaactctatttctcatccccagttcccaacctttccctcctctgtcaatgttttcttcttcctggggggctaaatcctcaactggccaacccatcccacacaactgccttttacttcaactgccctctggcccactcccaccaaactccatctgggtctggaggaggaagggttaagtgagggagtgagacacgacagttagtgggactgggggctctggaggtagaggatgtcagggacgctgactctagccctcacttcccctttcttagcagaggaggaagtaagctggggcagccagccgcctgtctgtctgctggggcaagagtgccccagcctggctcaccccatcctcctgaggaccagtcccaaacctacaccctggtggcaccccccatgcctagcttcctggccccgactggcaacctgtaactggcacctgttgttccttgagacagagcattctgaggtcaggaactgggaatcccagatattgagcaaataaggatgtccccttccccagcaagaagaaacaaaaaaactggacttggtcaggggaattttctcttcctaagggtggattattggtagatttccaagatgctggctgggttaagggtcctgccagctctgcccaccccgaaatgggaggacagagatgattccatggcctagctggacctcaaaagtgggctgagagttaagtctggagtttggaagagcgaatggggacttgaaggatcttcacgggggagtgggggtgcccgacctgttgcggctcttgggcaggcccagagttagcatcccgattcagcctagcccccatactcacgtgtctccgtcctcggagatgtaagtgagtgcttccagctgctgagggctcagcgcccccacgtgggggagtggcaggcgtggggccgggtcctcagcctcggggccccccagcaaggacagggtgtaggtgagcgaggaggagccataggtggaatcagcccgctccccatccgcgtcttccttctcctgtggttccttgacgggtcccggaggatgggtgcagggctgggggctgccgtccgagggcccggaggctggagccgaggtggactcgggtagggagcgcagagagcgcagagactcaatgccagagtcgtactggctctcctccgcctcgtccggccccttccgcgcctccgacatgcccgcggctctggccggccggggcccggtctgagcaggatccggctccaggctccgccgcgccgcctttccgggttgcgggtccgcttggcagagcgggcgcccggcccgcggcggcctccttcccgggctgtggggctccgaggggccggcgcgcagcgaggacaaggttcggagcgctggccaggtccacccagcggttactgtgggcagccgaaccgcccaagcgggtcctcctcctcgccccgcccctccggaccaacagggtcgcctcacgcggatggccccgccccctccccgcccccggcgggcgcttccggaaagaggccccgcccctccggaatcccccttcccgggctctgcgtaggcttggagtctgtggttcccgggccttgactcactccttcgttgattcattcactcattcattcattcattcattcactctttcccccttcctccttcactccattcattagttccacgcatgtactgtttccttctttcacttctatttcttaattcatttgttttatttttattttttatttttttgagacgaagtcttgctctgttgcccaggctggagtgcagtggttgatctctgctcactgcaacctccgcctcctgggttcaagcgattctcctgcctcagcctttcgagtagctgggactacaagtagagacgggggtctcgctacgttgcccaggctggtctcgaactcctgggttcaagcgatctgcctgcctcggactaccaaagtgctgggattacaggctgtgagccaccggtcccggatcattcatttgttttaaaagaaatatctattaattgtccgtacaagctggcatctttgggggagggcatgtaggcgatgggatggggaagcactgcttcctatcccctgcccatttatctcaatttctcttgctttctcatctttccctatcagtgcccaggggtacgggtagggaaaggggactcccattatctttaaaggagcagttctcctgggtcctggaagacagtctcctgtgtcaacgtcccacatcacatggaattgggcatgaaaatgtttttttggaaagagcgtcttctcagggaaactgttgtctaaaaagtaaagtggttgtggagtttcttcttcctcaaagggtgaaaccctggccttgggtagttacagtttctggtcaaccccagcagtcaaggaagtggggtcaggttggggaggccccagacatgctgggttgcactctgctcaggtccccaacacagccccaatcttagtcccaaaacatctttcctctttcactgtccctgggcctaggaaggccgtgggagcaccctactacaagtgagccctaagcccatgctccatgatttattccctcattcctccccactattccaagtgctatcagcctaacgccagcaatgcccttagagggttatccgcaagggaacatgtagcttttccatctccagcattggagaaaggaaggtggatgagtgtagacagcaacgttttgcaggggggaggccagctttcccacagcccttcccctgcaacctcattttattcatccatcattcacctacttgacaaacatgtatggaaggtctcctgtaatgtctgacgttgttctttctactggaagcaaaactgactatcacagtaataaccaataaccaccccccatgaccaacaaaaaaatcccatggtcctaaaaaagctccttggcaattacagctcagagtggttgggataagacagaagtgagaacagggtgttgtgggggcacacagtggggccagctactcagtggggtgagaggcaaggaagcttccatttgaactgagaatgggaagggaagagagatagggagaggagaaggacctagtctgtggggggcgattggaggcagaagagttgggggagggctgaggggagaagatggcccactgttcttcaaccccatgtaggaccagagtgggaaagacgtaatgagcatgaagcccagtgaggagccacgaggggaaaggcctgggaaattgaagcatctccttcccttgagtcagcatgatttcagatgttctcagtctcctcccctgacatgttcctctccggtcctcaaaggctgcagcaaaagtatagtaataaactccagacccagaccaactgggttcaaaatttggccgagcgcggtggctcacgcctgtaatcacgcctataaactttgagaggctgaggtgggtggatcatttgaggtcaggagttcaagactggcctggccaacatggcgaaacctcatctctactaaaaatacaaaaagtagctgggcctggtggcacatgcctgtaattaatcccagctacttgggaggctgaggcaggagaatcacttgagggtggaggttgcagtgagctgagatcacaccactg

SEQ ID NO: 585516 - DNA, 4001 bp, Homo sapiens
ctgttgataacaaaaacaggaacaaggccaggtgtggtggctcacacctgtaatcccagcactttgagaggctgaggttggtggatcacctgaggtcaggcattcgagatcagcttgtccaacatggcgaaaacccatctcttctaaaaatataaaaattagctgggcgtggtggcatgcgcctgtaatcctagctacttgggaggctgacgcatgagaatcacttgaacctgggaggtagaggttgcagtgagccaggatcgcaccattgcattccagcctgggcaagaagagtgaaacttcataaaaaacaaaaacaaaaacaaaaaacagagaaacaggaacaacaatcgccagcatataccaagtgcttatcgtgtgtgccaggtactctaattatgtactatgtcagttgattctcaaaacatatatggcacaacatgggtactctgaacatgggcacaatcaatgtacaatgctataatgtataacacaggacaatgtagctgttaaaagcatggacactctatctagtccatctgggttataatctctgctctaccagtgaataactgtaactctggcaaatgacttctctatgccctgtttcctcagctgggaaatgggggataatatcagtactcacctcctaagattgttgtgaggattaaatgtgttactttataagaaatgtctggcacatagcaaaggttgttattattttaatttttacacatgggcaaactaagcctcaagtaacctgtccaagaatacgtagctatgaagtgtggagctgggatttggagctggggtttgaatccaggcaatctaactccagagcctaccttctatgctactttttggctacgagcaaacaatctgtcaagaaacaaagtagctactaatctaaacagatgtgaaatttgaagaccagttgatctttggggaatgttgggttcttcagacaatggtagctcagtaatgtaaagggacaaatgacagccacatgccaacttggttaactccttccctaggtcctgatgaccaaataaccagcttatttctcaactattggttggctttcatttcaggtctggtcagctgcttatgaccttgttccccactgagcagactcaccatctgggccctggcgggcagcagcatgcagtgccgtgtccccatggcggtcctggtgggcagggtcagccccgagccgaagcagcaggcacagggcaggggcatcgtggcgggcacaggcccggtgcagtggtgggggctgcccagcatctacatcgaggcctgggtgtcgctggaggagggcctgggcccggaccagccgtcctgcagacaagtaacgacgaaagcgacgttctcggcgttggcggcgggaagtggaggccatggaactcttgggctggggaaggaaaaaaggcagcagtcaggacttcagccttggctggtccttctccctccatctctgacatcccctgttgtttctccctttggttccgtctttttttaatatcttcagcaagagatgaggcctaacctaaccctgatcctttatcagatgatagatttgaaaaaaaattttttttgaggggggtgataggatcagaggtttaatttttttaatgtaaaattcgagaaaagggtaaataattggtttaaggctcaggagcccaggtaaatttttaatttttaacaaagaactttaaaaaaacccaacagggccggatggggaaaatttttatcagcagaaatctgagttttaaaaagtcacagataatctccaataatgatctagaaattgaatatcatgtacccggcagacagatgtggaggcttcttcctctggaacctggggggaggggttactcatcagacctgcccccgcccccccaagtacccccagagccgtaggcccaaggcctgtgtttaagaagctcggagacgggaggcgggaagggcggagacactccaggctggaggaaatggcgcaagcagagacgcaggtggaggacggaagtgaactgtgaggggcgttaccggatgtcgttccgccccgaccgggtagttcttggccagatctcccaggggaaactagggaacttaaattaaaggggccgtctgaaaccagaagactggactggaggcgaggaaaaggaggcgaggggaggggagggagaaaagagagttatttggaggttttttcccgcctcctctaacttggcagagagaggagatggttcagtgatggacgaaaagatgagaagacagagaaaatagaggagataaagacaggataaaaatcacattaaacatggaaaacaaaaacaaaaaccacagtgggacaacaacagggacagatcaaaaaaaaagaaaaaatacagacaaaagacggaagaagactatcgtaggatggggcaagtgagatgcaaaaatttggacttgagaaatatgtagaaaaagatggagatgttaacaacgggaggcaggggagggggcgggatggtggagagagagagaaaggtagagagttagtttagaattaagcccagaatgctcttttcccaacacaggttgcatgatgacatccttaccttttcaccgcattcacaaccctttatgcttcctctgttaccaccaatcaagttctccttctctcacctcagtactcccccgtctccgcccctgcctcatccctagacctttccgactgggatggctaacctgttgtaagcccgcagctttgggcctggtctctgctgctcccaggcggcccctttgggtactgcctgagcaagaagtgctggagaggaggaccagtcatcaataggaggatgagattgggagagacactcggtgcaggaggctgagtgagcaggggagcactaagacccaggggtagtggaggactgcagcaacgagctggaggaggagaagtaagcggtggggggtgggagccatctggtactttgacagcattcaaaacagcatcggccataacaacagaaatggccagtcagtcccaaggtatccagcagcttctgcaagctgagaagcgggcagctgagaaggtggcagatgccagaaagagtgagtctcctctttcctcccttaggagtttggaaagaaaattgggggtgggggacagcaaacattttgggaaaacccaaggctggcgggaagacagacagctagggtctggaggctggttaggagggaagaaatggatggatattagaatctggcacctggttggctgagagaaggctgtataactttctggaagggactgactcctgctattacattgtgtgtgtgtgggtccatccccactcactgtcctttcttctgcctccagggaaggcccggcgactgaagcaggcaaaggaggaggcacagatggaggtggagcaataccgcagagagcgagagcacgaattccagagcaagcagcaggcggtgagttgaggcagagtcgggttgagaccccactgcaagttggtgggtgcatctagtgaggtgtgtaagggtgactcaacaagaaaatatggtggcagagggctgaggctgaggggaccctggcagggaccacaacattggtgaaactttgtgatgatatgtaggagagtctgggagttttgaaggccacatagagcttgtgggcggaatgccacagtctgtgtaaagtataacatctatgtggagtatgattaacatttgtggtggagggtagagttttatggtcatggatggtgaggtggtggggatattacggtctgttttaggatgaagttgcatgttaggtctaaggggaaaggggactgtgttgatctctttggtgttgggatatttctgtgggatgggggtggtttctgagagggcctttcttctaggctttgtttcaggatctttcccctcatatgcctggacccttgtctgtttctgcttttccctttctctcttccacccctctccctaccccccaggccatg

SEQ ID NO: 585517 - DNA, 4001 bp, Homo sapiens
atttttacacatgggcaaactaagcctcaagtaacctgtccaagaatacgtagctatgaagtgtggagctgggatttggagctggggtttgaatccaggcaatctaactccagagcctaccttctatgctactttttggctacgagcaaacaatctgtcaagaaacaaagtagctactaatctaaacagatgtgaaatttgaagaccagttgatctttggggaatgttgggttcttcagacaatggtagctcagtaatgtaaagggacaaatgacagccacatgccaacttggttaactccttccctaggtcctgatgaccaaataaccagcttatttctcaactattggttggctttcatttcaggtctggtcagctgcttatgaccttgttccccactgagcagactcaccatctgggccctggcgggcagcagcatgcagtgccgtgtccccatggcggtcctggtgggcagggtcagccccgagccgaagcagcaggcacagggcaggggcatcgtggcgggcacaggcccggtgcagtggtgggggctgcccagcatctacatcgaggcctgggtgtcgctggaggagggcctgggcccggaccagccgtcctgcagacaagtaacgacgaaagcgacgttctcggcgttggcggcgggaagtggaggccatggaactcttgggctggggaaggaaaaaaggcagcagtcaggacttcagccttggctggtccttctccctccatctctgacatcccctgttgtttctccctttggttccgtctttttttaatatcttcagcaagagatgaggcctaacctaaccctgatcctttatcagatgatagatttgaaaaaaaattttttttgaggggggtgataggatcagaggtttaatttttttaatgtaaaattcgagaaaagggtaaataattggtttaaggctcaggagcccaggtaaatttttaatttttaacaaagaactttaaaaaaacccaacagggccggatggggaaaatttttatcagcagaaatctgagttttaaaaagtcacagataatctccaataatgatctagaaattgaatatcatgtacccggcagacagatgtggaggcttcttcctctggaacctggggggaggggttactcatcagacctgcccccgcccccccaagtacccccagagccgtaggcccaaggcctgtgtttaagaagctcggagacgggaggcgggaagggcggagacactccaggctggaggaaatggcgcaagcagagacgcaggtggaggacggaagtgaactgtgaggggcgttaccggatgtcgttccgccccgaccgggtagttcttggccagatctcccaggggaaactagggaacttaaattaaaggggccgtctgaaaccagaagactggactggaggcgaggaaaaggaggcgaggggaggggagggagaaaagagagttatttggaggttttttcccgcctcctctaacttggcagagagaggagatggttcagtgatggacgaaaagatgagaagacagagaaaatagaggagataaagacaggataaaaatcacattaaacatggaaaacaaaaacaaaaaccacagtgggacaacaacagggacagatcaaaaaaaaagaaaaaatacagacaaaagacggaagaagactatcgtaggatggggcaagtgagatgcaaaaatttggacttgagaaatatgtagaaaaagatggagatgttaacaacgggaggcaggggagggggcgggatggtggagagagagagaaaggtagagagttagtttagaattaagcccagaatgctcttttcccaacacaggttgcatgatgacatccttaccttttcaccgcattcacaaccctttatgcttcctctgttaccaccaatcaagttctccttctctcacctcagtactcccccgtctccgcccctgcctcatccctagacctttccgactgggatggctaacctgttgtaagcccgcagctttgggcctggtctctgctgctcccaggcggcccctttgggtactgcctgagcaagaagtgctggagaggaggaccagtcatcaataggaggatgagattgggagagacactcggtgcaggaggctgagtgagcaggggagcactaagacccaggggtagtggaggactgcagcaacgagctggaggaggagaagtaagcggtggggggtgggagccatctggtactttgacagcattcaaaacagcatcggccataacaacagaaatggccagtcagtcccaaggtatccagcagcttctgcaagctgagaagcgggcagctgagaaggtggcagatgccagaaagagtgagtctcctctttcctcccttaggagtttggaaagaaaattgggggtgggggacagcaaacattttgggaaaacccaaggctggcgggaagacagacagctagggtctggaggctggttaggagggaagaaatggatggatattagaatctggcacctggttggctgagagaaggctgtataactttctggaagggactgactcctgctattacattgtgtgtgtgtgggtccatccccactcactgtcctttcttctgcctccagggaaggcccggcgactgaagcaggcaaaggaggaggcacagatggaggtggagcaataccgcagagagcgagagcacgaattccagagcaagcagcaggcggtgagttgaggcagagtcgggttgagaccccactgcaagttggtgggtgcatctagtgaggtgtgtaagggtgactcaacaagaaaatatggtggcagagggctgaggctgaggggaccctggcagggaccacaacattggtgaaactttgtgatgatatgtaggagagtctgggagttttgaaggccacatagagcttgtgggcggaatgccacagtctgtgtaaagtataacatctatgtggagtatgattaacatttgtggtggagggtagagttttatggtcatggatggtgaggtggtggggatattacggtctgttttaggatgaagttgcatgttaggtctaaggggaaaggggactgtgttgatctctttggtgttgggatatttctgtgggatgggggtggtttctgagagggcctttcttctaggctttgtttcaggatctttcccctcatatgcctggacccttgtctgtttctgcttttccctttctctcttccacccctctccctaccccccaggccatgggctcccaggggaacctgtctgctgaggtggagcaggctacaaggcgccaggtgcagggcatgcagagctcccagcagagaaaccgagagcgtgtcctggcccagcttcttggcatggtctgcgacgtcaggccccaggtccaccccaactaccggatttctgcctagggccaccgtagggcctgactccttctgccagttccctccctcaaagaaatcctccaatcaaaatcacctcccaccataatccctgtcttctttccatcccctagaaatcctgggaggcaggatccaataattttcctgtgacacttataaatatcctgctcacatctgaatctccttgttgttctttaaccctcactgggactttgtaaacttccaagtcattctcacctaaaccctctgtgaaatttgtaatatggggaagtaggaatgtggaaaacatcctgacttcagtgtctggccgatgtgggtccctctcttgaccctgtcacttgctggctgtgaaaccaggacaagctacttaacttggtagcctcgatgtcctcctctgtgaaactgggatgataataatgcctaccttgtgagggttgcttcaatgattaggaatcattctgtaaagtctagcacagttccttgcatgttgtagcagtgattcagtaagtagcaaccctgtgatactattaccaccacctgctcactggtcaaaacctacacagctg

SEQ ID NO: 585518 - DNA, 4001 bp, Homo sapiens
aaatgtgaatttagaaatgggcaccagatacttaagacctttatgtgccagggaatgcactagatgattcacatgagtaaaaataattttcagagtcctaggacaagtctcctcttcatccccaaagaactcagccactatcacggggcagaacccataaacaagtcagaaactcgttttttcaatcttaggaaaaaatatagctctagatcccttctacttgaacctccatacaaaataataactgtttccaaaatattccttagcaagatatacaagtattttaccaactgggctttcccccctaaactatcacaactactgcccacttccctatcccatcttcctgcctccaacagtgtaatttgattcctctgcacatgcttttcttctcttcgagcaagctcttccatctttcctgtggaagaattaccatcattcttcaaggccagtcaaaagtgcggtggtgataagcctttcacggaggctagctcacgcatggatacttcacagcaactgaacttggcccctttatagcactaaccgttaggtattaactacctgttcacctgtcaatttccatcaggtaggcacagttcttattgacctctacgtactccctccctaacacacggattatacctggcatatactaactgctggataattggttgccaacagcaacctctcaccctaaggaaaaccccacaacactgttagtttctaaacatctgctgagaaaacgttaacacaggacttgaaagtgtatcagaaaaacataaaccaagagatgagtggactgggtcaagcctgacacaaagtaacatagaaaggcgaaggcaaaaacaaagggaaaaaaaacccccaaaactgtactatattcccaagggagggagatttcacaaaatgagcagtggataagattagtaatatgaacagcaagttgtgcagcctccggaaagaatgcgcaagggtatcaatcttctaagagtgaggttccaggcaccgaatggactggtcttacagcccggacaagaaacggagaccgcttggttgggctccaagacggaggtgtgcggtcctgccactgcgaacggggcggggaagagaggaaatgacgagccaaaaggggtggtaacggcgccgggccggagacccgggcggagcgggctgggaggaggggcgcggcggagcagggggagtgggcgaactaacggccccctctccccaccagggagacagcgggggcgggcccatagggctccgaggcgtgggcgggccagccccgttgccagccgcacacgggaccccgcggccgcggcgcgcaccctccccaggcctccctcccgacctagaggggctgcagataagacagacccggctcgctgggagcggggagcggggggcgcgggccccggggaggcttcctgtcccaagggccggagagtggagagtgcaagggcaggtttaagtttgcggccagaacgaccaggaggaaatcgccgaggcccagggcgcgcatgtgtcccctagtgtagggccattcgtggccccaggcctggggcctgagaacctgggcctgagtcggggaacagggacgcattcccaactggccctggcaccctgcgagggtcggagccccgaggtgcctgctccccgaggcgccatccccgcgcggggcggcccctgcaggcctcggccgggagtgccccgaggcgctcgcaggccccgggccggggccgctggccgcccggctcggctaggctcagctcgactccccgggctcgacgggcgcctgggcctctcctgagtggtcagcgagacccgccaatcggggcgctggggccggctctgggccgctggatattggctcctcacactcaccgtgcctcgctcccccggttcgctgcccgcgctgattggctccagtaccggactccgaaacccaatcagaggctccagccgccgctgccgccgccactgccgctgcctagcaaaatggcgaacccgaacaaaggggaatcgggcctccctccaaccgcctccgcgcaggcgcctctgaggccacgcccactaactccagttcagggatcgccccaccccttcggaggagcaacgcgcaggcgttccctgaagccacgcccaccttcccgctttgacaccacccccagtgaaaggaatacgcaggcgctttccagacgcgccagacccttcaactcaaaacgctgccttgagcttagtactacgcaggcgctaactagcccctttgccagctgcccacccctttccaagtggccactaggacacacccctgcggctaatgcgcaagcgccacttttcccgactcgtggggcagtttcgttacgcatgcgcgggcggcggcgggaaaccacggaatttactgccggaagttcggcggccttcgccaaagagtgtgggctcggctagcaagctagaggggctcgtttccgccccgctaccgggcgggggcggccatcttagatgcgtgcaattaagggctttggcgggattggctccgcgtttgggctggtccgctgctccccacctaccagggtcggatccggagcccttccccgcggggcggggacctccaaacaaccgactcctttccaggtgaagggtgacttgggtacgttggggctttgagcgagcctccccgcaccctcccataggaccccaggacagactgcgtcctcgctgacccgccctagggtaggagacagagaatgggaggcttcaatagactctttccttctcccacgcaccccccaaaaaagtggggggtgaacgttccttgagaggccgccttcctttccccacgcctggggctcagcacgccagtaccctgtacactctgtggttgcggcttaacgggactgtggccaagtcccttctgttttcttctaagccagacccactggggaaatacttttgcgtcgtgcagagaaaaggagaccgtcctaaatcggccttgctccggagtggccctggagaaaggaggaggcgtgtcttagggatgggctttgcttccgctgacggagcggggcgctccaggaaagcacgaaatgagagcgggtcgagacagcctccgaacctaagcgttcttcctctttgccccagaagggttttgtattacgtcccaggggccgaacaaactcacattcatcgataaacgttggggaaaaaagcctattaagtggttgtacagggcaatcagaatattatatactaaggctgcctaagcatttttacttccttttcccttctcatagctgaagaaacacttaaattctggaaatagcgactcagtatcatggccagcagccttaatgaagatccagaaggaagcagagtgcgtaacaactattgacttattggtgaactgaaattcgtaataatggaggtcaaaagcataaacactttttaattaaattaatgattgcattatctttttttctctctagctgatttactttaaaaaggctcaaaattctaggcagggatcatccattactttccttttacacatgctgtaattggtttggctttaaatcagattggaggaaggggtgccgggagaggtagtcgtgggggacacaaaatacagaaaaatagcttagtattttactgtatctaataaaacattgtcttttcctttgcacattttttagatcacttatgtgaaaggagacctttttgcatgcccgaaaacagactctttagcccactgtatcagtgaggattgtcgcatgggcgctgggatagctgtcctctttaagaagaaatttggaggggtgcaagaacttttaaatcaacgtgagttttggaaaccacttacctggtttgccctggctagagcaccttttaatctgttacactttaataaaatatgcgtgtaaagaggggattcctaagaaccaaatgtttttaagattttcctccccaagaatggcctctagtttagacgtttaccatatcaa

SEQ ID NO: 585519 - DNA, 4001 bp, Homo sapiens
tttctcctgaactctccataaagtctcctttctttgcacatctttgtgctaaaataattagctacttgtaaagacagtacacatagcaacactacacattcacatatttttcccacatctgttgtcttatttaagcgcaacttatttggaatcagaattgaattcaaattgggactaaggcagtaagtaactatgacctcgaggaagtcacttaagctctctgggtctcagttttctcacttgtacaatgagattaataataaaaattatggctgagcaagtggctatgcctgtactcctagtactttgggaggccgaggaaggtggattgcttgaactcaggagtttgagaccagcctgggcaacatggtgaaaccccatctctgccaaaatacaaaaattagctgagtgtggtaatgcacacttgtggtcccagctacttgggaggctgaggtggaaggaccacctgagcgggggacgttgaaactgtagtgagctgtgatcatgcttctgcactccagcctgggtgacagagcttgactctatcttgggggggaagaaattacctcactggatagtacagattaaataagctaatatttgcaaatttccttgcacagagtatgcattcaataaatggtagattaatctccaataactgtcccaagctttgtaagtctgccagatggttttaattatccctgcctggatagatgagtttaagtgacttatccagggttaaacaattcattaatggcagcactagtgcttctgattccagggacccaccccagcccatcacccccagtcaactttatagacttttatagaatgagatgctgtgtccagcacaagaagagaattctccttggtgaaggtaagagccacaggatgcgaaagaccatgagtgaccatgggcttcggtactggaaactcctcaggttttcctaagcaaaggatagctggaccagatgtatctgcaacaatcacatttccctggtgatcaaaggtcacagcggaggcagttattttggagggaaagtagaggctcagcccaaaggtatccacttggccgacaagctgcatacttgagctaaacactttcaccctggtgctgcaaaccccagtccccagggccagggggtgctccaggaccgcaatggccccggtgagccaagacactgccacccctcggggattgcacagatgagcttgcaacctttcagttctccgaaggaccccttccgcgaagtcgacgtccaggaggtgcagggaccctgcctccgcatcagttaccacaatcccattctgaggggtggtctccacaccccaaggtaaggagaattggcctccaatgacaagcttgatctggccaaaaaaatcaaacactttgatggagcgatcgccggcgtcagtgacaaccacatggcagtcgttggtgatggtgacatccacagggtacctaatgtcttgggcagcgtcccccttctctccaaactgatgcgcgcatcctccccctgagtcaaaaatcttgacacgcctcctgccgtcgtgcaccaccacgacacgccccgtcttgggacaaagcgccagtccggtggggttgaccagggtcccccagccgccgaaggtgtggtggcaggtgagggctccgggggcgctgggggcggcgcgatgggcggccggggactggcgaagcgctgagcccaggagctctatgaggtgcagcaccggcaggcagtcgctggtgtcgcagccccggcaagctcgcctgcagaatgggcactcgagggccagagtgcgcgggtgcgccagggcggccacgcaggccaggcagaccacgtggccgcaggacaggttgcgcgggcgccgctgctgccggtggccaaacttctcaaagcacaccttgcactcgagcaggctgatctccgcctcgcgcatgagctcatgcagcgctggcccgctctccgaggcttcggccgccatggcgcgtcctgtgcactcccgccgcgccgcctggccgtgccccagcgacgctctcggtcacggtcacagtcatggtcacggggtgggacgtgcgccctgacgtcgagcgccgcgggcctctgcactgcgatctgctgccccttggtgggcacgcgcggcactgtttcctgagggcctgatggtggacgtttgcaagacaaatccacatgcgcgttgtgtagacctgtaatcgtcacagcagtcatggatggattgtgtacactttcagatgaggaaacacacctattgaggacaacaggattgctccctgtcacccagcctgtaagcggcaaaacaagaactagaacccaatcttccagcccgggtgcctagcagtgtctccaatccgcagcgccgggtgctacggctgtccgggcataaaacatggtcccttagctcatgatgcttatgatctgaaccggaaaacacgaacacactagagaagataaactccaagggaggtgaggcagatgtgtacatttcttttgtgtcttctgtcatactcatagttaagtcaatgttagatgaatacatacttgtaaaatgaatttgtgcatgaatgaatgttatagaacaacaacaacaacaaaaaaaaatcaacgaggtgaatgagtgtcagatggggcaaccatgctggaagtgtcttgcagagtaattaatatgaaataagaaagctgttagttaataataattaccatagaacttcatttttttgttttttaagacaaagtctcactctgtcacccaggctggagtgcaggggcacgatcacagctcactgcagcctccatctcccaggctcaagcaatcctcccacttcagtagctgggactacaggcatgcaccatcacactaggctaattttttaatttttttgtagagaggaggtctcactatgttgcctaggctggtcttgaacttgtgaaaattgttcacattcctccccaccccttggcctcccaaagtgctggtgtgagccactgtgcccagcctatggaattcacatatgcctgccccattgtgttaggttggtgaaaaggattcgcagtgtttgccatcacttttaatggcaaaaccgtgattacttttgcagcaaattaataaataatttacatagattatcttgtttaaacctcatagcaatcctacaaaaatatgttatttttattgtctttttttctgatagaattcatagaaatcaaatatcttgcccagggtcacatggctaggaagtggctggcctggaatttgaagccaggcagtttgacttcagagttacctattttagtcattttcaaacttctttgcacatggtaaacacctgggtcgcacccgaaaagtttaattggcccatggtgtggtctggacagctgggatttataaaagctccccaggtgattataatgtacagccaagtttgagaaacactgcattataataattccctcaaatgacactaagttcagtttttccaatctcagttaagaccaaaaacaaagagaatttgccatatgttggaaaatcttcaaacaagggatagcataatctgtgtgaagaatccattgtggtattataatctctcatttttctttttctttcttttttttttttttctttttgagacagagtcttgctctgtcaccaggctggagtgcagtggcgcgatctcggctcactgcagcctccacctcctgggttcaggcggttctcccacctcagcctcctgagtagctgggattacaggcacccgtgaccatgcctggctaagttttgtatttttagtagagatgaggtttcaccatgttggccaggctggtctcaaacttctgacctttcgcgtcagcctcccaaagtgctaggattacaggcatgagccaccgtgcctggccctaaactcttatttttaaggggttctccctcaaatgtcttatgtgaacattgtgcttaacaaaaccttgtattagagaatttctttt

SEQ ID NO: 585520 - DNA, 4001 bp, Homo sapiens
gctatagagttcacactgggcgtatccatgtccccaacataacatgtacctggaaactagaccataaaatgaattctcaaagtaacatgagaacacacgcataaactattaaatccatttgagcacatctaaaattcactaaacatactctatagcacagttattagggctactctaaagatcaaatgaaccaatatacataaagtacttagctcaagaaataactcaggtaaaacatggttgtggcaggaacagtaaaaattattctaacgaggccccaaactttgaactgtcactgtctcttgtaaacctgggccacatgctagcgctcatctcacataccatcttttctgcagctactaaattttacaatcttatgaatctgaacaggataactcattttcaaaaggaccccaccttctccgtaagttgctaaatgagaaaataaacattgagaactagatatcaagttaaaaacagaaatgtccattgtgctttctgcttagtatttgacaaaagcagtatgtgaatttggcacctagtatttcatgtaaactcttgttgagcaaatgttttgcatggtgcatacaactatcaatcttaatacacaaaatccacaaagacctgacttaaccctcatttgtgtttcagaagaatctagcattgggccaaactcaccatatgtccccccaaagtgtagccagagttcatcacagtgttttgtgctgatgtccatttattttaaagactgagttaccatacttcagagttagaaactattgaaaatggaaacttttcctattcgacaatttcaaatcaaatccaagtaatggcattcgtgtctgcaccatcaatcgcaccatcggccccactgcacagctaccaactggctcctatgaaaaagtctcttcccctcgtgttcctcactctcgccagggccacttttaatctgttcatccaaaggcagcctttagcaaggagctgcagaaaatcagcccaccgtgctgctctttgtagctttctccaaagctcctcttaccaatgcccctacccatgttcatttatccagtataagtcactggtccaaacactaaactaaactaaaataaaataaaccaccgactatgtaaaaacaaagccaagtagttataaaaattattattttcaagagaatgaagaagcacctacattaaagaaatgtaagtcaatggtaagtacacaataaagccacatcacaaaagttctgtaccttacaacaatcactgatcagtctagacagtttgtgctcgagctcttaaatacacaacaaagagtgccagggagtttcaggggattatctccaccagaaatatgtgatacattacacagaggctcccttacctcagctgcatatttatccaaagaatcaaaaaatcatacacttgatatcaagggaaacataaattaagtacaagaatttcccccctcttcaaaggacttcttttgaaaagcacagaagaagtgaattcacttaaaaccccaatcataaataaataagacatgctaagatcacataatactgtcctagagttacaaaagtctgaggtatttaaacaacctggtatagagtagagtttaactcatgcctattacgctgtttcacactctaatttcttcacacaaaagaacgaaggacctaaaacacacacatggacacacacacacacacacacacacagacacacagggacatatacacatatggaaacatatgcacacaataggtagtagagagaaaaggaactacttacttttcttcttaaaaagtttaattaaagacttaatctttgcattaatgaagaccaccatttccagggcacctacatagagcttagaaatgtaaatcacattaaaagctcagcccagtaggcaggtggcaagcttcgtccttctgctacagattctaactttttcttcccccggtctcatatccttagacatctgcccaggctgatgtaactgaggttgagtttattgtcaggcagttacaaaccattaacagtccttgaacctgaaaaactcctactgaaacctaatctttaaggctgagagcagccagtgacatcgtgcgctgaaagaaagagaaagccaatcacggttcttatttgcatgacagccacatcaggctttctgcctcagtgcccattcattcagttttctctccaacagatcagaagttcctcctctctgagcccacaaaaatagtgcagactttcctctacggaagtcaagatgaaacaaatgtgttccccatttcattaggcccctatgaacacccagatcttttacaggagctgccaagtctgacagcaattccagttaattcagggtatatgggatttgaactgatttaggggggaaaaaaaccaaactattgtttcccaaccacgccccaggctctgcctccgataccaaaggaacttgtacaagcagtaaaactttagaatagaatctccaaggagctgcaaatgatgacttggttgcatttttgtgcaaattaggatgctctgtcttctcacccttctttgccagtgattgagaatcagcattgtgtgttccaaagcatgatcttatttgcatctagctgccacaacaatcaagaaaaaaaaaaatccaccaaaaaaaatacaacttccccactccaaatgataaattagataaagtaccctaatcattttaatctttattttatatgtaattgtcacttaggctcctggttttcagaattccataatcgcccttccctcaatgttgtctcaaacaaacattatctgagttactctttaacttgaatctaccatccagagtgctggttcttttgcccattggcaattaaccacagagaactagggaagcacaagtagagacagagaaatcagaaacagagtataagaaggcactgaaaaaacatattccaggggtaaagggataggaaaaaagaggagaatatagatccggaaatactatgacaacggaaaaaggaaaagaatcttcctcacatctcagcccagttccacttcatggccaaacacttttgaaacaatttagacaacctcttatttcatagctttgggccagacttataactcaatggaaaaatgtaataatccactaattcaaaacatttagtttataacaaaggctcttagtcaaagaataaaatttatataaggggctctgtctagggaaagctttgaaatgattccttctcaggtctttttatgccctttattttttcaacaacaacaaaacaaaagaacacataggggaaagctttgaaatgattccttctcaggtctttttatgccctttattttttcaacaacaacaaaacaaaagaacacatagaaacgttaccatcttatcatacatattatcacagatttccaatttgtgttatttcattttatatatagctttattttaaagtaattaaattgccagatggcaaatgagaaacgactgagcctgtaagtcagattatgtggctgccttaaattagcgggcaaagttcccctttggaaaacaaatttatctgcaagagtgacctcgctctgctcattgcattagacacaaggagagttgtgggcaaaaacactcatatgcacaatccacaagtgtttgaggttaagtgtcaccatgcaaatgtccagtgaaaacagaaattgttctttcaagaaactctgattatgctcaaccctccatagcatgtagctttccatgtgctcaacaatggcatctgaatatagattcgttcatcagaaagataaataccaggcaccgatgctaactgctactctttcatttcattgggatacatcattggacaaaataggtgagatccctgccctcatggagcttaaattatttgacactgaactacaattttgtggtatattagaaggagttgagtgcaacagacaaaataaaaaagttaagcaacataaaagggggtttgaggg

SEQ ID NO: 585521 - DNA, 4001 bp, Homo sapiens
ttgatacaataaacaactgatatcttcaaagattattagctagtccctcttgtgccatagtttaacagacaagaacaaatagtttacacacacattcactctgaagaagggctgcattaatgctcagcctgtgcgacataattactatactcataagcacatatttaacttagttgattctctcacgtttcagtagttttgctttccaaagcagggggaagcacaggtccctgaaagactccagcaaggtttcttttggcatggggaagaatgtgataaacatggaaaacacaatcacgcggaaggtctggacttgattcctttgtgatacttaaatagcactcccctactgggctttgcccactgcaccgaatggagaaaccattttagagcttaacaattcagtccctacacacactaagaggaagaattcagaaaatctaaatataaaataggggtgtgttaagaaatatcgaactgtttccctctctcccagcaggactggtattttttttcatcttggaggcaaaacatgttaatcctgagaacagagccaatgtcagtctgaaaagaaacttgatagaaatctaaaaactctggttaaaagaaggaaaggagaaagaaaaaaaaaatccagaaactccttgggaccaacatatcagtgttaagccccttgcgtgttcattttccttgatgtcacagcccaacactggtttaattcaagcattcatgtaattcctcaatcttagaagaaggatgcaagaagactatgtacgattcccgaagttttctcagtgcagtttcacaagagttccacgttctagccccagattgctataagggcagaagattctctctagctagggtggtgggtggtttatcattgaacttttcacaagtcacatgagcatgtggctctgatggagggagggaggctgccgagaacaaataacagctactttatctttctttgaatgatacaagatacaagctcaagctgaggaagagcatttttattttagacatgtaaacaaatgacgccgaattccaatacaaaaacaaacatttcaaaagaaactcctaatgggggcaaaaatcatgaagggggagtgatagaaacaaagaattctacataacaaactttttcaaatgtttaaattttttaaaaatcgagtcaccttttctgggctgggctctgtatatccagttttcgtcatccacttccacctgctgcccacaaaccgagagctctccatcactgcgaaacagcctctttgtctgcctggacaaggaggagaaatttatccaacttacagcacgtgagagagaacctgtattcggctggagtctgaaggaacctgaagagccttcctttttcatcttcttttcaaaatcaactagagacaaagaacagcccagcaaacaaaacgctgggttttttgcgttggcccaggtcctctccacgagcctgctgtttccctcttagacaacgctgacagtcaggcaccgcattatccaaaaagacggcttctgtgtcacccaattaaaaagaaagggaaaaggaggggttaagaaagaaaagaaaaatgttttaccctagccacattgtggactccgtttctagatccgcgatatccacggccaaaaaataataaacaaataaaagtataatttaaaaaatgaagcagcgtgttcatttcaggagtacttgtcaggactttgcaaaacacaaagccaaggcaccccgactctttggcgtgtccctagcatcccaaattgtaatcctactcctctcctgggcatctttccccaccagggcagaaagccagctgccctggtgaagtaactcctcaccctagagaaaaagagtcagggtcaagccaggcacccagtttacagttcacccacacggttacttgggagaaatcaaagagctcagctcactcgccccagcacagggcagaatcataaaccgcccacttgctctccttcccgtctgtgaagcgctcgttcagagccgcaggactccgcaaacaataaaaccggctgcgtggctattgcctggattacagagcaagcactcctgcgaaagacgataggctttcccgacaccaaaggcacctcattggagacagaaaaccccgcctctccacagtcaatacttcagtggcagctcaaacttctgaactttagcgcagctaggggtatgcaagtctgtgcagaatacagacttctgggcataaagaaaaagaacttgattatgaattatcaaaccatacttctgaaactacaattttgagaaggggcttaatacagtagatagatagatagatagatagatagatagatagatagatacatccaacattcctagatggatttaggaatgtccatcatttaaggaagtatatttccaaagagaatataacggacccggctattcactcccagcttccaacaaaggtgaaacgcagccatcattgtacctgttactgtcactcctgcctgtcaccagcagccagagtgtggggctggatcctcctctgccgtatcactgggagcccctgggggttattcctctccaaccttgaatgatcatcctatcacaaagagtcatcagagagctacgctagtggcacttagctgcaggctctagccctgagcctcctctgcaaactatctagagccacagcttgcaatgcatttgggtgtagcatttcacccaaggctaacttactacaattccacggtcctaggggtgttaaaagtccctgcaactttccatcatagagacttgggtcggcatctccttctcccaagcgttatttggggtaaggcaaataagcaacgagtagagaactaggtctgtagcactttgctttactcagcatcgatcagatacattaaaattaacaaactgcaatagaaaataaactgattaaaaattttaaaaccagaattttgcatcatacatctactccaattcactgagattttaagaagaaggctctacaagcttactgggacaggaacacttgtagaagatagtcagaagttctacaaagtgttactaagataggcagttcatattacaccatgtaaataatgacagagaacaggtattactaaggcagaagctacaaagcagcctcagtttaaaagctaaaagagtccttgagatcacgtagtttaaactccatgattttcagataggaaaactcaggcccagagaaagtatgttcatacccaatgtcacacagagaagtcagtaatgaggaccaggctgcagccgacaccacttggatcagagattcacacacttaccagggatgcttgctacatcaccaagtgctctgggcctgtttcagttattaattgcaataatatctccactttgactaccattattttattttcttttttttgagacagagtctcactctgtcgcccaggctggagtgcagtggcatgatgcaagctctgcctcccgggttcacaccattctcctgactcagcctcccgagtagctgggaccacaggcgcctgccaccacgcctggctaattttgtttttgtatttttagtagagacagggtttcaccgtgttagccaggatggtctcgatcccctgactttgtgatccgcctgccttggcctcccaaggtgctgggattacaggcgtgagccaccgcacccagatgactaccattataaaggcaaagttaaaatagttgtgcataacaccagtggctaacatcaaacatccactctcttctttctgagtagaaaacactttttgagagtctcaaaatataaaaggaaaagtaaaaaaagaccatctcaccagagaaatccattaatgccccaaatgctgtttgccatttcactggttcacgagacccccgccacacatctgtgcacactcaaaggagccatggaacccaaacaatgaacacaattctcttctccctactctctacatcctgcagctgcatttttaat

SEQ ID NO: 585522 - DNA, 4001 bp, Homo sapiens
ctacacacccactcattctcacatttttatgctttcacacagtgaatcagcaaatgtattctttttctgaataatatataaaaataagaatgttttgaaaacctttatacagtttggcagacttagcctaatgggttgtttaacaaagtaaactccctcattgttttggttagctttattattaagagtaaaaatccttcattgcaaaacttatatgaatctgtggtacagaaaaataaactggtttacacatcattgagaaactaccacattctgaaaattacatttatagttccatctttgtcttacaaccaagtgcataagcgcataaatcacagatcaaaatagacaccatcagataactttcaggggaaagaaaaacatcctaagacaacacacaacaaaaagcactgtttcagctaaatattaaacaaagcagcaataactaacactcatgggcttcacgacaactgataaacaagaacacttaaggaattcctctgccagtttcaatggcaaatccttgctcttttgaacactttactgattggacacttaaacatcttctgccttgtagtcacttcaacctttatgaaacagttgttgaaaacggacatgactattccagttaatttatactttctaaggaaatatatttaatgacaagtgtgagcaagtagctcctacctcaaattaaccacttagagtggtgtatttttcacctctcaactctctactcagaccctccttccattgcccttagggaattgaaattcagagacatgacgttttccattattggttccttgcccctttgcaactgtacaacattcctcaaaaagtacatagaattctccatcctataggatcagacaacagtatctatttcaggagcaataatatgcataatgtaagacagaatagtttttcttggaattgtctgtgttaattgtgatttaaaggttactggttccgtctatgacaatggtgttgctgagttcacctaagtatttttgttcaatctgcatactttaaaaactcaatgtggctaaaactcaaacagtctaaattagactgttgtaaggataccatgtgccctaaacagtggtttttttagagcattatacttaaagacaacattttccttaaaaaaagaaaaaaaacatgtctatgaagaaacaaagatactgcaaaattagtatagagaagaaaagtccaaaattccgtattcctctgtttaacaacctgtacggtaaattgtaggtgacaatcacgttgttacatgaataggaatgcaaagcataaagaacaagagctacatcttgcttttcctaaagaaattaaagacaagtttaacccgcacctgccaaactgtcttaaaagggacagaaataggtgggaacggaaaggctcacctctcctgtaccccagagtgcgtctccctgaaatcatcttcaatataggcaatatatctgtcaccttctcttttatctttttcgtccattctagtcaatggcagaccctttgctgcactcccctgcccactatctcaaagacacattacagaataaggggacccaagtgtcacttaccagttgcatgccacagataaagataagcgtgcacctgccactgcaataacccatggtttccgagacccctgccacagccagactgtcccacgtcggccaccgtcgagcccccactttatccaatcagatcgcggggaaggacacgcaaacctgccgagggctcgggggctccgggctgctgctgctgccagcgtcctgggaagtgacaggcattaggacctgctggcgcggcggcggcggcggcggcagctccagccgcgcccgccacacataccttcactcgctcggtgcacacgccgcgccgcgggcagtgccgcctgcggaggcgcgctcggggcccgcaggggcagcagcggcagcctggcagcgccgccgcgccctcgggcatctggcccgcgaagtttcgcccctgccgctctccgcgccgctcgcctcacgccccccagcgcggccgccgcccgacgcgcgctcgccctgcgctcgccgcgcgccggctccgggggcggcagaagcgcgcgagggccgctgcccgcctccctgcgcagcccgcggctcctaggcaccctgcgttgctgggcccggcgggcgggggtggggcggggagcggggcgcgggccgagcgggggcgtcccggctccgcggtccccggcggctgctgcagcggctgctgcgcgcaatgatgcgggtccgcgccgcgtcccagcagcggcgctgcccctcccttcgcccagatgtgtgaatcctcctcctacaacaaatccttcatcctgctccctgccgccccctcccagggggccaactttgaggaccgcaggggctgccgcccaggcggccgcaggcggcggtgtctaggcggaaaggagcggcgcgaaagcggcggcggcggggaccggggcctcggggcgaggagtctgggcggcatgaccgcggtttgctgagctgaagtcggtcgtgctcccagagccactccgcgggagcgaaccgagtgtgtgtgtgcgcgcgcgctcgggggagaagggaccaagaggagggttagggaaggaagctggggtcatggaacaggggtgcaaccgaggcatccagagcggccggaaagcccgagtggcggagaggccagaggtggcgagaaggggcgcggcggcaccggacgcaccgcccagcacctggctcccctgggctcccgaggatctgaagggtcggagcgcggagagctacggagccgaccctgcttggggaaggggaccgagttgctgctggagttgggaaaaattagcaaccggagggaatagggatgcaatgagttgctgttgctgcttcaaactgttgtttgttttcacttaaaatactaaagagtcggagactagtttaatactcagttacttcagcttcacagcagtcccagctgggtgtggattcctagtggagatgcaccagcctccgctgagcaccggcctgaaagctgtgaagcggctgctacctgcagagacaggcttcggagcccgctgctgccacctgcgggcggaaagctgaagggcgcaacatgctggcccaagtggctgcccctggggcgtggatatttaggaccaagtttcctttttagccctggcagctaaggaaagcaatcctaacttttccaggaagtgaagattatttgttgagatccactgaggaactgactcattggggtgaagtgtcgcgattgataagaggatggtttagggagctaaatagcaaacagctccctagcacccttcttaagagattaagatgacgaagccacatcaagcagagagctctctgtagcaactggaacttggcgcctactgagaaaaatggcatttatacaggataaagttatgctgggaaccacaaataaggatcccgaatgattgcttcctttgaataaacattatgacgtatcagaatgactaaatacaaataaattgaatagggcagagagactattctccagagcctggcactgaattttcagaaacgtttcgtcagtcctagggagccaaaaagggattaactttgttaaatttatggagcacagatattttattgctataatgagaatgtctggttttaatcgacccatttgtaaaggggcttttcttctgaaaagtgtctttcaatgtttaataaaattcccaagagcccaatatgtgctcttaggcactgcaaagcctggaaggtaatagttccacaacctttggtaaaactgaagccagttatctagtggaaaatgtttctcttagttgctcttctgtctttatacacgttagctgtcctgtacctgctagggctatgggtattttgcattgccaaacagaaagctgtaagttaattgactgttgaagaagctgctgccatactgtcaaaagcattctattacctcctcaaatt

SEQ ID NO: 585523 - DNA, 4001 bp, Homo sapiens
cagagaaagtagccagtagtgaaagatctgtggtacgtctttattcaaaaggatgagataataatttgatacatagaaagcccaaattttttttttttgcattgtagcatcttaggataaaagggacagaaatagttcatccaacatctagaacaccttgctctattttaaatttcctttcagcctattgctatgttacacaggttagtattatttttaaataataataattaaaaacaaaaatattatagctaatatttattgggggctttttaaatatcaagcacggtgctagggacttttcatagaacatcccctttagtcctcaaaattaacctctgagtttttaaatagttcaaatattttgggtcacatctagattttatcccaagaactttatcagaaataaagatgaaatatttacataatgatattcagagcaaccattatttataagaataaaaccatgaaggaacctcaaagtctaataaaaaaagaatggtaagttaaatttttttcatataatggctaatatatatcaattaattaaatcattatgagttaatgtaatgactactttcattttaaagataagaaaattaaagattggtgaggtgaagttatctaaagtcacacagaatttggcagatcgaagattccaatcttgatattatgacttcagaggactcactctcaaccactgtacaacccgccctacactgtatcaaattacgattcataaaagaaaatggacaatactatcatatcttgtgcattaaaaaacttcaccctgcaacagaactcctcccacttttacaagatttagatggctacctagcctctgcagtgacatgcactggaggctgggcatgcacctggaggcgaggactgtgggcttctcattcttccttggttccagccaccaccacattgcctggctgtaccaatgagctttatctgggttctagatgatggagagaacaggtcatgggggggcatctttaatgaggacgctttcataaaacatgagaagggctgctggtttgtgttgaacaaggcagagctttcacggtactatcttatatacatgcttttactacaaacctgctttacaattttaaataaatgcctatagacatttcctttgtcaaaaatagaagaaatagaaaaaatgatgaaactaaaaagaaaaaaatgtacattaatgaagagcagtagctgagatctgaggcacatacaaaagtttaaaaaaaagcaaccctgagttatggttcccatagtaactgaaacacagttggatttcacttttatgttaagtaagtttaacttgagtgggaatgcaaaatacttccttcaagccaaaaagagaattatggagaacacagaggcaactgtccagattattctggctttctcatacgccaaatattagccctaatgtggttaatattttcacatcaatagtatatgttcattcctattgattttaaactctttattcaatgtataaaatatgattatttaaaatgagaaaaaatttccattaaaatctgtcaaaccagaaagcatgactttataatgtagaaacatagaaacacagtttggcttgtaattatgagactattcgctgaaagtacaaattatgagaattcagtctgatcacactcactatcaagtgccttaaacctgacattttcaattactgttgatggaatctgaaactatgaaaataaacacatggtacttaaaagagagtatccacatctttaagatagattatacacataagttttcaaggcatttggagtttgcacatcattctctagttcaataagatttttaaaaggcagaaaatgtacttactcctgttatgtaacgaggtctatattgaatagttccaaacaaaccaagaatgacgataataatatgtacaaaatttgccaggataggtgcccactgatatccaaggaagtcaaatatttgcctctccagcacacaaacctagaatagcaaaacaggatggacagatcagcatgtgagaaacagcacagtggtgagaggaaaaaaggataaaattattaataacataattagcacttataactgtgttaccatatctggcatttgtctttaactaacagcgagaatgacattttcagttatttcaaaggaacactatggaatctgtggatctatagacacctacaagcctttcagggatgattttgtggaggaatcaagcagtattcacaagatgtcatctttgcagtcataggataaattatattgtcatgtgcactgtcaaacatttgaagtcatcaaccagcaagtcagggaagtccacataaagagtttgttgctagatctgttcaaacgtcattatataagttgagaatagaacaaaggaagtttgatgtggaggaaaaagaaatctttagcaagagttgtagcaagaaccctttagcaagacaaagatttctgaacgtgagtctgccactaagtagccgcagtggcctacgcaagtcatttcccttctctgggtgctggccctcgtctgtgaaatgaaggactttgacgaggtgtgtagggtccttctagttctaatagtgttgtattatagatcaaatatgatgttttgtcatacctggctaccaggtaaaagaagggccctaaaagaaaattagaacaatggaaaacaaacacaaaaatcaagcatcactgttataaaagcaagacacttaagtcgatttaaattatactattttcatctgtgttcacaactataattaagacatataaaaatctaagcagtgagaggagaaaaacaaaaccaaccaactaaccaaaaataacaacaaactgagattagtgggtagtccggaagtaccattttacatcccaaagtgagatctaggaagctagcaagatctcatcagatccaacaaagtaaagcagaatgttggctttattcttcctgcctgccctcaggggggatgataataaactctctgttcagagaaaaacattgtaaaaggacttgatgctccataccaagattcaatattttattcagccaggttttcaaggaaaatgatgattttaaaatccctaagttcctaacatcactatgctttaatgatatttcttttcagaaggaaatactgactctcaaaacaggcaatgtgcttttaaattaaatatctgtagctcagtttgaagacatcttgaatgatcattattcctactgcagttctttagctgagtagcacgttttcccatcaggcattgaaagagaaaataaattcatgacacctctattttctaaggcacactgggcaccatgtaatggttgtagcagtcacagtccaacttagtcaaatcgtaattctcattgcatcttcgccataattaaaaaaacaaaagaaccttgatttgttataccctgtgctaaagccatgatactcatcagagtctcaatagtggaatgcaatattcttactccttaataaacacagactgtcataggactggaatatcacttaagctttataaacctgaattgtcttctgatgagccattccttcaactttctcatatagttaacgttttgtagaaatgagacccatttgtgacattaggcagtattacatatgcgaagttagaatctgtgaatggtatcaaaaactaagtagttgttctgagaacatgattgctaattttctgtgtaaaagttcatttcaacatagaaccctctccgccttattttatgaataaatagtgaataggaatgtaaaccaacagcaagaaacatctaaactctataaatttggagcatcataactgtggggacacagcagggcaaacgtatagaggatgaaacacatcagtctaacagtgggaaatatctcaataaatgcaccaattatgaaagaaaatagcagtcctattaattataaaaaatatagagatgataatgtaataactaagtctgtaaaactgaa

SEQ ID NO: 585524 - DNA, 4001 bp, Homo sapiens
tcttgtttggattagcaactaagaaatgttctctcttcagagatggaccagaaaaaagataaccaaaatcaggagctttggcagcctttttgttatataagggaaaccagcccaaggaaaatgacccttggaaaaaaagtggagaagaaagccaatgtccaattaaagccatgcagaaaatccatccttcttctagacttttcatttgtaagagccactaaatcttttctattttctaagccagtctattaactgaaagtagaagtatacacttgattgaatcctttgttctttctgggcttcttttggtccccccggggcaaatgaatggcaaaagagtaacgagcgaaaaaaaactttaatagcttttaatctttatgctgcaacatatactcttgtatatgcacagaatgtatattctgtatataagacaccaaaatatatatttttgggggaaaggtgtcaggggctaaagtgaaagattcactttttactaactctcctcctataatggttgaatatttttaaaaccatgtgcacatattactttttaaagttaaaataacaaaaaataagctgctaaagatatctcaaaagaagctttttcctgagggacttactaatatggtaagtacagtagcactgtaaagccttttaacacttttggtcacataaaatttttgttgttaaaattcctgctgtgcaacaagtaagtccttacttgtcatctttctcttttgtctttttgtgcaccatctctcggaaactggctaaaatcttactttctctctttcgtctctcttcttggttaaaggatgcaagagctctcttctcatcagcactgtagatctggttctccttacgcagtcgtacagcctccattctgcgatgcctgctaccactcatgacataacctgagcattcaaaagaaccgatctcttcacttgtcaacccaatttcacctcttcgtgggattcgctttccagcttttacatactcagccatagctgcaccttcaccgggaagcaaagcatggccatacttcaaaggtttttcatcttgagaggtatgtattataggtgcttctggccctattaaatccatagtatctgccacatttggctgctccatccaggtagcttctgacaagtcctcttctgagtctttacagcttgagtcactggattcttttttggttttcttattcttctttttctttgttttgtgtttctttttcttctttttcttcttggctttaactctctttttatcatcatcagagtcagaatttgtgtcagactctgagttactgtcactatcagaatatttcctatgctttcttttagacgacttattctttctttttttcttgtttcttgaacgactggtcttctttttcctatgttcttccgagttggaatctgaactgctgcttttctgatgcgttacctcttcttcatcctcaactggggtatgttcgtcagaatctagctgagggaactttggagacggcccccacacttcaggcgctcccaattccccaatcctctctctctccttcagcctcctctgccgatggctctcttccttctcgtagtcttccgctgactgccgttcttctgcatagcagtgacgatggtagcgatatccactatacgaggtcgaccaggaggacgcgaaggcgtagttgcggaatcttgggagccgccctcgcgacccagagcgactaaaggggtaaagagcgcccacgtccaactcactccaaggaggcctgaggccctcacggccgcgggagtgagagcgggaacagccatcccaagaggaacatctgctctgcggggatggtgggctccccgaggagctgcgtcgccttctccgagagcccacgatgtcctcggaatagctggaccgggatactgggggcatgagccgcgcctcaacgctgggcggttgctacagacccagaggctggctggtgattcgcggccacgcaggcgcactagaatcggcctcccacgcacggcttccgcttcctgtcagttaccaaacggaaaacgaatccgcgcgtgtgctatgtggggcgggccttggctgcgtgaaggcttcttgtgggaagtaggtaggattagggtgcgcctgtttttaggacttatattccccaacttgagccgtgtgggaacataaaaggacgaatttgcgtcaatgatcccctctactgttggaacacccacttctctttttcgatttcgcttttaccattttgcttctcaccctttgttcttccctttcatttccacctccttaactttacccctctgtggaagatccctactaccaacgctcctccttttttccttcctaaaaaaggaacttgtccaccctcttcgtggaggaaatatgtttaattaatcacttcccaaccccccttgttaccactggaagcaagaaccaaaacttcttttggaatcagtttgagctcaccctctaagctaggtgaaggccaaagtcgtactttttttttttttttttggagacaggatctcactctgtcgcccaggttggggtgcagtggcacgatcatggctcagggccgacttgacttcctaggttcaagagatcctcccgaggagctgggactgcaggtgcccaccaccacgccaggttgatttttttaataattatttgtagagaccgttgtcactttgtttctgagtctggtctcaaactcctgggttcaagcgatcctcccacctcagccttacaaagtgctggaattacaggtgtgagccaccatgcccggcccagagtcatgattttaattattaaattcacagacttttccaccctagaaacacacagaagcatcccactcgatcttgtagacagatgtctttctatctagggagacttcttcagaaactttgtagtttggaaaccactttctcgatacacattagatctcactctcagaaatgataaacgttttatgcaagatcatttatctctcatcttaaaatgtaaataggcattaacatcatcttggttctctctaattaagttgatctgctcagttgtttgacagccaggtcaaaacttaagaatgatgccttcctgatgctagaactctaaacaacaaaatgggggaaattaaattgaataagaccaaatcatatcatttgctctaagtagaattttagtactttgattgaaggggataagaattggttccatacataaattatatgaatttaggaactggtaaacagcagggagtattatatgtgaatggtcacatgtatagtgaaaatatcatatggatagggtgagtactatagagtttgtgtaagtaaagaaaattttcttttggagttataaactacttgataggccaatgaaatggatatgtcttacttggataattgtaaatttaagccatttagtatctgatgtagacttgaattacaaagctggttgatgaaatacttctttcaggtagcgacacaggaaaatgaaatttagaatatatttttgatctttagaaaagttatgacctagactaggggctggcaatccttttctgcaaaaggccaatagtaaatattttaggctttgtgggccaagaggcaaaattgaggatattattacatactttttttaagacaaaatatacatttattttaaatgataaagcataatcaacaatttgttcaattattccaaggaagagataactgtttttttttaatttttattataagttctgggatacatgtgtagaacatgcaggtttgttacataggtatacacacgccatggtgctttgctgcacctatcaacccatcatctaggttttaagccccacatgcattagctatttgtcctgctgctctccctcccatcctccaccccccacaggcccttgtgtgtgttgttccactcgctgtgtccatgtgttctcattgttaaactcccacttatgagaacatgcagtgtttggtttt

SEQ ID NO: 585525 - DNA, 4001 bp, Homo sapiens
gtgaaataaactccaaccctgggtcttgctaccaatgccatgtctttagaataaaagcacaatgatagtaatttaaactactgtggttgctaatcattaagttttattctaatcactaagtaggttttttaaactttctaggtaaaataagattgcataaagaggggcagctaaactagtcatatttttgctttggaattcagagaaagtattttaaaagataatagaaatgctgccacataaacaaaattaggtacataatttatacaaaaggcacctaagtttccaggagtgtggtttttaagaaagtgaatcattttcagtttctcaagtctctgttgaatgctgtgtttccctcagtcaggattaactcttcaatgccaaagtagtattccagtattcttgcaaataccaggaaattcagatacagacttatttttcattagcaattgaatatgtaaattaaagaggagagggcataccaccttaattatccaagttaattgtttatctaaatagcttaagtcagtcctccattcccaccaagggaattaaaccacagctccatgaaaaggtacctaattttgcatttttccccacccctatccaaacattcccttctgcttaaatggaccctgagtcaggagacttggattttcctccctggtcttccattagaaattacattccctgggcctcaatatgcacatctgaaaaatgacagagttgaactagttgatgtgcaaaatagaataatggacacttcacacccttaacatatgtcaaaagcagatttaatatcaaagatgtattttgggtacctatctgtggaaaaaaaaagtctcttagcttcaggtattaaacaagaagaatgtgaaaagtcatctgcccaaagaacatttattaatctaattggttttacttctaagaaatagtaaaattcagttaataaatttaagtaagttctcctcttacttgaaagaaataaaaattaaatatttgcctaatattaagcagacattcttacctattagattcttactctactgcataaaggaaagaacactaataagattttaagcacacacagaaagcttcaacaagatactcgctcttttgcatgtttattctatagcttttctatgaaataatattccctaagtgtcggaggtgggactaggagatgcaattttaaatgcaattttaattgttttttttaaaacatagtaattttcttatatttttccaagcctcacatgtcagtccgttttaactctgtttactctacttcccaggtacacactctctccctctcttcctctccacacccaacctttccttgcgtccttctgccagtaggtgcactccgggtgagtcttctctactcgcccctctccacgacttttccaagccactcacagctacctgtgctcttacctgtcggcgctgagggcagtgagagtgaacacggaaacccccacggaagtgagctggatgacagggatcagtttgcagcccaccttgccaaacatccactcgtcgaagaagtagcgcgaggcgtccaccgggacgcaggtgagcagcagcagcaagtccccggccgccaggttagagatgaagatgttggggacgctcctcatggcgctgttggtgatgaagatcttcaccagcatgatgttgcccagcaagcccacggtgatgatgagcaggtagagggacgggatcacacagcggatcaccaactccgtggtggtcccgtccgaggccggcaggaaatccctttcccacccctcgggaacggaaccgctctcattcgcgccggtggtcaccgagaggttggaaagagacttagagggcatgatctcctttccagcagagtccgctggagttttcacgcgctccggtgccctgaggactgaacgcccacgatttaggtttaatcgatgtccctccctctcgcccctgcaagtttactgtccgcggggcaagcctcacagcaccacgtccctaagagttcaggacctggggaggggtctgtccacacactcgggcgctccgcttctagaggggggaaatggctccggctaactctgaatttaaattaaaaaaaaaaaaaaagcaaagcggttgcgtctttgttccgtattcagtggtttgttctcgcggttatctagcggaaaacagcctttcaggaacaaggagctgtcccttggggatcagtagaagcacctgccggactcttcgcccagagaagcagaagtcatcctggcgctgtccagcgggccgcagctgaaatcccgggaactaggcggggccacctgcaacctgcttttcccacagctttgctcttgtttgtgaagttcctgttgtattgtgtggaactggaggggaggtcagtcctccatgcatgtgtgtgtgcccctatatacatccatccttacccgcctccaagcaggaggagctccaggcaagaactttggaatctctgaggattaaagggctgagttggcaagtccctaatgctgaaacacagaatttaggggaaaaaaatgagtgccaaagaatgaagctcataaatgaaatcctctcgctactcttcttctgatcatctactgttcttaccttaaatgtgaaaattatttcctattgttggcatattatttttaaatttatattttattgaattataacgtgtataacgtacacatttcttaatcgttctgcttaatctaaccatcattcagagcccacaatctagccaccatctcccaaaataaccaccatttggcttgttattgaataagtgtgcctcctattgagcatcgtataaatggaatcattcagcatacactcttgtgtctaggttctttcactcgacaccatatctgtgagatccactcatgttttttctcaggtggcatttttcattactgtatactacatcattttataaatataccacagtttgtttatccattctatattgattaacatttgggttccttacaattttagtcaacctgagtaacgtttctatgaacattcttttacatgtgttcaggtgcacatttgaataaatcccaggtgtggatttgccaggtcatagtacttgagtatgttcagctttactggaaactgacaattttttaaaataaattactaacttattttttcttttggaacctggctcgacaattttatttgttaattctatctattaaggcagagtatatgtatgcttatgattgagtaatgccactcgtagatatatattcaataaacatctgatatgctgttttaaataggttgtccctaagcacaaaacagtttcccaaatcaccaccatctgagtctaatgtaaactgatcagaaatggtggctcagttctggagttagctaaataacactcttcattagggaaaacatttgactagttctttgttattaaaggataaaattgaacaattgaataataacaatgtaactagccaaggactacctatgatgatctagccataaactgataagatgtgtatatatgcaatgtcacttataaattaagcaacttttccagatattgcccaccaagagcactgtcacatcataattgaattagacaaggtaaacatttgcattgtaatcaattttaagttttatgttttctaactcaaaagtccttattgtactcttctggaatttcactacttaaaataattcattataaaattaagattagttaaatagaatatttatgtataaatatatttgaatatataaatattctatttatatttataaaaattatacacatatatagagggagagggagcaagagaaagaggaaaagagagcaaggaaattaatattacatgtaagttgagaaatgtctctaggaattttatctccaaagttatttgttttctttttaacatccaatattactatacagaataaattactaaagcaatcttctaattatgaagtgtctaaaattcaaactg

SEQ ID NO: 585526 - DNA, 4001 bp, Homo sapiens
taaatggacagaatacaatacagaagcatttgcacaggagaaaggccacacaaaagcggaagtgatgggaggtgggggggggcaaatgagaaggtaaaggtgacacttgagcttggttttaaaagatgaaagggaatttgccaccaaatagatttgctcttacgtttaatgtattcaggatctgagtaactctttggtaaagtttttttactgaaaacttgagagtcactggcctaagcaaaagggggctgaatttctgaatttaaagccttaaggggagaaaaagaggatagaaaaaaaaaaatttagaaggctaaatttagtagggtttgatcaattcccaaagacgactatagcttttcgctttaaaccataaaacaccaaagatgctaaatgaagtggggaacaggaaggacaggttggtggcaggtaaggcaagtatgggacaaatcaagttttcagagcctgtggataagtgcctgctaccccactaaatgattcaaaacactttttattcaccaccacccactatgccctagtacaatgacaggcagtcaacaaaatgtactgaatgaacacaatgggatcaggaattcaaaagctagctatgggaatgaacaaaaataaatggtaaaataagaagtagaacgttacctccgtctttcccatcaaattcatataccaaggtagcttttgaatttgggttctacaattccttcagttatatggattcaaataaatgtaccagtatataattcaaagatgggtgtatataagcaagtaatataaaaagatccattacttacttagtctgtgaagctgtggttaacttctccaaaatagtgtctggaaggagttttcttttcttttggaatgaaaacgtttaaaattaatagaaagtcatgtacatagtatgtccggagttgcttctgaagttaccgcttttaagaatgccctacatctaggcaaagaaatgaattaggctggaaactgcccccatacctctaagctatgggaagaccgggtccacaaaactccacattctctgaaagacttgatgaaaactagaaagggtgcccacggtattctaaccctcaggtcactgttataaattgaaagcagttaagtaatgtctgcctggagccagctctctgtgtcgagtatcagacagcaaagcaaccatacactaagtctgtacagcccttacagtttacaaatcacctcatttaattctcacagcaacctcttattttcagttggtggacactaaaggagacgaactttttttttttgagacagggtctcgctctgtcgcccaggctggagcgcagtggtgtgatctcggctccaggcagcctcgacatcccgggctccgcccacctcgtccaactaaagtactgccgcgcccggcccgagcatctttccaccactgtcagaggcaatcttggtgactgtttccccactccaatatcctgccaacccaaattacatccaccataggaattctccctgagccgagttgttttaataagacacctcctccctagcctctaaccttctgttcgatgaacagctcctcgcgtcgcttcctcttctccttcaggagcgttttatccctgggaggaagggtgataagtcagcaaagggaaggacaagcgggacgagaaagggcggttctccccgccgggcagcgggctccgaacctgcgcacggtctcccgcactcgccgctcctcttctctcgcttccgcctgggcgctggcgaaagtcagctcctccggggcctcatcgtcaaactcatcgtccccttcctcgtcttcctccaggggctcggcggccgcgccgctgctgggctgcccgagcaacagcccgtgctccgcctcctcctcctccgaggccagctggccctcgtccaccatcgcctccgccgacgccggggcgcgagacgctcgcggtcggagctgcaccatggcccacgcagcgctagaccgtctgacctctgacccggaagcagctacaagcggagcgcaagcctactttcatcgccccctgcaggttcggaggtcctcaggacgggtggggcgcatgcgcgaagggaggaagggcgtggcctgtaggcagtgggcgtgtttctttccacgtggccagcgcaggccgccttggagccggatggaccccacggaaaatgctctgccggcgaaagcggctggcaatggggttgatttcaaggcagggaagagccatcgcgctgccctcctcggctgggatggcgagacagggctggcacggctcacgctgtccggtgctcagaaaaccggtaatcgcgggcccgaggcgctgctcgccgccgttttttggccctgggttccgtcgagtggatccagcttgtcagtctttgtgtagatttggctgcgttcgctccgcacttcggaggaggtggcgtttcatgggaagaaatgcgctctagcagatggccgccgtggccagtcagccctgctgccaccgacgaagacgcgggcgacagacctggactctaaagaaatctgcacagacgtgcccggcgccctcggccttcccagctccgcggccgcagcgacgccggttaggatgtcggccctgtgggaggggcgcccttcctggtgccgggccctaacccacgacctggaacagcagctggcccgtggcaaatgctgagcatatctcctgaaagaatggcttcgccggtccctagagaatgcacccgagttttgtggtatatacacatacgtactttttttccaagtatattttatttcttggcaaacatggccctttgtgatcgctgtgtttctctcctcccatccattatacaacactaagtgattcatcattctttgaacaaatcaaactgtttcacacctgccatgcatttgtaccgaccgtgctcttccctctactgccgcagccccccaggtagaagtcctttttatacttcaaaaattcccacccaggcaaatttcaagcaccttacccctaccccatcccactctgcccatctctaattgcgctggtctgaacccgcacaaatgtctgtgtagtttctgcacttcataacagcttatatgacagttgctccagccattctgtgaacccctgaggggaagggccaggtcttgctagtcattttatttctaatgtctatcatctggtagatgtttaataaatgctaagttgaataattctatcttacacatatattgtatttttaattctcttttcatgtcttctgttttagaagcaattctcaatttaaaaacgacaaaaccaaataggaacaaaaatgataaaacttgaaaacaacaacaacaaaaaaagctgctgaaccagaggttcagtatgagaggaattgcaaagaacagttttgaaatctctaggccttagtcagatagaaattacaaatcaaaaatataatcagactccctgagacactaacactaggaaaatgaataaagttaacttggagcagcccaagaacaaacttataagtgcatgatggtattttatgtgcaaaactgctttataagtactataagactattacaggtattaccagtgccctcagtgtaaactccttggcccacccatgtaaagtgtacatcgagccctcagggtccctgactggttctccagccgccccataggctatgagcatccccgttccctacacaaaggaccactgggatttattaaaggttatgccttgcaatgcagtacaaagttttatatgatagtgtcttgttgcctgtttctacaaaagccaagggtgtaacattaaatgcaattttgcaaggggctgaggtgatgtggtccaagtatgtaatcacttcagggagccatatgtgaccttcatacactgttgataatggccatgcctcccagtcaggcctgtgacacctgctggacagcaggcattccaaggcccctaagcactgagttagctggtaaaggttaaggaaaaagctg

SEQ ID NO: 585527 - DNA, 4001 bp, Homo sapiens
tcacatccttcccttcccggtgcccctcccaccactgcagtcttcccaggtgatataatggctccctccactcagaatgggagccattcagatgctcagaatgcaaaagtctggaggacccctggtatgcagagcaatgaccctcttctagctgctaggcaatggggagattaaaggggctagaacaggcatcaggatggtgcacaaagggggctcatggcacccttaatttggaaatattttaacattttagcaatcagtacaaccatgctggtgaatgttggttgtgggtaagtggattgccaagaattggcatgttgattctcatggcttctgtcttcaaagggcttgcagtttctcaggctccagttctatcttccccacccacagcctagcccattgctcctgcctgtcccctcctggctgcccccagcagcgcttacctgtccatccaggcatgcaggagcactgtgggcggcccgaggcctggatgtggcagcggccccttttggaacagaaggagggaggacaagggtcttcaagcttggcctggcatctctcaccagtgaagccagggaggcaagtgcacaagaagctgggtgtcaatggagagggagagctggggagccctaggggagcgggaagcagggcttggcagctgcctccattttggcagagctgggcgttctggcaggggtcaggaaactggcacgtctcacccaggaagccaggggcacacctgggcaggggaggagaggaaaactcacatcactggtccctcttcctattcttgcccactccctcctctgccttcatttgtttcccttcatctccttcacttcctctctttcttctttggtctcacttcctcacctctccccccctgctctccctccccctttctctccagtctcccactcctgcaaggcacactcactggcaggtcccttgtcccagagacaggctcaggcaggtgcctccattggcacagggttctgggaaactcccacacagcagccctgagggtggagaggcaggcgcaatggaagccctgggtgctgtgcctccacctttcctcttctaggtgctcctgagagacctgcccacagcagctcccacaggtactctaaaccacctcttcttcacatctgtccccactctccacatggtacccagccccagccccagtgccctccgtcccagttactaatccctacccccctttcctgtttattctctggcctcccaagtccagcctcggactccatctctcggaagcaagacaacaggggtcagaagaggggcggaggtggctcccgggaggtgaatggctgagacttcgaagagatttcctcccggaaaggccgagcattgagccatccggggggtggggacagctggactaagaaagggcttagtaggcctgacctttcatgtccccatctcctgcttccctctcatctcctccccaagcaggtggtcagtgtgttccctcttcccctcttccctatggctgcaagagtcctccagtgccagtgctgacgaggttcttcctggaggtgggcaccctctcacccatcccccagcagtcaccacccctggcaccaggcccgaagcagctccatgggcagagccgtctttccctggaggccgtctctatttgggcagtgagaatctcctccatccagcatccctcacacggcctggggcttggccctcttcccccaccccactgatcatcctcctaagggagctgggtcccctcacctcacccacgccatgcctcacctctgggtctgaccactgagacacatagcagcagcagcagcagcagcagcagcagcagtgaagggggctgcattccacagccccttctccaagccccggtccctgtccctcttcaggcagggaccctcagagctctcactggggcaggagccacctcctctgctcccactgcccctcttcttcctcctcggcctgctgcaagcctcacgtctgagctgtttcctgagtcacacaatgtcctggacaccctagtaatggggggcggaggaagagtggaggaacactaggggggatgaaggaggggccttctgtccctgacaacccctggggaagtagggggaagtaggacggtgtgcctggagggcaggtgataggaggggagaaggaatctcggaaccccctgggcagtcccagccctgctgtttgttgatctggtctctcctttctagggatgagaattgcaaggtggctgccctgtgccccaggaggggcaggacctggaaacaggtattgggtggttacagagttctgtattcctcctcccaggagaggatgcttaatttgccaggttattacagatgcttctcagagaacctgcaacttgtcataatttgaaaccactcaccttggctaaaggaacccaggggcttctgggccttatcttggctcttgccaggacttatttttctccttctggcaaatgggcaagatgctggccggttttggggaaatcttggtcttcctgttgtaggggaatgttaagactgtcattatcagtgataaatgaacatagtctaccctaaattttgcagtctgaattgtctgtaacaaacactgaatttgggtagttttcacttcctccatctctgcctccctccgctgtcaaggtccttgggatgcagggaatgccagtcagaatgcaaaattggagtcaataaaatcacaaaagagaattctttgcctcagaatgctcatcctaccttcttgagtcaacccaggacaactttggggtcaaccacacactgagttcctttagtagcacagggaactgagagtccagggtggcagaaggtgtcagtggcagctgtgctctccctggtgttgaggcactcatggctgctgctggtgcacctgagagccttcccctaccggggaatatacttcaccagcaccactttcttcctttttttagctttttattttaaaatacttttaatctcatgggaaaggggcaaaaatactaaaaagaattccaggatacccttcactcagattcatccactaatatcatttgaccacatttactttatcattatttctctataaatacacatttgtatttttttctgaaccatttgagagtaagttgcatacaagataccctttacccttaaatccatcagtgcaaattttctaagaacaaaacattcttttacataatatagtacaattatccaaatcaggaaacttagaccgatgtaatactatgatctaattgacagtccaaattcaggtcctgccaattgccccataatgtccttcatgacaattttttcctttggtctaggatctcatttggcatcctgcattgcatttagctgtcgagtctttttagtttcctttaatatgagtacagtaccttaaatgtactttgcctttcattatattgacttttttttttttttttttgagacagtccaggctggattgcagtggcacgaccttggctcactgcaacctccaccgcctgggttcaagcaattctcgtgcctcagcctcctgagtagctgggattacaggcgcccaccaccacgcctggctgactttttgtattttagtagagacagggtttcaccatggtgcccaggctggtctcaaactcctgagcttaggcaatccacccatcttggcctcccaaagtgctgggattacaggcgtgagccaccgcacctggccgatactggcatttttaagcatacaggacagttgttttgtagactgttcctaaatttgagtatgtctggtgtttatgcatttttgggcacgagtaccagtgtatcacattaggaagcccgtgagccagcatcatttataatggtcacccagtattctactagttcatttaaaccaatttcctattatagcatgtttaggtgggtctcaatttgctttctgtttttttagagacagggtcttgctctgtcactcaggct

SEQ ID NO: 585528 - DNA, 4001 bp, Homo sapiens
atacctcggagatattgtgggtttgatttcagaccactgcaataaagcaaatattgcaataaagcaagtcacacaaaagttttgatttcccagtgcatataaaagttatatttataccatcctgtagtctattaagtgtgcaatagcattatgtctaaaaaaagtacatgctttaattaaaaaacactttattgctaaaaaagacacagagacacaaagtgagcacatggtattggaaaaaatggcgctagtatacttgctccacacagggttgccagaagtcttcaatttgtaaaaaccatagtatctgagaagaacaataaggggaagtgcaataaaatgagggatgcctgcataatacagtattttacctggtaaaagtttttgaaggtctcattctctgcatgctattttgtttgacaggaagcacaggtaagttcccaacacagtgaaatcaatataattgagaaatatcccattatgtttggtagaggttaaaatctacataataaaatctatgtactgtgattatgcttttgtgggtgagaacccagagagatgtttcctggtggcgtttgtctcaaaagcttatctgtcttctttcagtcagaaacaatgatggttccagctattataatgcttccatcttcatggggcaaatatatcaggaaactgtttagcaatgagttgagtgtcatgtaggaaatcaatggcaacagccaaagccaaatcagatagatgtactgattaccgtttttctgtcttagcctttctgttatctctaacaaagaaacccaagtttaaacagaattactgagaatttcataataaagtacattttttttcaatggcacttatatgaggaagtcgtaacagttgagattatttcagatattttagtacttacaatacttgttcctcttatgaatgaaataaggtttcgactgacaggtattagaattagcatgcagttaaaattcaggcacagtgcggatgctcgtgcccaagccagtgttgactgtccacatgtaaagacataaaaaagagattcagggaaaacaaggatccagggaaaataaaatgcattttgttttctgaaaaaataatgtttaatcataaactgtacttacacccaaaataactcgtgtgtaatggaaagactcctcctcttcataccagtagaacgtgtcaataaacagataaaaatttattcccagccatgagagctagagtagaaaggaaagagaaccaatgattactaccttcaagctttttctctattcaaaatcacttggggttcttcttttaaagtggaatgaagagcttctcaatattaatcagaattactccacatatttatttctcatagattagtttttaataggattatgatggtaatacattattacctttattaaaaagattttaaacacatatgagtcaactttaagtgatttaatgaaactacaaaaccttcttaatcaacgttgcttgacaatgatgtcaagaaggaagaaatctttaaaaacaactccgagagttctctagaaaagttccaatttcatagtctaattcaaagacttcatttgatttagagaaacactcatacattatgcaaaaacaaactacttgactttaaaaataattaaaaatgagctcaatcggaaaacaactttgcatgattctataaggggaaattaaatacatctactgaatgttttctaacaagttttagtcttttaactagagtaatacttcaagctatttagcgttcctatacaagttttcctaaaaatcaaagactattcaatctatatatttaaagttgaataacaaaaatgatacttactactaatatggtggagagaccctcattcaaaatccagcaccccatcatgatacttgttgctcttcggctgtcaggaaatttcttctccctcacctgtgtctggatgttgggtcgttagtaagggcttccctagtaaattattttgtctttgtgtcataggaagcacctgcagggagcagctctcgaggaatttctaattaaggacttcttgccaaaggcacatcaccacactgacatgcctcatgacctgggtaaatacaaggcaagtctctgtctaatgattcctttcgtcagagattttataagaaaagaaagctggttttattaaattgtcctcatgtactttatacccgttcattttctacatgattgcagtcaagatgatagtaagtctttatgtaaatctgagaaataacctaagtgctgaaggctgcatatagcaaagctctttctctatttgttattttttccactttttttttttttttttgagacagaatcttgctgttttacccaggctggagtgaagtggtacgatctgggctcactgcaacctctgccccctgggtttaacggattcttctgcctcagcctcctgggtagttgggattacaggtgtgcaccatcacgcccggctaatttttgcatttttagtagtgatggggttttgccatgttggccaggctggtctggaactcctgacctcaggtgatccacctgccttgacctcccaaagtgctgggattacaggcgtgagccaccgcaaccagccatattttttccacttctttaattccttttcccctctttcaaaaaagctctctatagaagacaaagagtgtgggctaaatgaacatgaattaaaccgtctttcagaagatggtggaaagagattctaaaaaacataagatagaaaactctcatataaatctaaaagtgtgactataaaaaatgaacttttttgtgggactgatgtaatacgtgtcattaatcacacttggtgcacccatgaggcaagtgcaaatatcctttcatactccagtcaccccaggagtggctgcacgggaagcctcgtctatctctgattttgtgtaagtcatagttgttcaatatagtgaccataattctactctgctaggcaaaattgtcctaactgaagcaattttctggctggttttggcccaaatatttcctttaaattttttagacaagatgaaaataggaggagaatcaattttggaaaatcaaatctctcctgttaaaaacctggtaagagtaagaattgtgaatattcatttatctttatttacccaggtactattaggttaaggacttttcaagtattgtcagttaaatcatacatggattctgtcaggtcgatattatgagccccgttacagaaatgtggaaacaagcttaaatgaaataacttgcagtagataggtggttgggatttgaattcagttctctttgactgtaacatcttcatttctaaccattaccttatactgtctcttttatgaaatattaatatatggacctgtgcaccaaagcatactgaatatacagatataaattgcagtgctgtaaataggacatttaacttatgggaatttaattacaaatacatgttgctatgtgtgattaagtacactatttctacataatgccaatgaattacagaaaaatggatgttattctattgtattaataatgttttttattttctgcattttggggtgcattgacatctgaggatcttgcagtcttggggagaaactgctcaagttagggttagctcattcctagtgatagaaaacaactggtttgggagcatgtctttgatatgcaaaccaaacacagtccaaacccctaaccctctctttcattaaactctcatacatagaatcaacctttctcctgcctttgatcacctcagagccaggtactggacgagagaccaaccacacctgtagccgagggcctgcagaatctattcaaactatccaatcttaaacctcctcccctgattatacaaacttgcccctttcttcccgtgaaagccacaaagaaggctctgccccgtgttctccccttgatccttctgcctcctcattcatcctggttaagtattttgacaaacaggtgagtt

SEQ ID NO: 585529 - DNA, 4001 bp, Homo sapiens
ctacaggaaaaaagagccatgtggttattaaactgtatataccaggtcaagtgggctctgatatttttgacgtgtacattatttaattttaagaagttattttataatgttttcactttttttcctgtgcctctttccatgtggacagtccccgtgctgggcattctaacagacaacatctcacagtgtattcagtgtgtattcatgcggcagctaaaccattgcctgcatacccttttgtgcccattttcctatttctgggaccttaggttatttccatttttttcccaaaactataaacagcacagctagaagtatatattatttaatacttgttccttttcatgtatttctttggctgtgatcttcggagattaaaggttaaactgatttattttttcagagattaaaggttaaagaagctgatttttggccgggcgcagtggttcattaatcccagcactctgggaggccgaggcaggcggatcacctgaggtcaggagtttgagaccagcctgactaatatggtgaaactccatttctactaaaaataccaaaaattagctgggtgtagtggcacgcacctgtaatcccagctactcgggagactgaggcaggagaatagcttgaacccgggaggcagaggttgcagtgagctgagattgtgccattgcactccagcttgggcaataagagtgaaactccatctcaaaaaaaaaaaaaaaagaaaaagaaaggaagaagaatgagttcaagaccagcctggccaatatggtgaaactcccacctgtactaaaaatacaaaaattagccgggcatggtggcaggcgcctgtaatcccagctactcaaggggctgaggggggagaatcgcttgaacctggaaggcagaggttgcagtgagctgagattgccccactgcactccagcctgggcaacagagtgagactcttctaaaaaaaaaagaaaaaagaaaaagagggccgggagcagtggctcacgcctgcaatcccagcactttgggaggcccaggcgggcggatcacgaggtcaggagtttgagaccagcctgaccaacatgaaacccgtctctactaaacatacaaaaaattagccaggcgtggtggcacgcccctataatcccaggtactcgggaggctgaggcaggagaattgcttgaacccgggaggcggaggttgcagtgagccgaaatcgtgccactgcactccagcctgggcgacagagtgagactccgtctcggggaaaaaaaaaaaagctgatttttttttttcccagagagattataggttagagaagctgatttttcattttttccacagtgccacaatgtccttgacaaaggcagcgcaaaccagtggttcagccgcgccttcagggcagcgctgggcagcgcacgggcctaaaccccggtaccccctttacagactgaccttgggcccgctgattcctacttgtaatatgactatgataccagcacccgctccatagggttgagggcagattccaccagacgattcgacaccgggaccctgcgtgtgggcgcgttccgtgagagccaagcacgatcctatgtacagaatggtccctggcccgggcgcgacgacccacagggccatatggccggccagctgaaatccctgagagcgttctggccgtccagtccgggaactgtccttcccaagtcccccggtccccgacaggggatcactcaccttccgaccagcgcactccccagtaggagccgcaggactgggacccgcgtctccccaaggaccgctctaggagttgcgccaggttccggccgcactggaccgcgcactcgctgacgcctggagggcgggagcgctgcgactgcgcccccggggaccacggaccggtgccaacctaagcagcccggaacctgccccgcgccgcgggactgcaggcctctttacgcagcgcgcctaccacgccgaggccccgcccactcacccgccccgcccgtgagccccgcccacaccccgccccgcccccgagccccgcccactccccgccccggcggtgcggtgcctcgctccgcgcccgtccgcgcccaggccccgcctccacagcggcgtcccgccccacccacacctcgcctcggcccctaagctccgcccactccccgcccctgaggtccatctggggcctcgcccggcgatctgggactggggaggaccctgctgacttccaggcaggtggaaactggattgatagaaatccagcgcggggaggctgtgctgagaggagggacgcccctgccctgcgcctcccgctccccatctctggctggtatcccggttacagaatgagggtccgtggtgcaacagaaagaatgagccactgatacactcatcagcttgctcggatctcccggggagttacgctggtgagagaaaccagtcccaaaggtcactcaccgacggcgccgctggtgtactggtattatgcaagatgccctcgcaaaggtcacgcacggatggttcatttatccaaagaccaaaggagagaaatgcaggactcattagcagtgcccaggagataggggggcgggtgggtgtggctataaaaacgcaacccggggggtgcctgtgaaggaaatctgcgtcccgcggaacgcaacacgctgttgggatactggattgtcctttgtgagatgccactatcgggggaaaccggatggcttcacagaaaaagttcgtttaaaggaaaatggtttaaggccaaggaaatacctagaaaacggaaagtcttgaaaccagagccggtggggagttatggggggcggtgctggtgaacagtttgggccgactttttccagcgcttgctggcttctgccacctcatttggcagtcacctgccactgtgacctccccaagtcccttctccaaactcaattccttgatttctggtgtcccgggatggccccactccaacaatagagcagaaggaaggaaggtttcccctgtgtttagaacgttcctaacgaaaataactgcaactcttgattgtacctcctgagggtcgttgggactttccctctcagacatttattggttcattcattcgttcattttgctgtaactcacagtggccctccccatcctaaggtgcactgctgggattggtctatgtgctgatgatgttctccttgtcttcagaggtgagaatgtgccctccctccgagatgccctcttgcccctgagctccccagcagggaataggctgccttgtcttgtgagtccagatcctgggaacaactttcatttaggaatggaacagcaggtcctgggagcattggcgcctgcgcgcccatcatgcgcgtgtgtgatgcaacatcaccaccttgtggcagcgaggagctatcacaacgtggactgagcaagttgctccctgcttggggttgggagctggactggcctagttccctgggtcttttgtaacctgaatggtggtagattccaggacagttcagtaggagcccatcctcaaaaggaaaataacagaacttcctgctaatctggtattggggctgagcaattactgcacactaatgagattgaccataattgcatcctgagtttgaggaggaggtcatgctactaaaatgagataaaatcagctccaacgacaaacatcatctctgggggtttccagattctcacttttcatttaatccccagccttagtggaaagcaagagtcggagtcggcattctgggcagggaggcaggtgaggcaggtacacatctcctcttctccccaacgccccatgtttctatttctgaataaaatgaaccatcatggtgctaaggtaaagctaaactagctgagccacctcctgaagaggtcattgcttttgtttttatttaatgagatttctttcccttctgctaccagcatccctattcctttggaaaactgcttcttcataataacataaaggttttggattttttgttttg

SEQ ID NO: 585530 - DNA, 4001 bp, Homo sapiens
gtgggtcccagactcgtctcaggtggagggggtgggggaaggagagcgcgggggaccgtgcttgggggtgagggggtgttcggtaacgaccaggctcggccgggtaattacaaccccgcggcagcacctgcctatagagccaccagtgacccgtcaaaaagagtagcatgggaattcggacggcgacaaaggcgggcaggggaggcgcgcggcgcggcggccaccggctcggcgcccccctcccacagggcgggaggggagattgtgctgtgggagggaggggctggagagggccaggcaagggcacagcgggtcttgtcctccactccttcgggcctgtcactgcgcccaagggagttcctggtcgctcaggaaccgggtctggagctccgctgcactgcactcactctggaagcggtaaacttggtttccatatcttacaaccatcctctgcttaacacgcgccctctgaccgctccagggtccacgtttggggcccagcagtactgtcaccccagctgtcctcttccctgtggcactgttgaagatgccaagatgagtgagtgggaggagcagtggtggggtctctttttccccacttcccatccggacaggaggcccatgacaacatctctggagaacccgatgagggtggagggaagaccagtgcagggtgggggcccctcctcggattcccccgcccgagcttccggactgttgccctctaggccaccaccagtgcgagtcctgcctctgagcagacctctgagccgcggctcccggggcagattagaaacaggcaaccgggctggggcggggcccaggagggagggacgcgaaaattccggggcatagcgggcctgtgcctcagactccgccacccagccacgttaaggtgacttggggtcacgagacaagctggttgaccccgttgcaaagctcctctcatttagcaagccgagcgagctccgacgtgaggcgagccggagtttcctgaagctggaaaaccgttcttaacttccctcgccagggggtcccctcggggctttttgtgtgtcataattgcctaaagatatatggcagcttcgattactgtaattaccatcagaggctgttgaaagaagttagtctgggctgcaggggtgactggccagggtctcgttaccacccaggcggggctccgggtgacatcgctctgctctccagccgcgagaagccgggcaaggcgggggctgcagctctgtctgctcgacccagtcctgacccggcccgctgcgcgccgacctcctagctgccccgggcccgagggacgcaagtctcgggttggctgccgccaccggtctggaaagggcctaaatgcagcggcgccaccggcgggggccgctgtcctgcgggcctgagaaagctcagcagccgcgtcccgacctgagccggggctggaggcttccaaggcctcactcaggctcttggcaagttagaacggccaaagtttccgcaaggagcccgctgtggtttttcccccaaagtccggagggttggcctgcctcctagtccacagcgggggcgcagccgcaggcgggcagagctccccgctcacccctccctcgcctctgaggcctcacctttcaagggccccaggggctccacaccccgaaaaggacgaaagagcccggggctccttacttccaggggtgtaggcgagggcctgtcccggggcgagcgagctaggaggcctgccgagacccacgggcttcagtttttgcaacggaggctcagaatgcaacagaaacggcctcctgagcctcctgggaaggacactcacgcccgggaatgcgggcaacaaaaatcgaggtcgctttacctcctggagattccaacagcgagggccagggtaggcccgagcctaaagggaaacccagtcctgggccagggtccgctctgcattccggccgcggtgagggctccttctctgctccctctgccccagctcgaaacatttctccttttctttttgttcacgttcattttgctctaattttttaaaggtcagcacccaaagcaaaacaaaatgaaaacacaacctccttcttggaggggggtaggagggcgggaattgcatcccacttaagtgagacttcattaccagtcctcagaagtatctccgattctcccaactttcaaagactcaggacaatgagggcgagtgaaagggggagggggagggaaggaacgcacagagcgccaaaaatgctatctgcgaaaacaacacaagcagcaaggcaacttcgggatatggggactgcggcggcaacggtagtccccagcctcagaccctggagcccgcagccgtgggccactggatggcgggaactgaaatgcccccgggagatctgagcaccgtgaccgcgcctgctcaacgctggctcgggcctgcacattcttgggttccgcaggcagggtgcaagcaaatgccctcgcacacacacttagccctgcgctcgtgagtctcggggtggtgagaggtcagctgcggcctggcgttcggagagccggcagctaaggaagttcgaggaaggagagaagcgcacggagggagcaggccgcgcactcctgcctctgctgggctccggctcgaaaagtccttgggattagggatttggtcctctctttgctagagtggttcgccatactttaaattccccagttatgacctacgcggatttaggattaaggaaaatgtgacttttaaattgtttctgcttcccagtttgcaggattatttgaaatagctagaaacggggtgcaaagcattccattcaaaatccgctttgcacagagttgcttttgcgcgctggagctcggagttttgagcgagtgtgttattgtgctaccgcctggagctgcggcccagttcccgcccccatggcccccccatccagcacctggcggctaaatggagacaactcatccgactggtgggctgcgcgggtcgtaaccttctcaccgcaccagacaggggggatcaagcaatccagaggcaacgaaacggctctcccctctccacgaaatgctccaactcacggtctacaggtctgggccgaacgcacacgcccgctggaatccctctcaggggctcagattcgcagcgctccaggcaggacctcccccagcctccccgctcgctcgccccaggctgcgcgcctaggccccacggcggcccgagaggtacccacttgttgatccggctggcttgctcatgctggctgtcccggggcggagcggttggtgggcgctgcccgagtcccggccggcagcgcccgcctcgccgccgggcgccgccgctctccagctgccctccagcctgcaaggctcctgggcgggacaggtgggtgtcagtcgcgcgctgcgctgctccctgggcgctcagaattcgtccaacagtggaaatttaagcatccttaagtttcttcccggctcttgcaaaaccgcagctgctgggaatgctgcttgatatggacacacacatggacagacagatggagagatggacaggaagactgaggaagaaggaagaacagcaagagagggatgttgaaagacagagatggagacacgaaaatggccttcctacggagcgaaatccctctttttccccattcctgtcactcagtcttcgatctctccctctacataggcatgcagagtgtgggcaatctctgccgaccgctggtctcccaaggaaagaaggaaaacactaccgcagtctcagaggcagacgggctccgcgctgccggaacccaagcgcagagtgggaaaactagattgctgggaaatcttccgagggaagaggcggccaggtccgggtttccggggagagccgcgcacgcagcggcgaagggtccccgaagttcattaccccgtgactttgtgcctgtcgctgcgggctgggtcccctgtaatatctccagaagcgctctgacaggcagccgcggggaggggaa

SEQ ID NO: 585531 - DNA, 4001 bp, Homo sapiens
ttctctgctccctctgccccagctcgaaacatttctccttttctttttgttcacgttcattttgctctaattttttaaaggtcagcacccaaagcaaaacaaaatgaaaacacaacctccttcttggaggggggtaggagggcgggaattgcatcccacttaagtgagacttcattaccagtcctcagaagtatctccgattctcccaactttcaaagactcaggacaatgagggcgagtgaaagggggagggggagggaaggaacgcacagagcgccaaaaatgctatctgcgaaaacaacacaagcagcaaggcaacttcgggatatggggactgcggcggcaacggtagtccccagcctcagaccctggagcccgcagccgtgggccactggatggcgggaactgaaatgcccccgggagatctgagcaccgtgaccgcgcctgctcaacgctggctcgggcctgcacattcttgggttccgcaggcagggtgcaagcaaatgccctcgcacacacacttagccctgcgctcgtgagtctcggggtggtgagaggtcagctgcggcctggcgttcggagagccggcagctaaggaagttcgaggaaggagagaagcgcacggagggagcaggccgcgcactcctgcctctgctgggctccggctcgaaaagtccttgggattagggatttggtcctctctttgctagagtggttcgccatactttaaattccccagttatgacctacgcggatttaggattaaggaaaatgtgacttttaaattgtttctgcttcccagtttgcaggattatttgaaatagctagaaacggggtgcaaagcattccattcaaaatccgctttgcacagagttgcttttgcgcgctggagctcggagttttgagcgagtgtgttattgtgctaccgcctggagctgcggcccagttcccgcccccatggcccccccatccagcacctggcggctaaatggagacaactcatccgactggtgggctgcgcgggtcgtaaccttctcaccgcaccagacaggggggatcaagcaatccagaggcaacgaaacggctctcccctctccacgaaatgctccaactcacggtctacaggtctgggccgaacgcacacgcccgctggaatccctctcaggggctcagattcgcagcgctccaggcaggacctcccccagcctccccgctcgctcgccccaggctgcgcgcctaggccccacggcggcccgagaggtacccacttgttgatccggctggcttgctcatgctggctgtcccggggcggagcggttggtgggcgctgcccgagtcccggccggcagcgcccgcctcgccgccgggcgccgccgctctccagctgccctccagcctgcaaggctcctgggcgggacaggtgggtgtcagtcgcgcgctgcgctgctccctgggcgctcagaattcgtccaacagtggaaatttaagcatccttaagtttcttcccggctcttgcaaaaccgcagctgctgggaatgctgcttgatatggacacacacatggacagacagatggagagatggacaggaagactgaggaagaaggaagaacagcaagagagggatgttgaaagacagagatggagacacgaaaatggccttcctacggagcgaaatccctctttttccccattcctgtcactcagtcttcgatctctccctctacataggcatgcagagtgtgggcaatctctgccgaccgctggtctcccaaggaaagaaggaaaacactaccgcagtctcagaggcagacgggctccgcgctgccggaacccaagcgcagagtgggaaaactagattgctgggaaatcttccgagggaagaggcggccaggtccgggtttccggggagagccgcgcacgcagcggcgaagggtccccgaagttcattaccccgtgactttgtgcctgtcgctgcgggctgggtcccctgtaatatctccagaagcgctctgacaggcagccgcggggaggggaatagggcgtccctggcccacttagcttttcccccaactcctggcggggtctgacgtcagccatgtgcggggaggggatgggaagagggagggggttaaatgctaatgatattaatgaacctccaagcggctcccaaagaaaatgcaggcgctgtcggagcttacgagttagaaagtgtgaatatgggagtgtggctctgtgcgtgcgtgatggtgaggacggtgcggctcgtaataaaaatgaattcgtatatttcacggcaagaaggaaggggaggggtgacggggctttctcaaaacgcttttccccctctctccagagtgccagatagattcgcggaagaaattgggtggctgtgtgctggcgtgtgattgtgcgcgccggacatggccatgtgagttggttcattcttggtccggtgccccttctgttgggtaaaacttggatctggcccgaggtgagtaatttactcattttgcacatatctacggaaagtcagggctgaggatggggtcttctggaggttccgcgttccttcggccttcgcgcagtgggtttgggcaccagccgaggggaggatgccgccagcttccccaagcagagctggcccatccgacgctgagcgaatctcttgtcgcctccattatctgcaccggggcggctggagggcagagcgttccctcccgccgctcgtcctcggcgggcgttgcgggctcccgctctccgggcggaggaatagtgaagagaggccctcatcccctaccccctccccattccgcttgccttcccgcgattcctgagctctctcgcgccttgctctgtgcgcggcgctgggagagcgcatgccgagggagcgatgatccccgatctctaagagattaattctatttaagctctctcggcagcttgaacttgtcgaacaagagcttgccagtccctcctcagggcgtggacccggccagaggtcagaggttacacctcccgccctccgctcgacgttcgcggggaggggagctgtggccggcgctctgcaattccgccagcccaccccccggtccctctttctccagactcggtgtcatcccgggctttcaatcagagttcgcctgtgcgtgcaagtgaatgctggagtcccccgagccctgggagggcgcagcaggtcctccgcctgggcgtcccagggggagcgggctgtgcgctccagtgggctccgacagcacgtgattgcaactttctgcccagccttggctcggcctcgagctcggggtctcgcacaccacacacaccagagcctgtgtcctccttagtggggcgccgcgaccaaggctggggtcccggggaaagagcaagatggggggatctttatctctcagtttattccctcctcctcggtttttcgaattgggacgagattgggggattgtgggacgaggccataagcgcgtaggggtttattaggtgacaggaggagaaatcagcgttttttgacagccaacttgtacagccgcttgtggagctagcccgaccggcggcgtagcgctttctcgaactcggcgcccagagaggggaggaatttcgggcaggatttgagaaacacaataagatgccaggctccgtttggaatcctcaggttctggttcacgccagaaatccacttgcttcagccacctaccaccaccacccccataacgcggacgcgattatggggttctttggttcaggacaaagaacttcaagggtggaactaatttatctggggcgaagatgagggcagtgtggggggtgatgactagacccaggcctgtctgcaggggaagcatttaggggtctgtttcgagaaggagaactactaattgctttgcctgtgcgggggctggacgatggctttcctgggctccaaaccacctcttcccctactctcgaacgctcctgccaggctggctcatttgtaggcaccaaaacttct

SEQ ID NO: 585532 - DNA, 4001 bp, Homo sapiens
gcccttacgagggaaagtcaaagggaagggccacgagggagaagcagggagacagtagaagagcatgggaggagggaaacccttgaaagggaacgaggagttctaaaatgggtcagaggtcataggtagggatctcggagcctcacctgtttgaggcccatgagctcagcatagtcaaagacgagaaggatgctaaagatgaggagccaggagatgacatggagcacaaagcagaggagcggcacccaggtggcccatggctcagcccgagcctcccacaacacagggcctttgggtatgggctcccagtaccgcatcaccagctgtggaaggataaggggctgggtatcccagtggcctagtctgcccgaccttgggagacccagacccagatctgcccccaccacaggctagcctgcaactctcccccacctctctcctaagcatcaccaccaaatattcaccatgtggagggtgcgtgctgggtgaggtcccaaagatgtaaggatggcctgtctctaccctgagaacttatagaatagatggggtgacctgatagctacgcaaagtagtagcctgtgccaaccacccagtgaaaagacagacaaggccttctcttcagacctagggaagtggttttgaagaaagggtaggactgaagagaagggatctcaagcaggacataaacaaagttgcagaggtgagaagcatatcttgtgcttagggaaggacaagtacacccttcttgataaaaagtaggatatgtgctgtggaggaatggaagctgagattagttcctcaattctcctcctgaacccatattttgcccctccaatccacggcacccctcccacacttggtctcccttggggactcaactgccaggatttcatacctgcaaggccagggcctcatacctgcaaggccagggcagtgcaggccacatacagtgacctctgaaggaccccaaagtaccgggatgtccatgccttcactctttcagctgccatgaggctgtgctgcccaacaaatagaagcaggagccccagatcccatgccaggggggcaaggatgctgcggtcctgcagggcagccagccatccctggcgggcatctacaggaagttgagggaaaaagagacaaaagatcgaaacagtggcagaatgtttcccccaccctcatctcctcttggatccccaggccatgtcccttactgctttcaagagccttaatgcttcctctctaggctgtgcccatctcacttttccatccctagtttctgccctcttccctaggcctcctgcaaacctggggaagaggatttatagaacaccacatgttaggcagttgcaaaaagcatggctggagaggccacgctggattgcccctcttacttcggttctccaaatgctccttctttttaacactctcctctcaacagtcctctctacaaaacactttacttagaatactccggtcaccgcccttttcggctccctcagtcctcactctcccgcctctccaaaactctaatccttgagttcctaatttagaactcaggtctccctcccctgtagcttctcggccgctttcaaggttcgagttccctctcttggacttcccctgtcatttgtttccaagccccgccctcaatccctctcctacggctccaccttcctcctcccagttcatcctcgatccctcccgctcacccggaccaccagactccgggatccctccaagaagtggccgaagggaggtaaagcgcacgaactccactccggtgccaaaggccaggatgaaagaggcgagggcagcagggatcaggagcagtgcaggggccatggcgagaaatggaggggtggggaaaggggcggggtcgggattcccgctgccacaggccccgcccgcggccccgcccccggctgaatccagcccaggagggcggggctcctgcacgccaccgccaggcttccggcccgcctggcgcagccttccccatccagctgtggatccgtcctgggatgcgtgtcccggcctgctgtctctccgtcacagaagggaatgttagaatcccgagagagagctgttaagggtagcggctctgcagccgctcacgtgggttgaatctcagctcgtctagttttcccatctaaaatgaaaagttactgttttaccacaaaataaattaatgtatggaatacattgtacagaatacaatatacagaataaattctgtaacttactataaagttgagttgttgactggccagttgctaagaatggcaaataacttctctgtaaatactgaaaggtttgttgtaatagtgccagagattgttgattagtaaccacgagaataaacatgttaaaatatttgtgatagtaacctttgtcagaattaaagatcatgcagctaaggaccttgtcacagtagacgtacacatagtagggaccttagatatcattagactaattccatcaacttatagatagaagaaacaggtccagagagataattgcctgagttaggaagctgctaatcctgtaggctaagggaccagataattgctgagcagcctctcgcaggctttacattccttctccgtctcctgggctcagtactcccaccctcctctgaatcaatgctgttgtatgctgtaccagacatcttatgttttcccttgaattcagtctccaccctgctttctgcttcagtaagttgtcccaaatggacggtatcaatgaaagtcacagtttttattgagaaagtcctctcgccgggcgcggtggctcacgcctgtaatcccagcagtttgggaggccgaggcgggtggatcacgaggtcaggagatcgagaccacggtgaaaccccgtctctactaaaaatacaaaaaaaattagccgggcgcggtggcgggcgcttgtagtcacagctgctcaggaggctgaggcagaagaatggcgtgaacccgggaggcagagcttgcagtgagccgagatcgcgccactgcactccagcctgggcgacagagcaagactccatctcaaaaaaaaaaaaaaaaaaaaagaaaagaaaaaaaaaaaaagaaagtcctctctacacgactgctctgtcctcatctttttgagcttggaggtgatcacaacagagctgtgggtactaaggcactgcactattctttctgatttccctacaccctgcctacttctttgtaattatcactttattaaactctcccccaaattatcctaatttcactgtgctattcatttcctgctaggaccatgaatagagacacttaccacacaaagcaatgtgctacaagctatggggttcattggaagtgtaagaggccagactcggtggctcacgcctgtaatcccagcaattcgggaggctgaggtgggtggatcactttagaccagaagctggagaccagaatggccaacgtggtgaaaccccatttctactaaaaaattttaaaaattagctgggtgtggtggtatgcgcctgtaatcccagctacttgggaggctgaggcaggagaatccactgggtgatggagcaagattctgtctcaaacaaaaaaataaataaataaaatacaaggaagtgtaagaaaagatccctaatctctagatgtttaacctgaggcatttaaatagtaccactcatgaagagggagtgtagctgagtgctacatggtgctctacagacagcaggtatggtaagaaatcaaggtctctggctgggcgcagtggctcacagctgtaatcccagcacttgggaggccgaggcagttggatcatctgaggtcaggagtttgagaccagcctggccaacatggtgaaacctcgtctccacttaaaagacaaaaattagccaggtgtggtggcaggagcctgtaatcccagcttctcgggaggctgaggcaggagaatcgcttgaacccgggaggtggaggttgcgataagctgagatctcgccactggactcc

SEQ ID NO: 585533 - DNA, 4001 bp, Homo sapiens
ttgggtatgggctcccagtaccgcatcaccagctgtggaaggataaggggctgggtatcccagtggcctagtctgcccgaccttgggagacccagacccagatctgcccccaccacaggctagcctgcaactctcccccacctctctcctaagcatcaccaccaaatattcaccatgtggagggtgcgtgctgggtgaggtcccaaagatgtaaggatggcctgtctctaccctgagaacttatagaatagatggggtgacctgatagctacgcaaagtagtagcctgtgccaaccacccagtgaaaagacagacaaggccttctcttcagacctagggaagtggttttgaagaaagggtaggactgaagagaagggatctcaagcaggacataaacaaagttgcagaggtgagaagcatatcttgtgcttagggaaggacaagtacacccttcttgataaaaagtaggatatgtgctgtggaggaatggaagctgagattagttcctcaattctcctcctgaacccatattttgcccctccaatccacggcacccctcccacacttggtctcccttggggactcaactgccaggatttcatacctgcaaggccagggcctcatacctgcaaggccagggcagtgcaggccacatacagtgacctctgaaggaccccaaagtaccgggatgtccatgccttcactctttcagctgccatgaggctgtgctgcccaacaaatagaagcaggagccccagatcccatgccaggggggcaaggatgctgcggtcctgcagggcagccagccatccctggcgggcatctacaggaagttgagggaaaaagagacaaaagatcgaaacagtggcagaatgtttcccccaccctcatctcctcttggatccccaggccatgtcccttactgctttcaagagccttaatgcttcctctctaggctgtgcccatctcacttttccatccctagtttctgccctcttccctaggcctcctgcaaacctggggaagaggatttatagaacaccacatgttaggcagttgcaaaaagcatggctggagaggccacgctggattgcccctcttacttcggttctccaaatgctccttctttttaacactctcctctcaacagtcctctctacaaaacactttacttagaatactccggtcaccgcccttttcggctccctcagtcctcactctcccgcctctccaaaactctaatccttgagttcctaatttagaactcaggtctccctcccctgtagcttctcggccgctttcaaggttcgagttccctctcttggacttcccctgtcatttgtttccaagccccgccctcaatccctctcctacggctccaccttcctcctcccagttcatcctcgatccctcccgctcacccggaccaccagactccgggatccctccaagaagtggccgaagggaggtaaagcgcacgaactccactccggtgccaaaggccaggatgaaagaggcgagggcagcagggatcaggagcagtgcaggggccatggcgagaaatggaggggtggggaaaggggcggggtcgggattcccgctgccacaggccccgcccgcggccccgcccccggctgaatccagcccaggagggcggggctcctgcacgccaccgccaggcttccggcccgcctggcgcagccttccccatccagctgtggatccgtcctgggatgcgtgtcccggcctgctgtctctccgtcacagaagggaatgttagaatcccgagagagagctgttaagggtagcggctctgcagccgctcacgtgggttgaatctcagctcgtctagttttcccatctaaaatgaaaagttactgttttaccacaaaataaattaatgtatggaatacattgtacagaatacaatatacagaataaattctgtaacttactataaagttgagttgttgactggccagttgctaagaatggcaaataacttctctgtaaatactgaaaggtttgttgtaatagtgccagagattgttgattagtaaccacgagaataaacatgttaaaatatttgtgatagtaacctttgtcagaattaaagatcatgcagctaaggaccttgtcacagtagacgtacacatagtagggaccttagatatcattagactaattccatcaacttatagatagaagaaacaggtccagagagataattgcctgagttaggaagctgctaatcctgtaggctaagggaccagataattgctgagcagcctctcgcaggctttacattccttctccgtctcctgggctcagtactcccaccctcctctgaatcaatgctgttgtatgctgtaccagacatcttatgttttcccttgaattcagtctccaccctgctttctgcttcagtaagttgtcccaaatggacggtatcaatgaaagtcacagtttttattgagaaagtcctctcgccgggcgcggtggctcacgcctgtaatcccagcagtttgggaggccgaggcgggtggatcacgaggtcaggagatcgagaccacggtgaaaccccgtctctactaaaaatacaaaaaaaattagccgggcgcggtggcgggcgcttgtagtcacagctgctcaggaggctgaggcagaagaatggcgtgaacccgggaggcagagcttgcagtgagccgagatcgcgccactgcactccagcctgggcgacagagcaagactccatctcaaaaaaaaaaaaaaaaaaaaagaaaagaaaaaaaaaaaaagaaagtcctctctacacgactgctctgtcctcatctttttgagcttggaggtgatcacaacagagctgtgggtactaaggcactgcactattctttctgatttccctacaccctgcctacttctttgtaattatcactttattaaactctcccccaaattatcctaatttcactgtgctattcatttcctgctaggaccatgaatagagacacttaccacacaaagcaatgtgctacaagctatggggttcattggaagtgtaagaggccagactcggtggctcacgcctgtaatcccagcaattcgggaggctgaggtgggtggatcactttagaccagaagctggagaccagaatggccaacgtggtgaaaccccatttctactaaaaaattttaaaaattagctgggtgtggtggtatgcgcctgtaatcccagctacttgggaggctgaggcaggagaatccactgggtgatggagcaagattctgtctcaaacaaaaaaataaataaataaaatacaaggaagtgtaagaaaagatccctaatctctagatgtttaacctgaggcatttaaatagtaccactcatgaagagggagtgtagctgagtgctacatggtgctctacagacagcaggtatggtaagaaatcaaggtctctggctgggcgcagtggctcacagctgtaatcccagcacttgggaggccgaggcagttggatcatctgaggtcaggagtttgagaccagcctggccaacatggtgaaacctcgtctccacttaaaagacaaaaattagccaggtgtggtggcaggagcctgtaatcccagcttctcgggaggctgaggcaggagaatcgcttgaacccgggaggtggaggttgcgataagctgagatctcgccactggactccagcctgggtgacagagtgagactccgtctcaaaaaaaaaaaaaaaggagctgggcgcggtggctcatgcctgttatcccagcactatgggaggcctaggtgggtggatcacgaggtcaggggttagagaccagcctgaccaacatggcgaaaccccgtctctactaaaaatacaaaaattagccgggtgtggtggcacacacctgtagtcccaactacttgggaggctgaggcaggagaattgcttgaacctgggaggcggaggttgcagtaagccgagatcgcgccactg

SEQ ID NO: 585534 - DNA, 4001 bp, Homo sapiens
aaagcaccccctcccccaatactgcaaggatttgtctgcaaagaatgccacagcctgaactgataggaggtaacaattccgtttcaggagtttcttttttcccccgtgttgtccattctattaataacctgcttcactttcacttttaggccacgttaattaatgttctgacccagtgtcggagaagggggttttctagtgccctcttctatatcttttcttcattctggatggtaaaaatgtgaactttaaaaagacccctgacagcgtaactacaactcaacattccttaacataaaatggggactaaataattccttccataaccaatcccaaacaaacaaaaataacaaacacccgacatgacatattccaaacacttcttaaccctttcctatatataaaatgcagacaccaatgtgtaaagtagcaggcaaatgcatctagaaaagtatatctacgtaaatttggctgaattcatcctcttcaatggtaagcatgttaaaatatgtggtctgaagttccctatcactctcgatttgcccaccagccgggtctgcggtgcccgtgcaaacgctgcagctaggatataggggggaggaggggcgggagaatgacaaagttctaaatgcagcagtctgagccctggaatatctttgctttcagcacataaactttccagtcctggctgcctagccattttattcctgcattcacatttcgactcttcaaaatcatatcttgcagtatcgcaggggccagtacattgccccagagcgcaccaaacctggtataaacccagaaagggaaacaaaaatggatgtgtgctcaggaaaaagggggaaaaaaaccgtgtccagaaaatgtccggccgcacacatttcctggcgaacatttggaatctatagctttaggaaaaaccgatctgggacgcgctagtccccaggaactgatgcccccaccctcgggggattgccggcttctccgcaccctggggcggccgcggacccgctagtccccctccgcgcctcgggccggggcaggctgcctcccgcctccagcctccagccgggctgagcggccacttacctatttgcaccgcgaggatcagtgaaatatatctgccgttcaacttaagtcccatcctacgtttagtcaaaccatttgcgaccgcagacctttaaatagttagtttagagaacgcgggggaaagccaaaaaataggcattgccaacaagttccgggagcgacagagactttatgcactgggaaggcagagggaggagagaaagagagggagcgaggaagagacagaaagagagagagagagagaaagagagagagagagagaggctgaggggggggggagagctgggaatggttcactccattagaagggggcggaggaagtacagcctcacgcccacgagcaggcctgacgtgggggatgacacggaatgattttttttttaatatagacaccttggtagagaatcgccatttatagtcatcagaagctggaattaatcagatatctccaattaatgtgcgatctgaacgaaattttgcctcccgggggtgagcactttcctattctagcggtcacccctgcctcttcctcgttccgggggccccccagccccgccgcctccctgcgcagaacaggggctccccctcccttccccgccaggagctggggagtcctggcgcgcccactcgattgtttcaacctgctccccctcctccatcagcaccacagagaatccagcccgctctctacgatgcaggggggtttaaaggagcgggagagggaaaaacagctaagctagctcgattaattcgaaagcgctcctcggccgcccgccccctgcgcttgcctaccctctttttctccaacccagcagctgagctctgggcgcagcctggagcgcgtgagcacgcagcccggccccccgcacgagcacacacacacacacacacacacacacacacaaacgcgcgcgcgcacgcccgccagccgcgccgagcgcccccatgcccgcccgcacacaaggcacgcgagcgcgcgcacacgcccaggccccgggggtttggtttgcacacgtggggccccagaaataaacaccgaatgtcctctgaattttacccacctgcgatgccccagcgggccaaaggccgcttcaagggacacagcgacacctgttttagggggcgagtagggcaccggggaaggagcctctgataagacagttttcggatactagtgatttaccaaccaactctcagcgctttaggaaatttccaaggcaagcgctggtgtgcggacttctttctaatcttgatgcgcctcttgggcttatttgttgggctacacacacacgtacccacacgcacacacgtacatcacgtacgcacacgcacacccggacccacacacacctgcactgtcttttgatgctcaggcacagaccctgtgtaggtgtagcctaccctgcaacaaaatacttctgcagctggctttgtgctaggtgcaagctgctatcgacgacagcttgagtcaaaaccgaaaaactaacagggctatttcctttctaaacgcctttaagctctggttttcttcctttcttctgcaccaaacagaaaaaaaaaaagtctaaattgtagcgtctttaataaaatgctaaagaaggcattggccagctttaatccttaagcctgtggagagaaaaaaatgaaaacgaccccccaaattttgccaaactacactagaggacgtcaagctgtcaaactgtagaaatgcacacggattaaggagaagcgttgaatttgcttctacaggcagcttgccctctagggccaatcttgccgtccccatactcagatatttggagatgcatagacaaagggggagaaaggtgcaaaataacgggggtaggacaggctgtggagggtagggggccgaggggaagctgcgggggtcctactgcagcacttggtgacgtgaggtgtctgcaatgtgcggcccctaactcacgtcccgcgggagcctcagactcccatgcagccttcctggccctgggggcggagtcatgtctccccgcccctggttatgtcaccggcctgcgggcggggcggttgggggctcgccttccggtgtccaggggcacggtggcggccccgggtgtttcctttccccgagctcggaggctccgggaagaaccgaaaacgtgggcggacaaggggtggggcgggggctggtggcgagaggggggcgtttctcggaccctcccccgacgtcttccaatggcagggcgggaggctttccgaggggcggggcctcaggggggttgccacgcggcccggcccacggctccgcccctcgctcggggttccgcgtggggccggcccagctttcccggaccaggccaccagctgcgggcccccaacctcgctcagactcgtgcagagcccaggcttgggagtggcttaaggttttttgccctcaacgtccttgccttcctcctgcttatccacctgggatcttcacagcatcattttctgggatcctctccaacccctcccctgtaactctgagcgtggggcgctggggatgtggagtaggcagggctgagggcctcaatgaagcgggtgaacccacgcgcgtgcgcacagccgcccgcgccgcgccccgggccgatccggttcttgcccttgggacgtggctgcgcctcaccgccctaccccgggagggaacccccgctgactttttcctctcttcattttcctccccaggcgtcccaacctccctcataggcctgagtctttttaaaagtgaagaagagagaggcaaacagagttggtactctacataaatgattttctgggtagatagatgcacatgacattttattttttgaaaaattctcatcttttaaattacaggtcgttctgcagtccaggctccatgcagggttgattcttcgtagttctttaattaaagg

SEQ ID NO: 585535 - DNA, 4001 bp, Homo sapiens
ctggctcccagcatgtcgagcatgcgcacctctgtgcaagcctgagaggccgcgtagagctgggactgggtctatattgaaggatcctcctccatatcccaccccgggctgtgggatccccttgggaagcgcaggttctaacccgggggcctggtcctaggcctgggggttggagccagaaggcaagagtgagccgatgcggattcgcgctggcgctgaacgctgagcgcaggcggggaggctcggcactctccgacctcagtagcgcccccaaaaccgaagtccagccggccagagaggacacttacgtgcacacggtcttgatgttcgtcttgtcgtccaggccctgcgggtagttggccatgctgtcgcccagcttgagcaaacagtccgaaaagcccttgaagaccgcatcgcacttgcccgctgctctcacggcctgcaccagatacgctgcggggaggagggaacaccggtcagcagcgccacgaccccgccctgccgcccactgccctttcctgcgagaccctggctccgcgcggcctcatcgcatcgggcggcctctcccagcgcccagcctcggggctcgccagtgttaaaggtgaatgaaagacgtgacccaggaatgcccgacctgcagctaacgctgcgtctagtgcaaattgtcggtgtgtgagcaggtgtgggtgggtgggaggtaggtgagtccattcctttcctccagctccctcccgcatctcgctccgtatctttttctgtttccatcgccccctcttctcacctccctcatcccttttatttctctttctcctcgctccctccttcgtctcccaacacttccccagcaagccctgtcacagctctcgcaatgcgatcttccattttgaggtgacagaaggggtctcggctgcagcgtgcgggggcgagaacggggtggggagacgacagggcgtggggtcacgcagctgaacccaacgccacatcacgagaataagcctcaggcttggcgctctgtccttggtgggcgctcagcaaacactgctgaatgaatgaacgaatatagtccctggaagccaccagcagttaccgaaatggattgtttcattataaaaccgattgcctaccgtggactctgtattccgagtgagaccctcggatgcaccctctcccgccccgctggaaagagggcagcctggacgtcctgagacctggcgcggatgatgagtggtctggagaggagaaggccagaggccgggcggggtcacggatgagtctgcctgggtcacctccgcaaaggccaaatccacgaacctcgggcctctttctctcctcctcccctgtccgccactcggctccccagacacccttaacaacccacccgcccgccaaaaagcccgcctacactccggacggcagcggggagaggctgttcttctccaggtgccagccctgctgctgaaagtgagctcgccgcggcccggggctcctggccccagctcaggactccctgcagagagcaggcagggataaaagctgagcggcgggaggaggaggaggaggaggaaacacaggccgcacgaaggtccaagccccaagcccccaagcccccggcctctggacggccaaaccccgaggcgcgggactggaaggacaggtaccaggctgcgggcgcgcggctgtggccatctctttccgccctgaggccgacgaacccggctggaagctgagtgcctagcggcccaaagcagcccgggcgccgggagggcgccagagaagcacagcgttagggcggggaagaaagggtgaatctcagaatcgaaatccgcactggcgcccacgaccctgggcgccggcctggtcctcggcagctttctggcggctgcgcttgtgtgtgaatgtgtcccgggaggaccggacacctcaatcccccggcccccaacgcgggcgcctgtccgcgagcgccgggccagacgccgaagaggaaggtgaccgaacccgtagcagcttccgagagcgtacccgtttgcaaattgctgcaggaagagcgaggcgggccttgcgctttttaatccggaacgggaagcactggggaagggaccgaggttaacttcgacctccgctggggcagatacgtaaaccttctcaaacctccgagttcaccttacagcgaacattaaatacccttgcgactacaatactaacaaatcgaacactgacgtaaaatcttaagaataaacgaatctttgttctgatagagctcgttcaaaatggaaatacactccacacatcttcctctataacgcatgtcacaaatacagctttgcagagaagaaacgaaataaaataaagtccaatctccccgtccacgtctctccccaccccttgcctacacccccaaaactcagtggcgaaagaagcccctaaaatgcattgacattttttaaggggaattggggctcgccgggggcgggagcgctcttgtcacgttatcttcccaggcgctgctggagaagaccctgcacaccgcgcatgtgtgagtgtgtgctgtgtaaaataagtcgtgaacatttctgtcttttaaaactgtgactccttggactctagccttctctgggaggccgggaggctgcgcgcgggacggattttgcaggcgcacgcgtcccagcaggtcgcagcccgtgggtccctcgctgtccttcctgaaccccgcttaggcgagactctagcgggtgaccctggctccttccctgtcctctctgccgtccccttcttgtgcggtttccatccgttcattcattcgttcgacctctcattcattccgaacttcctcctgctgcgtcttctttcgtgttcaccacactcttctacctccccgcccctcccaacccccacttttcttgccaaatgtcaatgatttgggacagctcccagccgtgaattaataaagaccgaggttctgttgcaggaaagggcagacattagggaacaaatacgttcaatttcaattccacagtcaacaaatagtcatttttggaccgaggttaatgtgttcaaaacgcgtccctcaggcacgaccaccgtcttttttttccctccaaacctctcaaagtaaggttatttcctaccgggaaaacagagtcccaaatcttgtccgattaaaatttctatctcaaaaacaactctctctcctgctctctaaaaattcaaaggtttattgcaaaatgccacattcacttatttccaacatttaaggaatttgctgccattagaaatattatttacagcagctcttttcactaatgtcaaagattcaaaacaaccagatttaaagcattgtcattttttggaactaaaggaaaacaccaatatcctgcactcacacactctaaaatctttataatgtttctgcattataaaatctcaaaatcatgtcagttgcataaaaccccactgcaaagaatccattttaaggtctagagaactccaaaccttgtttccttcacatttcttatggaaaaaacatattatgcattctcctttcttgccccaaaccaattacctaaagcaccccctcccccaatactgcaaggatttgtctgcaaagaatgccacagcctgaactgataggaggtaacaattccgtttcaggagtttcttttttcccccgtgttgtccattctattaataacctgcttcactttcacttttaggccacgttaattaatgttctgacccagtgtcggagaagggggttttctagtgccctcttctatatcttttcttcattctggatggtaaaaatgtgaactttaaaaagacccctgacagcgtaactacaactcaacattccttaacataaaatggggactaaataattccttccataaccaatcccaaacaaacaaaaataacaaacacccgacatgacatattccaaacacttcttaaccctttcctatatataaaatgcagacaccaatgtgtaaagtagcaggcaaatg

SEQ ID NO: 585536 - DNA, 4001 bp, Homo sapiens
aaaacaccaatatcctgcactcacacactctaaaatctttataatgtttctgcattataaaatctcaaaatcatgtcagttgcataaaaccccactgcaaagaatccattttaaggtctagagaactccaaaccttgtttccttcacatttcttatggaaaaaacatattatgcattctcctttcttgccccaaaccaattacctaaagcaccccctcccccaatactgcaaggatttgtctgcaaagaatgccacagcctgaactgataggaggtaacaattccgtttcaggagtttcttttttcccccgtgttgtccattctattaataacctgcttcactttcacttttaggccacgttaattaatgttctgacccagtgtcggagaagggggttttctagtgccctcttctatatcttttcttcattctggatggtaaaaatgtgaactttaaaaagacccctgacagcgtaactacaactcaacattccttaacataaaatggggactaaataattccttccataaccaatcccaaacaaacaaaaataacaaacacccgacatgacatattccaaacacttcttaaccctttcctatatataaaatgcagacaccaatgtgtaaagtagcaggcaaatgcatctagaaaagtatatctacgtaaatttggctgaattcatcctcttcaatggtaagcatgttaaaatatgtggtctgaagttccctatcactctcgatttgcccaccagccgggtctgcggtgcccgtgcaaacgctgcagctaggatataggggggaggaggggcgggagaatgacaaagttctaaatgcagcagtctgagccctggaatatctttgctttcagcacataaactttccagtcctggctgcctagccattttattcctgcattcacatttcgactcttcaaaatcatatcttgcagtatcgcaggggccagtacattgccccagagcgcaccaaacctggtataaacccagaaagggaaacaaaaatggatgtgtgctcaggaaaaagggggaaaaaaaccgtgtccagaaaatgtccggccgcacacatttcctggcgaacatttggaatctatagctttaggaaaaaccgatctgggacgcgctagtccccaggaactgatgcccccaccctcgggggattgccggcttctccgcaccctggggcggccgcggacccgctagtccccctccgcgcctcgggccggggcaggctgcctcccgcctccagcctccagccgggctgagcggccacttacctatttgcaccgcgaggatcagtgaaatatatctgccgttcaacttaagtcccatcctacgtttagtcaaaccatttgcgaccgcagacctttaaatagttagtttagagaacgcgggggaaagccaaaaaataggcattgccaacaagttccgggagcgacagagactttatgcactgggaaggcagagggaggagagaaagagagggagcgaggaagagacagaaagagagagagagagagaaagagagagagagagagaggctgaggggggggggagagctgggaatggttcactccattagaagggggcggaggaagtacagcctcacgcccacgagcaggcctgacgtgggggatgacacggaatgattttttttttaatatagacaccttggtagagaatcgccatttatagtcatcagaagctggaattaatcagatatctccaattaatgtgcgatctgaacgaaattttgcctcccgggggtgagcactttcctattctagcggtcacccctgcctcttcctcgttccgggggccccccagccccgccgcctccctgcgcagaacaggggctccccctcccttccccgccaggagctggggagtcctggcgcgcccactcgattgtttcaacctgctccccctcctccatcagcaccacagagaatccagcccgctctctacgatgcaggggggtttaaaggagcgggagagggaaaaacagctaagctagctcgattaattcgaaagcgctcctcggccgcccgccccctgcgcttgcctaccctctttttctccaacccagcagctgagctctgggcgcagcctggagcgcgtgagcacgcagcccggccccccgcacgagcacacacacacacacacacacacacacacacaaacgcgcgcgcgcacgcccgccagccgcgccgagcgcccccatgcccgcccgcacacaaggcacgcgagcgcgcgcacacgcccaggccccgggggtttggtttgcacacgtggggccccagaaataaacaccgaatgtcctctgaattttacccacctgcgatgccccagcgggccaaaggccgcttcaagggacacagcgacacctgttttagggggcgagtagggcaccggggaaggagcctctgataagacagttttcggatactagtgatttaccaaccaactctcagcgctttaggaaatttccaaggcaagcgctggtgtgcggacttctttctaatcttgatgcgcctcttgggcttatttgttgggctacacacacacgtacccacacgcacacacgtacatcacgtacgcacacgcacacccggacccacacacacctgcactgtcttttgatgctcaggcacagaccctgtgtaggtgtagcctaccctgcaacaaaatacttctgcagctggctttgtgctaggtgcaagctgctatcgacgacagcttgagtcaaaaccgaaaaactaacagggctatttcctttctaaacgcctttaagctctggttttcttcctttcttctgcaccaaacagaaaaaaaaaaagtctaaattgtagcgtctttaataaaatgctaaagaaggcattggccagctttaatccttaagcctgtggagagaaaaaaatgaaaacgaccccccaaattttgccaaactacactagaggacgtcaagctgtcaaactgtagaaatgcacacggattaaggagaagcgttgaatttgcttctacaggcagcttgccctctagggccaatcttgccgtccccatactcagatatttggagatgcatagacaaagggggagaaaggtgcaaaataacgggggtaggacaggctgtggagggtagggggccgaggggaagctgcgggggtcctactgcagcacttggtgacgtgaggtgtctgcaatgtgcggcccctaactcacgtcccgcgggagcctcagactcccatgcagccttcctggccctgggggcggagtcatgtctccccgcccctggttatgtcaccggcctgcgggcggggcggttgggggctcgccttccggtgtccaggggcacggtggcggccccgggtgtttcctttccccgagctcggaggctccgggaagaaccgaaaacgtgggcggacaaggggtggggcgggggctggtggcgagaggggggcgtttctcggaccctcccccgacgtcttccaatggcagggcgggaggctttccgaggggcggggcctcaggggggttgccacgcggcccggcccacggctccgcccctcgctcggggttccgcgtggggccggcccagctttcccggaccaggccaccagctgcgggcccccaacctcgctcagactcgtgcagagcccaggcttgggagtggcttaaggttttttgccctcaacgtccttgccttcctcctgcttatccacctgggatcttcacagcatcattttctgggatcctctccaacccctcccctgtaactctgagcgtggggcgctggggatgtggagtaggcagggctgagggcctcaatgaagcgggtgaacccacgcgcgtgcgcacagccgcccgcgccgcgccccgggccgatccggttcttgcccttgggacgtggctgcgcctcaccgccctaccccgggagggaacccccgctgactttttcctctcttcattttcctccccaggcgt

SEQ ID NO: 585537 - DNA, 4001 bp, Homo sapiens
ttttcttcttcttctggtttactccttgatctttccttttaatggcgcattcttcaatcctatttaagaaaaaagtctctgcagaatgtaatccagatcaaaatctaaatttcataagtcattcatataacttataaagaatcattttaatgttcacaaaagcattgacaaagaaattcgtgtttaagaattgagatagctttctaaaaaacaaaagtctaaactgtattttagaacttttcaatgggttctcataataatttataaagtgaatgagatgacataaaagggctttgtaaattataacacactatatatgtgctattctcatttttacataaccatattccatgttgttagtaattccaaataggctggtccatttctattttacaaattctaaatttaaaaaagttccttgcttcctagatacttcagaatggatcttttttggtgcttggtcttataatgtaaaatatatgagtcctataatcactatattttctgatatgtttacatacattttacacttcgtaaggctctttggatgatttacttattaggctgagttttactcctatatccgttttcttcctatcatgatcattttgctttccagctgcctaagaaaagcaggtgcccatgcaaaatttgattaaaaagccattgccaactataaggctgttggtttcctacattactctagttatgtgaaataagataataactgggaccatattttttatgggatcattaagaattctttctaatgaacaggtccccatttgtttgcaggagaacctgaagacttgaggtgagtaagcctagctgaggcctgataaactgttttcagcatttctagggtcagcctatatggaccaaagccaaatcgtcaagacccatttactttcccccaaattttgtgagtggtgtgtgggcagatttgggggaaagaagcaaattatattagcctcctggatctggataagcaaacgaaaacaagccaatcataggtcactaaattcactacattctcctcttcttccctcccccaacacctgccctccacccccatctgtatctctttctttcctgtctctctctgcctctctgaattacatttctcttcttttttctgtcagcttctccattttcgctgaagattccccacatgcccttcaccaaaggctggcctgatgtggcgcccaaggagctctccaaggttctgaaaacatttctgttacagtgccaggaaccaatcaaacaaacattagctgttaaattccagctctgttttctttgaggcctccagactctgtctgacccccaccctaatgttcctgtctaacaacacaaagaagtaggtcctgagatcacgccaaaacactgaaacatcttcagacgtggcacaggagtggggagggccagtgggggctcaattcagcctgataaataaaccaactttgcaaactctagatacatatatttgactctttcctaatacacaacttttcttatcttatggaaaggaaactctaaagtttttagctgtacgcccctcgtgccccaccccccaaattcttacataacacaaaccacaaaccaccaaagcatggagctagctcttcctaatttgtatgttttcaccgattttaatacgcatgttttttgtggagattggtgcacatataataaacgtgaatgaaggagggagggagagagagaaagaacatttatgcatgaagaaggaggaaggaaagagagaaagggaggagagggagaactggagaaagacatttggagaatagaaagccgccacccctggactctgcgtggctttacctaccccctccgatcccctgacccgtggagcaagtgcagccagcctagctgcagatctctcgctggggtcccatcgccgtcgccaccgccgccgctccgcctcgtagagctcagcccgcgcctgattgacagctgggagtcccgcgtgcccgcgcacccgaggcccgcgcagccgccgccgccgccgccgcctccccctccaaaggggcagggttccagctttccgagagcggcgagtgggcggggccgagctgtctggcgcgccaggcttgttcctgcctgcaccgtgaggctggagcttctgttagggcagctgtcagggccatggaaggctggtcactgggccctgccgaggctccccaggatgggcaccttctctgccttagtgcttcttcaaagcttttttctgcccagaccatattttggtcgtagaaggctggttcaatatacagttaggcgtcgcattatgatggggatgtgatactctgagaaatatgtggttaggcgatttcgtcctgctaacatcatagcgtgtactttcccaaaccaaggtggttcagcctactacacacctagctatatggtagagcctattgcttctaggctacagacctgtacagcatgttaccctcctgaatactgttggcagttggaacacaatagtaagaatttgtgtgtctaaacatagaaaaggtacagtgaaaataccttatggaaccaccgtcatacatagaatctgtcgttgactccaacatcactgggcagtgcatgactgtacatatttttaaaatgagtgaagaggcagatggtcatgatgtgtgtttcttccactgccaccctattagagatgttttctgtccctgatgggacacaaggtgaggagcttctctttgctggtagagcactgcccaaatgaagaaccttctcacctctttgaatattgggtagttttaatcctcactctttcccttaccctaccgtcaggaagtccaaatgggtttgatgaaagaaagatgaagaaaataaattaaattatgacgttcaagaaaaaagcacaaatgcataaaggcaagaacacattagaaaattacccgcgaatgccttagaaaatgtgcacagttgtgggcaagttagtgtataaatacaataacctctgcttcaggagactttctgcagacctcttgtaagtggcatttaatgagaataattactaaaatagttaatatttgcatggctatactacacataataataataatacctaacatttacatagtgctgactatatgccaggcattgtgttaagtacattacatatatattaattatatgtatattatatcatttaatcctcacagcaacccaatgtggtgggcattctctgatccagattttacagaagaagctgaggtacagaaaagtgacacgcactcaacggtgatacagactcacaattacttgtcgaaggtcatatagctactaaatctgcaatctgcaagatgatctcctggaaagggttaaggatataagtgatattttgcccattatttcctcacttccacataggtttcaggaaaaagcctaaaaaacactaagaaacacctctgtcttgttaaacagtgggcagaccaaagaaaattgttgaaccaatgtttagggggccaccaaggacagggatggctttgtcttgtttcttcctcgcgtccacaactctagcccagccctcttcaacacagcttaaatatataggtgccacttatttctttctcccttcccagcctgcataaaagtacacctttcatgaattttaacatattgcttgttagcttgcagtgtgtggatccattgaacacttaaatgtggccgtgtatgtttttgcatccttgaaagtctgtaagaatcagcacatatataaaattccaggggctctgagctgctcttgtatcagagattaggctccaggaagggaaatgtctgcctcgttggtgtctgctaagtgtcctgatctctattggtaatgcatctgttcattcagaggggtagtctaattaagacttacagttggagttgcctcaccactctatgccccactttcctcatctattaaatgtttctaataatacttaattcataggctagttattagaattaaatgaaat

SEQ ID NO: 585538 - DNA, 4001 bp, Homo sapiens
ctcttcagcatttttgcctactgtgtaaggctgcctggaggcctgcgtgttgatctctgtatcctcagctctagcatggtgctcagcacactgtgggacttaaaataaaaaagatttccacaccaaacatgatccaaaactcaataggttactgttttcaagctttaaacatcacttattctccaggtttgcagtaaaaaaacctcttgtctttgagaatcttatattctgaaattttatgatcacctatggacaacactagctctaacatgacagtggtttaacaatattacctccaaatgaaggtaactaaagaggagacacacaaaactgtgaaccaggaaggattcgaaagacacagagggaaggaaaacatgtatcaaagacctaggggaagcagtggccaaagaatcaagcagtaaaaaagccttcttaattctcaatgtgactaaggaaaccagacctgtaaggtaagaaagcaggaaagtgtaacagcagaaaaaggacatttaaaaaaaaatttagcatctgggcatagaaaacacacgagaaattcgggcagccactcttttttgacctttaacgtgtacctgaactggtgggtgcaggaactggcgggtgcccataatggggcacaaccctggctgatgtctgcaccagtgatctagagttctacccataaactgtgaggtttccaaatagtttgggtggtaaccataaaagcaaacacttgtctttgccaaggtactattctaagcattatacatctcttactcatttaatccttgcaacaatcttgtgaggtaaatccaattattagctccattttacagatggggaaactgagaagcagcacaggttaagtaacttcctcgaagtcacagagctagtaacagtggagctggtgtcctaagctaggcagtctggctgaggagtcctcgctttcaccactgtactcataaccagctctttttctgtctggatgcttagatcttggactaaaaaaatctggtaacttttcaaaattagtttccttgggaattgggaaaccaaaggaatagtggagggagggcaattaatttgagtgtacaggtctggaagcatgcatactccatgtccccctccctcagggcacagtgaggacccaaacttcgcagactgttggtaggactggaatgtattcaaagtgcacggagcacgtagtcgatgcgcaataaatatgtattttcttctcttgatagaaggtaaaactagggctaagatcttaatgacttttcaactagtgttcctttcaatacactacactatatactacgcatctctcccagattgcagtttaaacactgatgggtggttgatcgtgcaaacagaaaaatgcagccaaaaaaaatgcaagtaccaaatcaagtggctgtgtccacaatcagctggtgtccagaaagacatgcagagaaagttccacgacgtgagatcttcaaggacagccctagtccccctgaccccgcccctcctcggccctagaaatcaccgattccccagcccggtcttgcgcagtttgcccctccttcgttcttccctatccctctcaacattagctaatggctgaggtaaatgtgccggtccccacggcaccggcgcggagcggaggctgcacacttccgccccttctcgccgctggaggccgcgctctgcggcaagactcggccgccgcaggccccgggcagcgtccgccgttgcccaaacctggaggaaactcaagccccagccgccatggaggttgcgcgcagtgcgccccggagcccgcgccactcaccggggcgctctcgggcaggttgtagcgacacagagtgtggtccaggtcgaatccgaccacgtcgcaggcggccagggagaagtgctgagccatggctgcgcggggagcaccagggagcgcctcggccgcgaagggtgcaaggagctggctggcgggacgctgcgggacaggaccgggccggacgcggcggggcggggctgcggctgccagggcacacggcgcggcagcctctcccgcctcccgcgccctcgagcaccgcccctcgatacgcttagcccccgcccctcgcgcggcgggcgtcctgcgccgcccggagtcaggtagtcagctcgcgtcctcctggtaccccaatgccggcgactcctgatctgttccgcaagcctaggagcccagaaggcagtaggggtccaggagcggtgccgctgctgcacagctgagacctgtaggcacgtagcctttcccgagggctaccacaaaattaaccgggacactccatcgcctcagggcgcctcggaaaccaggagatcatgaggttagacctgaccttttacccctgtgtgaggaatagtaagatcatagaaaaaattcatccgctaatatccctctgacccagttagcctacaatttggaaggtcttttcacccacgtgatctttgatagtggtttaaaccaaaaactttatattccttggtttcctaagtggttaagtggaagacagacctttcactatttcataccctggagtgcgttagaaaataaatgtatcagacatcgtgaagaaccattttgcaagatgatacttgttatggaaaccaatattggttattacttgataatcctattttgttattgtaatgaattttttatgaaagggcatcagaaacttcatagaaatatatagagcatactacaaaaaacttttgcaaaccgggtttaaggtttatagagcacaaaatgttttgagtgacatttgcttaattctctcaagaactgtataactactaccattttagatgcagagaaagttaatccattacatacaatgtatgccttagggcatttaattctcttcctgatttccggatgtgaaggactagcactttgagatctttattacatagtacctcattttaaaaagaaaatacaaatctattatgtttacactgcttcagttctcaatttaaaggaacaatgtgtctaatgggacaaatcaatagtcgtgacataatgaaaatataattgattgagaactgcatttaaccctttcaaatactaatccttctgaggctaatagaccaatcagaggattaatttagtgcaatagatagtacaattgagtaggaggacacttatacctagtagacccatttgaataaaattgataacttgttccattataacacttaaaagccccaaacaaatctctctggaataggaaaagtaaagaatcttcaagaagattaagctgttcactgatgagtccaacaatcatgttttcaatgtctgtgaaccaaaagagaaaaggctggattgttggagaggctggaaaaagcttgttggccctggagcattgaccttggcattctcctctgcaccttgcaatagaatgctaccaaagtcaaacttccaggtgcatgccacattgaagggcacatgtttccttggggaatatcttgtttcatgtgggagtaggtgctttaggtactttagggacttcccttagtaatacaaatgtactagtacattcattgtaagagggaagagtataaaaggattgttttttgttgacttagcaaaaacttctccttacaaaacctcttgagtgtgctgaattgtgaacaggaaattgacttggggtaaggggagagagggaaccagggcactcttaaagagaaaaagacccctgggtcgataaccaagtggtcctgggactggatctggctattacatgcacatcaacaatcttatgtacttgctgattaacaaattatatatattctgcatgtttgcacaaacagttcttgtgctagagagtccacatcatttaaactttgtgggagaattttgcaaatgatccaatcctagaggcttgtactctttcttgagccccactcacctttcctttgtacctcaaacctcagtctgactcttccagaaatataggggatggttcccttctcttctccca

SEQ ID NO: 585539 - DNA, 4001 bp, Homo sapiens
tccacagtcttgctgaatccctttactcaaggcttttacacagggttaaatttgggtggtggttttattttttttttaaccaccatatatacatcttggttgtacttatttattactgtgcaaccacctctgctccctttctagaatttagtgcaatagaaaaggcattacctttaacctaacatttgggactttgaactaaacttttgcacatgttttaagagcccattatctcttaagttggactcttcctaaatctctgccgccaaacctactttattgaaatcctttgaaacccaagtctttccacattttggctctctctgaagtttctttctttctttctctttctttctttctttccttttcttaaccctatattatagtgtctggtaataacaacatatatagacaccacactatgtgtctggtaataatatagagaccacactatgtgcactatgtacaattataatccttatttttatacaggatagaactgaggcaagaaagagtaaataacttgctcaaggtcacatagaaggtaattgaacagagaatctaccccaaagctgtgagcttaattactctcaagctccggggtcaaagagatctggtgtccattcttatcacgtctccctttttgcggggatggtgcctgttaatttattcagcttcttcgacgcggtttccctttcaataagattgagataaagcatttttcgaaagatctagattgagataaagcattctttgaaagatctagcagtaaatgagagctgcgtgagggatccgattcagtccctagctctggataactgtcagtgcttctacgcaccccaccttaagcccctcgcaggcaggactgggtcctgctcctctaaatactcccatctcatagtgggggcgcaataacgtccgtttaagacgaatcgtccaagggacttctatgcatccagctggcacactggccggagtctcactttatccccacatctctccgcgccctggacctaggcttgccacactctgccatccgctgcttttccagcccggctcctctctcagtccgggactactatcccgggcgcgggctcgggtcttaccatggcatcgtagcgcagggcgttcatgaagtgcgccacctcggcgcccttgtacacggtgaaccagatagtgccctggtactggtcgccggcgtccagcagcagcacgttgggttcggcgcggcggatctgctgaaccttggtgaagagccgagccacgccacccatgcagcggctggcgttgacgcacttgctggagtcctcgctggtctgctccagccggctgtgcacgtcgttggtgtgcaaaatcgtaagctcccaggcgccagccgcaggccacagcaccgcgcccagggcgaggagtagcgtcgcgggcgcccgcgcggctcggggacacatagctgtggcgcgtgaactgggtgcgaaagcgggcgagccgggcgagtgccggcgagtaggggcgagcagctagggccggggctcggtgccccggctggaggggcggggcccgggtcaaggccggggcgggtccttcttcagcctggaggccggcttggcggccaggcgcaagttcgcgacgtcacccgatccgaccctggtacccggagcggccctggcgcggctgtcggctggcaccagctccctgcaggaagagtggagaggttgttcccggcggggagcgggtaccggccgcatcccggccggaccagggagcctgggcgccggcagttcggctgctggtgcgccgctctttcgggggcgcgaggaaggaattggaggggtccgccccgcgcctgggtcctctctgagtctcgcctcattcgaggcacgggtttttctacaaaaggaatgtatggtttgtggttgcgctagctcatcacttcaaagaaccaaagaaggaaaagagagggggcgggaagaaagatgagcgagctgaggggcagagaggaggagtaaagagaggccgggcagaggagctccttgcagtttcgggctgtgagagccgaagctcactgagatgtgacgcttcctgttgggttgagaacgcacgaagtctacgatgcttagacaaaaaaatctcagaaactaagaaatcattcgaatccagttccttgtttattcacaattaaaaccttagtgataaaacagaggcgacgcgcggacagctcctggaagcagaaacacgattggggtaaaatccggcagctatcaggacgggaagggatgctgcccttctttgcttttctggtcttattttattttattttatttttattttgtcgcgtgtgctttcggtgtcgcagtgaagtcatagccaaatacaatgttaggaagattttcctctatgttttctcctaagagttttataatttaaactcttagacctttaatccattttgagttaattttcatatgtggtatgagtccacatttactctttttcatgtggatatccagttttcttagtaccatttgttgaaaagacattctgtgcccgtttttaagacattgacctgaggttcggagattgtaaatcatttgccaagaaaggccatgcagtttgggagcagcagtgcctggggctacagaagacccttgcttctgggacaccctctaatgtcatgctttgcaaggttttgctctgtccctctttgagcacctgctagaagcaggtaaaagaactggtagttttgctgttttaacttaaaaaaagaatgattttagacttacagaaaagttgcaaaggtaataaagggagttcccacatacccatcacccatattgccttatgttaacagcttatataaccaatgaaactaaaaacttaacagtgatacgaaactattaactgtgttactgattttattttaatttcaccaactgttccactaatgtccgttttctattccaggacccaattcaggataccatattgcagttagttttcctgtgttcttagcctcctctaatctgtgacagtttctcagtcagttgtcttcaaaaaccttgacacttttgaacagtactggtttctgtatactatccctcagtttgggtttgtctgatgttttctcatgattggactgaagctgtggatgtttaggaagaatgctacagagattatgtgcctttctcattgcctggtatctgtgggtacacggtatcaacatgacctatcactgatcactggggaactgatcatttgttgtttcttgtcttttaaacctaagccactgcaatagtttctgaaattcctgttctggggatgctaccagatttctgcttcaatatcatttccatgccatttgttttcatatacatctaaaatggcctttgattgtttattgcaccaagttcaagcttcgcaaactggcattttgaagtctcattttatccagccaactttaccttccactgttcctcacacattccctttgtcctcatttcttctctccaaaccaccatttccagtctgtccttaggccaaggcccggggttcctttaatttcttgttcaagtcaacatgaagttcctttgacttcttcacacagcagtgagtttttctcttttctaaatttctggtcagttcctacaatctcactttaatgtggttttactttttttctccaggtgtttaatgtgtgtttttggtcttctccccaagcaatggaaacagagttgctgcttcagtggtagtagtacttgcaattcaagtaacactaacttaaaatctactttagacacagtgggcgatagtatgaaagaaccaagaaggatttcggctgtcctggagctgataatgctgcaaacaaggtgagggtgcatacagtaagtagctgcaaagccatgaggatcatagaaaatttcccaagtccatgaggaaagaaaaatatacaggcaaaaatttacatacaaatcagggctttatttattgtttcatcagttgattagact

SEQ ID NO: 585540 - DNA, 4001 bp, Homo sapiens
cagtcttgcatcattcgtacaactaaattatacttataattggggtgctcacagatttatgcatactagtgtagtaagacatgctattatgctaattagttttcccttcagttaagagcctgtgatcccatctgatttcccataacatgatatgataatgaggagaataaaggctctggagcaataagcaccaccaataattttactttactcaaatatgcattccaaaacagtatataatttacagcatggccctggttagctattacaatgcatctgttttggggacttttacaatatatggtaggatacaaagcatacgtttccaaatctcctttcgttctgttttgctgaaagggagcacacatgggatcccttaacaacacaattcactaactaattttcttcaggcagtaattcaaattcccacttcctcctaaatacctctggacagcaactcctggcaatccatctgtctctttcgccacagcttcttttcataactaacgggtcaagttcctttccccatttcgacactgcactgtactgcggccctgccaccatagcccactgctgaatccaatataacatattggatttcactgtccttcattgtttccagtttaactgccattttaccaccatgcacacgagaaatgcattcccacaggcatcttatgaatttccaaagcagctactcttttgtggatttacaaaacatgtgcttctctgaattcccttcatcaccacagaaacggctttgggaagccgagatttttttttaaagtaccctacctattataaaaagaaactgattctaaaacattattttcctagctaatttaatcctaagagtcttcccacaaggcagtggaggaacgtcagggcaaaaatgttaaataccgcttttggtcttcccaattaacatgaaacattttcagcacacaaagattattatatcaaatgtcttttcttctcagactacaccataaaggctacccagcgcactgtaaaataaacagctggctatggcttatgcacaacgccctaaatcttccgaagacaccccacccccacccctcagctttgggctcacagacatataatccctcggcaaaccccaaacctgccaatgaagtgcactatttctctgccacaaaggccggcccgcgcctcgtgcacgccggcctccgcacacatgtgcctggctgacaactgcggagcggcccttccaggatcaaagccgttggcctggaccgaaagccgcactcttcccagcccactgccttctcccgcggccgctctccccggtaacaggcggcggaaccgaagcgctccggccacaagccggctaccccctccgcccggcgcgccctgtgcagccgcactcaaacccgcttcccctcagccccaacgtcctttctccttcccccttttttcgcctcaggaaattccatcggaacttcattccgcccgagcggggcggccctggcacaccctcctccggcggccgcgcccctcgcgcctccacccgaaggggccggagacccggcgaccccggcccgcccagcctgccgcctcacctcctcctcgctctcgctgcggaaacacaggcatgcggcccgcttcttgtagccgtcgccgtcgtaggtgcgggtctggttcgacttgagcttcatcatcctccgggcccgggtgggggtgcggtgcgggtcgcaggagtcgaggggtggggagcccgctctggacggccgcgtgcgcgcgcgcccccggctcggccaagggaagcagggagggggagcttctccgctacacggctccgccgctggcccgccgcggccgcctcattcccccaggcccaggtcccgcgccgccgctgccaccgtcacggctgccgtctccgctgccgccagggccgccgccccctctgccgccgccacccccgacgacgaccgcgccgccatcttgggcgcgatgcgtcagcggcgtaaggctgcaccggcctgcgggacggccgcgcgctcgcagcgcaggccgcgttcgcgaatcgcgccctcccagttcgcgcggtggaaaccagcatctgaaaggagagggacgcgcgactccaggcgaccgctacgccggcagcgtaggcgtagaactggtggggtgcgcggaggaagccgggggagataagaacagcggcgcaggacgcctagcggccggagcggagaccgagcggtccagccgcgcaagtctgcggatggggaagcggggacttggccaaggtcacgccgcgtctccgcggccgaggatgaaccaaggtcacgccacccgcccctgggccctgccggtcggtctcgaaggggttgagggggaaggtttgttggaaaaaggaggatgtagttaaaggcaacggaagctgcagcctgagacatctgggatttggaactgcaaggaaacggcgcatgggaggcgtgtgcactttgcgttgatagcctgaacctcaggatgtcttaggggctggtgcatgtcgcccattacaaagaacaaatatttattctgcaatcttttattgatgctaaaggtaattgcttcctcttatggtaaacaagagggccagaaaggaacacgcgcgcgtgcgtgcgtgtgtacacacataatgtaaatcataaaacatcatcgtttctggcaataaatgaggagtgtgtgttgtggatgtcaaacagattctccaggaaaagatatacagacagaagctctccagaaaggaaaactggtgtatgacctgtgaatgttctcagcaacccagaacaaaccaagtaccatgcagatgccctaaacgtaccaaaaatcctgtgcagtatctgtctgtgagttgtttaatacccttttttgttttttaaatttttttatttaattttttaaaatttttttatttaacattttgttgcccgggctggtccggaattcctggcctcgaagctatccaccctcggcctcccaaagcactgggattactggtgtgagccacagcagccggctaattcccctttttgaatttgcttgtatttagcatagtcaaaaagatctggatttgaaagcaaatacaccttggttgtaacctcaattacattttttttaatgctcataccacccgattacatcatattttaacttccgcaaaatagagacctacttggccctggcacatagcaagcactcagggcacaccagatgctattaatagtttgtttgcctattaaactttcctctcttcaagaaaagaaaattagagttcagtaaatgttgaatgaatagatagatggaggttttcttttggtttctaattccttaccctgactttttatgggcatgtttttgtttgtttggggttttttgtttgattgattgttttttggagacagggtcttgctgtgtcaattaaggtggagtgcagtggcataatctcagccagctcaactgcagcctagacctcctgggctcaagcgatgctcccacctcagcctcccaagtaactgggaccacaggcgcctgtcatgcagcctggagtgctaccacgtccagccaacttttgtatgtttttgtagagacagggtttcaccatgttgcccaggctggcctcgaactcctgggctcaagcagtccttctgcctcagcctcccaaagtactggggttacaggcataagccactgctcccagcctatgggcatgtttagtttcaagagcccacaagattactcccagatcccttgactgagtaataattactttgtctttgttcagggagcattaaccaagggattctgtcctttccttgaagataatgggtaagtagtacatttaaatttgttttaaaaaattatactcggccgggcgcagtggctcaagcctgtaatcccagcactctgggaggccaaggtgggcagatcatctgaggtcaggagttcgagaccagcctgaccaacacagtgaaaccccgtgtctactaaaaata

SEQ ID NO: 585541 - DNA, 4001 bp, Homo sapiens
cggcaagctccgcctcccgggttcaagccattctcctgcctcagcctcccaagtagctgggactacaggcgcctgccaccacgcccggctaattttttgtatttgttagtagggacggggtttcaccgtctctggatggtctggatctcctgacctcggtgatccacccgcctcggcctcccaaagtgctgggattacaggcgtgagccaacgcgcccgacccaaatctttacttttaaaaatctgttgataatgacacaatttaacaacatcaaccatgtgaaagtgtgtaatctttattagcatccagaataaagtaatctaggaagtctacctttaacagtaggcaacaagttatcagatccttttgctacacttttgtttttcaacaaatttaagacacacacttcccacctcagtatcactgataagtggctttattaaaataagttaacattttcctattcaatacttctaacaatcaatattttaaaaatggaattttctcagaatcaactatctcatttacaattaggataatccttttttataattttaaacatccaggagttcatacagtggctaaactataagaccaccaacattcctggagtgtcaaaagtaactatacttctagaatacgcctcataatattaaaatattttgtgtatgagatcagagctggagtcccggtcaactgtggagaatggccaattccagcctccaaaataaaggcgggggtggcggtgttggggggggggaggggagtcgcgcagcagagaaaagacgtaagggtggagagggactttcaaaatgccccagtgccacggttaactataacctggttaataaaatctaagccaatgctctcaagacgaggagggccacaggcaggggaaaccgagaattaactcataggctgagactaagttattccactttccatgtaacagcgccccccacaactccccgtctgccccagagttaagattccaaggggcagccccccctcctcaaacacactaaagaagggacaccagaaaacagcaagtataagggccatcaaccacatcttttcctttctccctcgagagaacatgagtaataccctcaaattccaaatccccgccaaaaaataaagaaacgcgcgcatcatgggcctacaatttcttttcccgcccagagcctgcctgggaaagcccctgacccagagagttgggggaaaggcggcccaaaccacacgtgtgcgccgcaaggctgggcctgtctcagcccacttcccgtcgccacccccaacggcctgagctcccccggagcctcactcgggcctttcctcaggccctcctgtctgctccacgtggggcgccggggcctcgaaccgcccgtcccctccagccgagtttccccacccgccaggccaccgcggcgtcggggtcccatacctgatgctgttgtcgcccctgctggtaaggcttaattggcccctggtggcaacgccgcgtccggatcttgccgccaccgccccctccgactcctccggctcccgaggccatggcggagcctccgccgcttcccgctccggggcgggtaagggggcgggagaggcagaggcggaggccttagagagcctcccccgccgcccggccccggcccaaaagtccgcccgcgctgtccacacagtgggcacaagcaccccaggaaccgcgaggttgcgagcaggagcggagagagggtgagtgctggcagcggggaagggggtggcggccgcagaggccgaggaggctccggtccggccgcctctgcggacccccgcctctgtgtgtgtcacggtctctatggagatctcccgcagaggacagcacgaacagttccccgcggtgctgaggcctaactcgaccgccgactggtgggagttcttccgtcgccctagccgtagctgccgcagttgaagccgctggcgacgcccgcctacccctcccctgtgcgcacagcgcccgccccgccgccgtcgtcgtcgtcgtccctgcagcctccgccgccgttgcgcctattacccctgctaaggcggctgccgcggtcgcgagccagaatgtcgtcactcatcggcgcccgacgcatttgcatcatcatgctgcgacgagctgataggcaaagaggaagggctggtcgagtccacgctctcggccgcgcggcacgctgggaaacgtagttcaacaacggaacgcggcttctcggaaaggaagagggacggggaaggagatctccggggcgccgcagaggcacaaagccaaggggtacttttgctgttcttggctgtaaattagactttgaaaagacacttaacataaaaacagtaacctcttcccattctccttctccctgtcggttggttaagtaggcaggaagtaagcagacagtaaaatcaaagacaagagctaatgatttaagaaggaggaaaaaaaaatctgtggttgaaaaataaagtccatgatccttagaattagaaaatatatacggcttcattaatgtttctttaaacatataaaggttttgttgcagacacacggggctggaattctggttctgccacccaacctatttgaccttggatgaatcaaaaccgtctgagccttagcttcctcctccataaaatgggagctttaaaatccaccttataaagctgttgtgaggagcagacgtgatcatctatggagagcatgtatatttgctaatagacgaaaaatgcgatgaatgattacaattataacccatgcagtcagctaacattaggggtaagtgatatatccttaacaataaaagtatactatatttgctccaaatatttaggaaactgagtaagtgagctagactcaaagactgaatccacaaaatgtatattctaggagttgacgattagaaaggtcctggtgatcacatagtccaaccctctcattcaaccaaccagacaagatgtccagagaaatttaggtggcacaatcaatgacactgagatgggtaatcaaagccaggactataacccaacttttctgtaagagctaaagacaaatagccaaatgattagggaggaaaaatatgttgtgaaaaatcttagacttactataaatctttttttttctttctttctttctttctttttttctgagagacagagtcttgccctgtcgcccaggctggagtgcagtggcgcgatcttggctcactgcaccctttgcctcccaggttcaagctattctcctgcctcggcttcctaagtagctgggactacaggcgtgcaccaccacgcccagctgatttgtgtatttttagtagagatggggtttcgccatgttggccaggctggccttgaactcctgacctcaagtgatccacccgccttggcctcccaaagtgctgggattacccgtgtgagccgccacgcccagcctatttactataaatctcccacttactagctgtgtagccttggggaagttactgatcctgtttctttcttttttttttttttttgagacgaagttttttcctcttgttttgcccaggctggagtgcaatggcgcaatctcagcaacctccacctcctgggttcaagcgattctcctgcctcagcctcccgagtagctgggattacaggcatgtgccacgacggccggctaattttgtatttttactagagatggggtttctccatgttggtcaggctggtctcgaactctcaatctcaggtgatctgcccacggcctcccaaagtgctgggattacaggcgtgagccaccgcgcccagcccactgatcctgtttctaagcttcgtttttttcatcagcaaatagagcgaatattgacctcacagggtagtggtctggtgaaaggattaatgtatatctagttcatagtaactgcttagatagaaagcatccaatatcaaccatcaatcagatataaataattagttccaagacatttatactatctccacaatcaaa

SEQ ID NO: 585542 - DNA, 4001 bp, Homo sapiens
cacacctgtaatcccagcactttgggaggccaagccgggtggaccacgaggtcacgagttcaagaccagcctggccaacatggtgaaactccatctctactaaaaatacaaaaattagccaggcatggtggcatgtgcctgttgtcccagctactcgggaggctgaggcaggagaattgcttgaacccaggaggcagaagttgcagtaagctgagctctcgccactgcactccagctcgggtgacagtataagacttcgtctccaaaaaaaaaaaatgtatctttcctagagctagatagctttcttttttattttatttatttatttatttatttatttattattattattttttgagacagagtttcgctcttgttgcccaagctggcgcactctcggctcactgcaacctctgcgcccgggttcaagcgattctcctgcctcagactccagagtagctgggattacaagcgcgcaccagggctaggtagctttctatggaaaatgcaggggctctccacaccaggatttgaaaacttaatttcggccgggcgccatggctcactcctgtaatcccagcactttgggaggccgaggcaggcaaatcaccaggtcaggaaatagagaccatcgtggctaatatggtgaaaccccgtctctattaaaaatacaaaaaattagccgggtatggtggcctgcgcctgtagtcccagctacccgggaggctgaggcaggagaatcgcttgaacccgggaagcggaggttgtagtgagctcagatcatgccactgtactccagcctgggtgacagagcgagactccatcttggaaaaaaaaaaaaaaaagaaaactcaatttcatccccaccactcattactggttttgagactttggccaagttaagttcactaaatcgtggtaaatctttaaaacgggagcactaatctctacttagggagttgttatgagaattcaaaaaacaaaatgatgttatccccctgcacagtatctgtcacatagtacatgctcaagatatattagtctcaattttctcattagtaaaacaaagtaacgatacttgattcactggcatgcaacaataattaatttttgtaaagctccccaaacggtatttagcacatagtcgacagtcaattaataaaaaagtatgattaaatctacatcccctttcccagtcctttttctgccactaaatggctaaatgatgttgggcaaatcataacttacagagcactcagttttctgtaaacgaggggtgacaccagacaacttttatgatgctctgcttgtttaaatgtattactcaggactttcaaagttagcttttggatgctacacagatttacctgtaaatccattacatcaccatggtgtctgatatcacacaataactgatggtctccttcaaaccctccatcagagtccaagtttccaaaatctccaatagaccacagtgaaatataattttcctgtaaaacagaaagttttgtcttgagatgacataaacgtcaactctcggaaaataaaagttgtgctcccgtccggaaatgttgctccaaaacatctcaaatggtatggtgagtttaaaacacaacgagatacgaggctcaggcatgccatcaccggctctgagctacggagcaaccgcgcctgagacaggggtccgggggacctaaaagtgcgagaagaaccagaaggtgggagttggcgcgcggaaggccaggggtcagctcaaccggagagagggaggaggtaggggctcgtccctatcagcggcgatacctcattgtcccaagatcctgtagcgaacgtctccgcggtctgtaaacttcccggaggcagcggtcgccagcgggttttgctgattttctgggacacaaacttcgcataaatttcctccatgccgaaagcggccgcagcaggtactgcaaaaagcaagcacagtacgcgcctctcagcaccgcctcttcccgcggaaccctgattggatgggactttaggacggagacggtggctgcagagagtcaattctcgtcgatagccagtgtgggcacagtcagtacctagactgagaggcccacccatctcacagagcagctctgagcaaaggcaagagcgctttggcctttgagcagtaggacttgctcctaatctgcaatgtcagtattttcttgtgttcaataattgtgcagtgtaaaatttaagtgcaaaaacagaacaaaaacaatgcagtagaaaccaccttgaaaccacacctaagcagttgcaggtcactgcgcatagaaaacgattcaaaaatccttaaatactcgtggaagtacctcgaataaagtgccaacctactatcccaaacctctccctcttgtctcccaaacaaatactttgcttcaaagttaatacacactgtcagagcctggagttggaattctgaaagactccagttttagttttgatgccaattgcctagctttgatcaattcaattacgtgcatgattaagaatgaagtttgtgatacctattgtcaacggcccaggaatcagttttctaggttccttctgtgcttttggttacacctataatattcttcccttcctctttactcctcagaatcctgcctatccttcaaggatctgttctttcctttaccatttcctgacgaccccagccaatgttgatctaaatcaacaccattttttttcttttttaagacagggtctctgtggcccaagctggagtgcagtggtacaatctcagctcactgcaacctctgcctccgcctcccaggttcaagtgattctcccacctcagcttccagggtagctgggactacaggtgtgcgccaccatgcctggctaattttttttttttttttttggagagacgggatttcaccatattggccaggctggtctcgaactcttgacctcaggtgatccaactgccttgtcctcccaaagtgctgggattacaggcgtgagctagcatttgatatctagaccactaatgacatatattttggatatatcttatgttagttttctttagatgcatattcctcccccattagaatgtaaatcctactgaatacaagagatatgacttattcaactaaaaaatgaagctcttttacactataggtattcataactgtatgttggttatttctttaaaaagggccattatgctactgttgtttttatgtgatattggtagtcctacttcacagggacagtttacggaagcactgcatgtaaatgcaatccatctgggtcagctttagagttaccagtttcctatcaaggatttgacttttttcttttctccaaatggaagatcatcaagaaactgtagaaagatgaaatggaaaatattaagtgggttacagtcccaaatcaacaattttattcatgtttaatattgaagtaaagaacactgttttggccaggcacggtggctcacgcctgtaatcccagcactttgggaggccaaggcaggcagatcacgaggtcaggagttcaagaccagcctggtcaacatggtgaaaccctgtctctactaaaaatacaaaaatattagctgggcatggtggtgcgtgcctgtaattccagctactcgggaggctgcggcagaattgcttgaaccgggacctgggaggtggaggttgcaatgagccaagatcatgccactgcattccagcctgggctacagagtgagactccgtctcaatcaaaagcaaaaaaacaaaaagaaaccagttttgcctgtagtttcatttatggtcacataatcccagaaaataggtaatgttgattttggattggaagcaggccagtgtcacattttacaaaatcggataagaactagaatttgaaaattgtgctgatatagtggcacagatgtcttagctttgtttccttctaaaagattactggaggccgggcgctgtggctcatgcctgtaatcccagcactttgggagg

SEQ ID NO: 585543 - DNA, 4001 bp, Homo sapiens
ctttaaagaaattccaatgctttcaagatctgattgaaaatcaaacctgacatcccaaacctgagtattcctcaacttatctcctacctattcttcaaggtcctgcttaaatcccacctccactgcatgaacttctcaagttccttcattcacaatttctctcctctcttctcacaatagtaattttactctcaacacttcttgttattaaccatgtcaaatatgtgagtgtgtgcctacctcctaacaagcctgagagtccatggaattaaatgcaagattccaaggaatatgcctagcacagtgctttaggtttgtagctacccaataagtactgaatttttgtacttacaaaaactccctatggtgaaattcattccctcaatcaaaacatatgagaggacaattctatcaagtactgtgttgggcactgatgatgaaggatcacaaaccatcccagccttccaagacagaaagggaccattttcttttctgcctatccaatctctcacatatttttcataaacccagttcaaataccacctgacccccaccgctcccatttgcagtacctatcacacagcccatgcctaagtcctctatagcctcactgcgacttaagaacagcgcctggaagctctcttaaagaaacagtgtggtgtaaccaaaggcaaagattgtgaaaaagcacagaatggctaaaattccaatatcctcattccgatctttgtggccccattacgatcttgtggccttgggcaaatcagttaatgtttttaaaccttggcaagggtatacaaataccatctacattactgcagtattataacgaataagagattttttatttatttttatttatttatttacttatttgagacagagtttcgctcttgttgcccaggctggagtgcagtggcgcgatctcggctcaccacaacctccgcctcccgggttccagcgattctcctgcctcagcctccctagtagctgggattacaggcatatgccaccacgcccgactaaacttgtatttttagtagaaacggggtttctccatgttagtcaggctggtctcgaactcccgacctcaggtgatccgtccgcctcggcctcccaaagtgctgggattacaggcatgagccaccgcgcccggccaagggatatttttaaaatgttaaaaagctactgagtcaaatccagagaattagtaggtgttcaataaagctgatctcccttcctcgaaagcgctagcgctgtgatttgcagagaggccgcggcaactcgtgccatgggcaccacccgccagaccagcggtctagcggtccaagacgcctcggccaccccccaccaccgcaccgggcctcaccttggtggtcgtagacgctaatgtaggagatgcccacggccatacaccacaccacgaggctcgcgatgtccgagaagctgggttcctgctccacctcggtgatcaccaggcccatatgcacaggcagcttctccaaggaacgaccgtccgcgcgccagcgcatccggtggtgtgcggctgccaggcacgaccccccgcgcgggtgccggtggtgacggcggttcctgccgactgccgggggcttgcggagcgtgaagccgagcggcgctaggaccgcggcagaggcggcgcggcagcagcgccgccagatccagttccaggtgccgaaccgaacgcggagccaggaggtgagcgtgcggtgcagacagagcagcgcgtgcagcacccgccacaccagctcgtacagccccgtcatactcttgtggccctcagacaccccctctccctcccgcccactcccgcagcgcgacggctttttatccgcccctgcggccggcgcgggccatcgctccgcgtccccccgccccccgagcccgaacccctttccactgccaacacctcacctcgcccccgccgccatcttcctcctcccttggcagccccgcccccagtagtacatggacagttccgattggccagcgtggaattctgacgcggcttctgggtccgagaacgtggcccgttccggcgcagtgagggaaggcgcacgcctgcgaactagccgggccgataccgcgggcgccccctggtcgcgtggagggcgatgagcgaacgacccgggacttgtctgaatgggaccccagcaaggcacacgtggtcttcaatgcgatgggcgcttccaggggacccggcgtcccttgggtccaggaagtcttatactgtctcctctcacggccccgacagaaacggtttctgaggagtagaagtgtcctaagtggattggaaattacaaatgccggaaagaacctagggatggaaagcagccctcagtaagtgttgatgctgggaatccaccagggtttccaaaagtgtcctcaaaggctggagtgatcctgctactgtcctttattcagcctcccggctgaggctgggagcgaggctctttagccatgttcctgaaacacccctctacccatgtcattctcatctaaggtatcctttcctggctgtacattgcttaatagaggctctacagcttggcagtccagtcacttaattctttttttttttttttttttttattcggcaagactttgaccaaccgccgtgggttaggtttacagtggggaaaaaaaatagaaattgtgcctgacttcaatgaccgccactatttgaagcaaactgcccatccaagccttatcatcccctttaacaccctaatgtttctgtccatgtggacttcgacgtggtcctctagaatggttttgtacttccccgcggtaagtctgtactgtctttgccctttttgttcaagctcttctcctgaattcctgattcccgacttggtattgccgacattccaacccatttctcaaggtttatcctacatgctacatcctctatcatcatatatatgtgtgtgtgcaacaataatatttatattatttgcatttatatttatataagtatatatataaagattagggaggtattacaaaaatgcaactgtacacatacacacgtatacacacatatttacacacgtgtgtgtgtgtaaacagttgcgtttttgtaatacctacctattctttgttcgctaaagcctctttttccccctgggaaacatctgttcacgtcttggctatgtgacttaatttttctaacattgtcactttttcaactagtctcattttggtttctaagactcatttaactttactttaaaagttgaatctcatgtccatctccctttcgcagtgcaattttcctccctttggcagtgcagcctgaagaactgagggctgggcaccaggcacacccttcacacacttctttctctccaggtctcctctgcggtagctcctctgatgatggacaaagaaggagaggcgaaaggccatgatcagggaagcctacagtcttcttcctcactgcccattgctgtagtttatgcagctacatgatgcttgttaaggaagctccctagacaccagtgtcccattgagatttggccacgtattctgcagaccccaccccaccccccatgccgactatgttgccacatttctctaccgtactcatttctttgccccaatgtctatccgttctgacaagattaaagacatcaatctcatgttcccgtggcctgctctcaggtgtgcaggcacaaacaggctctatcttctgtatttcttttttcctttttttttgaaacggagtctcgctcagtcgcccaggctggagggcagtggtgcgatctcagctcactgcaggctccgcctcccgggttcacgccgttctcctgcctcagcctcccgaatagctgggactacaggtgcccgccactacgcccggctaattttttgtgtgtttttagtagaggcggggtttcaccatgttggtcttgaactcctgacctcaggtgatccgcccgccttggcctcccaaagtgctgggattacaggcgtgagcc

SEQ ID NO: 585544 - DNA, 4001 bp, Homo sapiens
tgtagttttttacttgccaaatgtgtatttactcaataattatctttttacatacaaagagctgtataaggcattatgaggaatacagatatataaaaaaggaattaattattacagagttttcaatccagagaagatatcatcattccaaataactataatacaaagcagtaagaattgcttttgtctaaggctaagaatcactgtggacactgatgctgttaagcctggaatgtggtcggagaaactgttgcagaagctttacataggattctagtgcacatttctggtttaaagtggcccgtagaaagtgatgggaggggtctgtaaggaagaagaggtttctaaattcctctttgaagagaaagcagaatattggtaagtaaaggatcttgaatgccaacctatagactaagcatctcagagttatttcaagtttcagagaagtacagtaatatcgtcaagaaagtttcatgatacaagaggaagagattaaaaaccttcacaggagttgggttttgatatggtaaacgtctaaactagaggccattcttggggaggaaaatcttaaaaacatttggttcttaggaatcccctctttacacgcatattttattaaagtgtaacagattaaaaggtgctctagccagggcaaaccaggtaagtggtttccaaaactcacgttgatttaaaagttcttgcacccctccaaatttcttcttaaagaggacagctatcccagcgcccatgcgacaatcctcactgatacagtgggctaaagagtctgttttcgggcatgcaaaaaggtctcctttcacataagtgatctaaaaaatgtgcaaaggaaaagacaatgttttattagatacagtaaaatactaagctatttttctgtattttgtgtcccccacgactacctctcccggcaccccttcctccaatctgatttaaagccaaaccaattacagcatgtgtaaaaggaaagtaatggatgatccctgcctagaattttgagcctttttaaagtaaatcagctagagagaaaaaaagataatgcaatcattaatttaattaaaaagtgtttatgcttttgacctccattattacgaatttcagttcaccaataagtcaatagttgttacgcactctgcttccttctggatcttcattaaggctgctggccatgatactgagtcgctatttccagaatttaagtgtttcttcagctatgagaagggaaaaggaagtaaaaatgcttaggcagccttagtatataatattctgattgccctgtacaaccacttaataggcttttttccccaacgtttatcgatgaatgtgagtttgttcggcccctgggacgtaatacaaaacccttctggggcaaagaggaagaacgcttaggttcggaggctgtctcgacccgctctcatttcgtgctttcctggagcgccccgctccgtcagcggaagcaaagcccatccctaagacacgcctcctcctttctccagggccactccggagcaaggccgatttaggacggtctccttttctctgcacgacgcaaaagtatttccccagtgggtctggcttagaagaaaacagaagggacttggccacagtcccgttaagccgcaaccacagagtgtacagggtactggcgtgctgagccccaggcgtggggaaaggaaggcggcctctcaaggaacgttcaccccccacttttttggggggtgcgtgggagaaggaaagagtctattgaagcctcccattctctgtctcctaccctagggcgggtcagcgaggacgcagtctgtcctggggtcctatgggagggtgcggggaggctcgctcaaagccccaacgtacccaagtcacccttcacctggaaaggagtcggttgtttggaggtccccgccccgcggggaagggctccggatccgaccctggtaggtggggagcagcggaccagcccaaacgcggagccaatcccgccaaagcccttaattgcacgcatctaagatggccgcccccgcccggtagcggggcggaaacgagcccctctagcttgctagccgagcccacactctttggcgaaggccgccgaacttccggcagtaaattccgtggtttcccgccgccgcccgcgcatgcgtaacgaaactgccccacgagtcgggaaaagtggcgcttgcgcattagccgcaggggtgtgtcctagtggccacttggaaaggggtgggcagctggcaaaggggctagttagcgcctgcgtagtactaagctcaaggcagcgttttgagttgaagggtctggcgcgtctggaaagcgcctgcgtattcctttcactgggggtggtgtcaaagcgggaaggtgggcgtggcttcagggaacgcctgcgcgttgctcctccgaaggggtggggcgatccctgaactggagttagtgggcgtggcctcagaggcgcctgcgcggaggcggttggagggaggcccgattcccctttgttcgggttcgccattttgctaggcagcggcagtggcggcggcagcggcggctggagcctctgattgggtttcggagtccggtactggagccaatcagcgcgggcagcgaaccgggggagcgaggcacggtgagtgtgaggagccaatatccagcggcccagagccggccccagcgccccgattggcgggtctcgctgaccactcaggagaggcccaggcgcccgtcgagcccggggagtcgagctgagcctagccgagccgggcggccagcggccccggcccggggcctgcgagcgcctcggggcactcccggccgaggcctgcaggggccgccccgcgcggggatggcgcctcggggagcaggcacctcggggctccgaccctcgcagggtgccagggccagttgggaatgcgtccctgttccccgactcaggcccaggttctcaggccccaggcctggggccacgaatggccctacactaggggacacatgcgcgccctgggcctcggcgatttcctcctggtcgttctggccgcaaacttaaacctgcccttgcactctccactctccggcccttgggacaggaagcctccccggggcccgcgccccccgctccccgctcccagcgagccgggtctgtcttatctgcagcccctctaggtcgggagggaggcctggggagggtgcgcgccgcggccgcggggtcccgtgtgcggctggcaacggggctggcccgcccacgcctcggagccctatgggcccgcccccgctgtctccctggtggggagagggggccgttagttcgcccactccccctgctccgccgcgcccctcctcccagcccgctccgcccgggtctccggcccggcgccgttaccaccccttttggctcgtcatttcctctcttccccgccccgttcgcagtggcaggaccgcacacctccgtcttggagcccaaccaagcggtctccgtttcttgtccgggctgtaagaccagtccattcggtgcctggaacctcactcttagaagattgatacccttgcgcattctttccggaggctgcacaacttgctgttcatattactaatcttatccactgctcattttgtgaaatctccctcccttgggaatatagtacagttttgggggttttttttccctttgtttttgccttcgcctttctatgttactttgtgtcaggcttgacccagtccactcatctcttggtttatgtttttctgatacactttcaagtcctgtgttaacgttttctcagcagatgtttagaaactaacagtgttgtggggttttccttagggtgagaggttgctgttggcaaccaattatccagcagttagtatatgccaggtataatccgtgtgttagggagggagtacgtagaggtcaataagaactgtgcctacctgatggaaattgacaggtgaacaggtagttaatacctaacggttagtgctataaaggggccaagttc

SEQ ID NO: 585545 - DNA, 4001 bp, Homo sapiens
tgatgcaatggaagtggtgtgaaggagtcagtctgggatacgctttaaaagtagctccagtattacctgcaagtggattgactctgaggaatagacaacaaatagggttggcagtcaaaaggcaaaattgaaaagcagattttttggggaagtcagatggtgatactaacaagaaaaattaatcattaaaagggaatagggagggctggtgtagtctactagttactggggttgcagttaactgactgaacattattaaaatgttttatatagatggacctggttagttggattgaatcttagctggtgttttttgatattccaaatttctgtaggaggttacttaattgggagacaaacgtaagggaaaaacatgagaatgcagcatctaataatttaataagattgaattagcaatgcaaaacaacagcggcaaaccagacacaggggcagatggaaattcagaattccacaggtccaaggcgctgatatcagtgatagatagacttgggtttgcatcatcctctccctcagtgatcttgggcaagttttcctttctctctaagcctcagttttctctaaaatggagaccacacagcaaacacccaccccaaaattgtagttcatttaaataacacgtttaacacagagcctgcactaagactttatgatttcctccttacctaaatagaattgatcatcaagatggctgaggcggtgttagctgtaatatttaggttatgattcccccaaaaccctgtggtcacattggactttgggctccattttcccaatctccatcgcccctagctgataaagagaagggcctaatgtggagcggcaaacctgaaccacctccaggatgcacacttcttcagggggtcggctacatatttcctcctttttaaagttcctgattattttcagtccatcagaggttaaggggcttatctcttgactaacctctcctccaagctgtattagtcaaacagttcaaacacagttggatcaacaagtcttctggtgaaataagattcgtgaagaatgccctgaatcctaggttgaaaggcctgagttgggcagaacagtgacgtatgaacttcagatgagggcctacacttctgacggcttagaccccactgtaggggagagcgctggctgcttgcacttgtagccccaccttattctgagtaattttttttttttttttttttttttttttttttaccaataacacacactagaggggttgtcaaaatcctctatttttagacaggttcctcccaccccaccttcgcataatccagctgctctgcagaggcaaagaaaacacccattcaagttgggttctgccttgagggacttcctcgccgtgccctcggccaggccccaggccggcagtgggagggtccggcgctttgggctcctgcaggcccccgggctccaccgggagacaggtcagccgcggcgcggaggggtcgggtcgcagcggcgagcagccacctggcgcccctggcctccgagcgcgagggcggcttggcacttgcccctctggggtgtcggggcgccccagcccgacccgaggccaccgctgggccgcgtacctgctcggcgcccgccgcctcggcgtcctcgtccggcgcggggctggcgccgggccgcccgccggcttgctccgggggctgcgcgggctgctcggactcctgccccgggccctcgctgccgccgcccggccctggttcttcgggctcgggctccgagtcggtctgccaggtggagtcgcagtcctccacggtggtgggctcgcggaagctgaccccgccgagcaggttgcccattgaagaggcggcggcgggcgcggggctgcggggctgcggggcgcaagctgcggcaggcgctctagggcccgggcatggccgcggcgagggcgctgggcggcagcctaggcgcgcccgccccgcactgcctcagcgcggcgagcggcggacaggcaccctcgcggggaggagccggcggccccgggaccgccgccgcgcgcgcctgaacccgcccatccggctccttctcctccccacaggcgggagctgccgccgcccagagcccccaggggagccaactgcggcccccagccgagcgccaccggccccaggccgcgcctcccttccacgtttctccccggaacacctgccttcacgcggcccccggcggcccccggagtggattggggtcggctactaccctcgccgcccggagccgggggacgccctcccggggcatctcccagctgagcgggatgagggatcccgcccagctcctggagctgaggactggcgtggacgtggtgtcgaagaggtgtcaccgtcagcaggcgggtcctgtccacaccccctccccctctccctggtccaggaggaagacactttagctgcagcagaggacaaaagctgatggtgccgggcaccatataaacaggaaatcccagctgccacaactgtacttagggcagccacctagagtccttgtggtctagaaaaagtcagagctatcagtcacctcatctaatgagcaatcgctcgtgaaacaaaaggaacagtaacaactggaccatcacattgatttgcgggtaaccttacacccactacaaattggtgctccgtgtaggcaaaaatctcagaatcagtagaacagatgggctgtttctaatggaagaagcctcggccctgtggtctgttctgcaaatgaaaggaggagggagaactgtgttagggaagttctttcttttttctgttctgttctgttctgttctgttctgttctgttctgttctgttctgttctgttctgttgttctgttctttcttttctttctttttgagacagagtctccctctgttgcccaggctgcagtgcagaggcgcgatctcggctcactgcaacctccgcctcctggtttcaagcaattctcctgcctcagcctcccaatagctgggattacaggcataagcctatagaagtacgtaaagataaggtagtattatcaaatatgtgacccagagaaaagtgactgttgtaaaatgtgtcttctggctttctaactagaagggaagcctctttgcaggcagcccccgtctgaaagtgtgtctgtatttacagtgctgtcaacttggtggatgctcagtaaacatttgttaaatatggactaagaaagatgagctagatatttgaagattaaactgttgaacttggaatgaatagtttcttttcaaatgtttcatgatgaagtaggaagccaaatcatgttagatggactgtttctaagggaagaatcaggtaaaccagctgcctattccatggataaatcaggattacctaagctcttcatgcactgcaacaagacatctaggctgtagctctgtcactaatcagtttctgactttaagtaggtcacatgaacctaaacttcctcatttgtaaaatgaaaccagatctctgggagcccttccagctctgaccttctgtgatcctatgactgggaaaagctctgaaactaataagaaatagacacggggtgcacaaaaagacttttggggccgggtgcggtggctcacgcctgtaatcccagaactttgggaggccgaggcgggcagatcacctgaggtcagatgttcaagaccagcctggccaacatgacgaaacctcatctccacaaaaaaatataaaaattagcctggcttggtggcgggcgcctgtaatcccagctacttgggaggctgaggcacgagaatcacttgaacgcgggaggtggaggttgcagtgagctgagatcaggccactgcactccagcctgggcgacagagtgagactccattgcccccaccccccgccaaaaaaaatactttttgattataatggcttagcagaagaagatgtggggcagccacataccacaggaatccaactgctcaaagctgggaattcgattttccgttggtagaagaccgga

SEQ ID NO: 585546 - DNA, 4001 bp, Homo sapiens
ataatagagagagccaaccccgcatgcagaataactgagcgagggggggtggcgcaagctactagagggagcccaggcttttacaatagcggccccagaacagcaaaggaaggttccgaataaagtttgaagggggtgggggtgggagaagaagcgcgtgtgcgtgagtgtgggtctttgcactctgccccttttttcatttcatacaaccacagacagatatatggagtacttgggataattcactaataaatccttgttacaaggaaaacggcaccacagcctgcacgacatattcagacaagattcatttagaagcgtgcatgcattcttttgacctacactgcgtcgaaaggaaaacccacataggaggtgtcatgccctggacctcggttgagattcaaaacttgggtcttgatctctctcgcgctctctctctctttctctctccattgtctctagaaaaactgtggcaaggacagagacaatcataatcgcatccatctcaagaaaatatttacatttgttttgcacaaaagggatggccgtctttttccaaagcgagaacacagagtcagagaaagccaactcaaaagtcccttcgcaagtttttaactacaccgatcccatctttatacaacaaatgcagttttgacaagagcatatggcagtgaaaaatactggcgcggcatggggaaaagaagcatgcatgcaaaacacacgacatctggttcgagtccccctttgctaccacctagaaattgcggtttgattttggtcctttccctccgggggtcaagtggagtctgagatctctcagacagcgtgggaggctgcgggccccggagcctgccctcccgtgggccgagcgtgcagcctccctcttccctcccggcccggcaccgcggcccctcccgccgctctccctcctccttggcagccgggcccgcccgctgctcacttgagcaagtccttggactcggccgacagccgggccatgttggctgtggagagagcggacaggtgcggcggcggcggcatctggcagatggtgcaggggcagggcagaccagcccagtgctggaagccgctgcccagctgcagcgcgggcggcgtggagggcgccttgagtagcgagtggggaggccggatggtgccgatggcgggaagtgaggcggcggacagcggtgacgaggcgttgccagatgagagcgcgccgcccaagatggggtgcaccgggtgcacggagttggccgcgtgcgcggggtggccggccgagtggcccacggtcccgcagtgaaaggccgagtggtggcccccatagatctcgccaaccagcctcttcatctcctccagggagctggtgagcatgaggatgtagtttctggcgagcaggagtgtggcgatcttggagagcttgcgcaccgacggcccatgcgcgtagggcatgacttcgcgcagcccgtccatggctaggttcaggtcgtgcatccgcttgcgttcgcgtccgttgatcttcagcctcaactgctgtaggtcctgctccgacagctgcttcttgattttgtacttgctgctctctcccgcggccttggcgccagcccgcgagaggctttccccgggcatcttctgcatcatatcgccctgcgtggacgagaccgagttgagacggctctcctggtggtggtggtggcggtggtggtggtccctcaggtacatctcatccatgtccggagatgaagctctgctggagacagagctcgaatcagaattcattttattacaggggatgcggccctaccgtggggaggctttaggcgggaaattaaagaaaatcttgaattaaaaaaaaaaaatctgcactgcccaggaacccacttctccgcggcaagacgtgagaagaaaagcggagacgctgcttttccccgcctctctccctcccacgcccctctctctggttaggctgcttcctggacagctagttggtgtgtgcttgaactaacctcacgctgaaaaagaggggcttttatagagctgcggcggagaaaagagacaaaaggagccctcctatctatcctgggctggttaggatgacgtgccatcattcagggcggtgcgctttgctgtcccatttagcaaggattcctattcatattcattgtggggccgccctgggacacctctgctccgaaccgctaggagcccccaggcacaaaaccctctgattgacacactcaccgctccagcttacgccttcctgattttttttttaactttcttccaccccaccccccttcccaatttctctaaccaaatcacacatcaggaacggaaggaaggcaagagaaggtggccaggcggttggtggaggttcctctgagtttggagagaggaattgaaacattcgctctcctttctttcctggctgctcccaagtttagagaaatatgggcaaaaataggtctcagtggaaaggtttgagggacagaggtgcggtcggagggaaggtgctgccagcgggggctgggggtggtgggaagactgcatgccgactttctctgtctcaatatttttttttcattagatctcttttcctaaacacttccattctgtcaattttgtttattgggcccttctggtgtggtttcaacgggatgtccatgttcggtgatggctttgctcctggcagtattgtggcggagaggtctcttattttctgtgtcctctctttcgttttaaaacatggatttctaaaagaatttcagttttgcacaattctttaacttcctagaccaaaaactgcgaaaaaaaaatgttaatgtcacaagaaaagcaacttgggaggatgggaaggaaaaggagccaaggaggcagagagagagattgttaggttcctgagagctccagagagattgttcccactccaggcttcctggaccttggcgctggcgcaaaacggtgggacggtccgcgcccgaagctccgccgggcctcctctggccgctgtgctgacgtgccccgagctccgggaactcagcggcaccccggcctgcgcgggtgggtccaccaggctggggccgccgtacggcgtcggacagggaaatcagaagctcataataaactatctgatgtcggggtggtggggcgggggggtggggtgcgtgggcaaagaagcacgggggaagggaaacaacgaaaggacctagaaagccccttgtgcgtgcccgggcactgcggttcagcgcagagtcgtttctgggaataaagaggaggtcggagtttggagccttcggtgcgagtgcggaggtgggcgtagatctttcttcccccttgctgtgtttttgtgatcaagactttagctcagcagcacgaggggcgggaaggcagaaatcccgggaagggagagagccccaggagtggtctctagaagaacccggacaccgcccctctcccggcttggtggaacgggaaacaaacgctagctagtgactgagagtctcggtggaagtgtgaaatcgaatcaatcgcggaacctcgggcacttggggcctcttgcgccgctgagtcacttcgaagaacaggatgcccccctttcccttgactcaaaccgagcggtcagtgggagagggatgcgcgcccaggtccggagtttgcacgctctgaggctgtgccccactgacagtcacgctgcgaaggcagctctggccaataccagaaggatgggcaaacgcaacattggcatggatgcttttgctacaccgaattttgtttttctgtaatgggggaaaaatggccaacagcccttcgtcaaggccaggaagttagtgctcttgcagattggacaggagcctcttctaccaccttcatctcggtggaaggaaagtttcttaattcaagaggttagattggatgtggaaagactaatgtccaaaagcattcctaataccaagcataaagaatgtttcttaattcaccagactcgccaataagatagtgacata

SEQ ID NO: 585547 - DNA, 4001 bp, Homo sapiens
gcttgaacccacagggcttttggcacctttcgccccaaaaattctacttccagaaagtggggcggcaaggataggagctgttttgcagagattggtaatttcagtacaacacgtagtggaaaaacaacctggcccatgccggacacccgtgcagcctcgccttgtagaaaaaggtagacagccggctccaaggcagggcgccatccacgagccaaggtgcctgggaaccctgctcttccgtggtaaatcgaaaactaccattaatgaacgctgaccgcccaggcttgcttcttgcaacgtcatcctctgcccaatggatgccccactccaggaaaacgcacagctggtgctcttcgggggatcaattaccagcttcaaagtgagagcctcagataagctgctttagtagtatgtgtgagctcatcagaaatgaaattttaagccccaccccaaaagtactgaatcagaattctctggagaaggagccaaggaaattgtgttttaacaagctcccaaggtgatttcttacaagctttaaagtttgaggaccaattatgtaaaaacaaaacagatcaccatttgtgaggttatctgcccctgcatatccgctccctgtgggtgagggcctctctctgaccagaaaatcataaaaggattaggagtttcaaaatgatgggaattcaggaaaaaaaaacaaaaacaaaaacctacaaaactatcacctgcccacccttcatatcaaaacatgagtgggagtcaatcttttataaatttgctttattataagtgtgtgaagatcttaatgcttttggcaaaatagccatttctttattagaatagttcaaactcactcttgcaacaaaataaaccacaatccatcaagacacaggaaaaaggaatacggggatttaagaatgctatacttgcttttcttcaactttagcagcaaaagttagaaagttaagatgttcccaacagtaactatgttgtcttaagcaacaggatcctggggagagtgggggtctgatgcatgggccttcaagttcttctcaaggtgtttcatcttctcagctggaagagaagcagttgatactaaccatggacagggacaagtgtttgctgtttcgaactactccgtgactgggagttggggaggagagaaagatctgcgatagtgctgtaacccaggtgaggctgacttgggcagtgatgggtctgaatctatcagatctctgctgactttcccaaggtcctaccccaggatcccctcccaacaaacttcgtacagctagctccctggggtctggaaaccaagaaattttgagaaggttaagggaggatggaaggaaaccgagcaaggccagtatggtcactcgtggcttcctccacatgcaggttctcaaagaccctcacctcgggcacgatgttctcggtgaaaccatgccaggcacaggagcatgctcttcacccgattctgtacacggggccgcccgaaaacggtgatttcgactaggttccctgagtccactatgtccactgtcagcagggcctggctcgtccactccatttctggaattatggctcggtctgggcctaaacaagtaaggaaaaactctgaggggctgcacggtggcaggttagaagctggatttgaagggaatgttggccagggaagggaagaactggaaggtgggcatcactgcaacactcctggcttgcgaatctgggaaagagactgtagagagctgctctgccaagcctctctcagactggaggtggacagcccactagcacacctggggtcgctcaccaaagagctcgtctgccagccatgcctctaggtagaacaccaaagggtctctcagttcctgcaccggaaaccaccagggccggatgcgaatctgtggcggcggaagtggtaacctacgcagctgctccagggagtgggccggagtctgtttgccccgctgggactcagcggcaccagcatcatcgaccatactgggaccagcagccgcggagcgcgctcgaggcggctttcgcaagacctcttccagacccaggcgcgaagctcgggctctcttttaccatattcgacccgctccgccccttccggcggcgcctcgcaccgcgtcggggtgagcgggtgcaagcgacgccccggcatagcggcaccattggacacttcctgcgctgcttcaatcgccgggattgcctctttgaccttgaactagtattcatttggcctcctgttgggtctccaatgctctccttcgtcatctctgctcgtaaggtatgcttagcctgaaagtcctctgcccaccttatagctgattaacagtgtgagtttgaattgacgactctattaatagactgggaatcacctttgctggctaggttaaggtttcatcgttgcctcccaaagataggtatatcggacccagggcaggcttgttcaatgtgtcagttttctctgttctgctccctgttgttatcttctgactctccggatggttaccatttttaaatcattcaagcaagtgtgtcatgttttaaacaacacgtcagaggtggtcttatagaacatgtagcaagttagacaattttcctttatttccagtatcctaagacaaccattatcgatggacattttttcccaatgtttgtaattttaattaaaaatttggattatgaaaggtttcacacatccaaaaaagtaatataacacggccatgtaccctccccgagtttaacagatgttgacatttccccacatttgcctcactcctctgtttttaaaacagatattactcaagcatctttcctttccttctccagaggaaatcatcctgaagctagtgtgtatatatcatccccatgcatgtccttacacattttctactatatttgtagaaatattgtttggttgtttcagaatagtatctgctgaatatactatttcgttcttacaattaactatgtgtttgttttaaaacttctatttttctgagataggtctcactctcttgcctaggctggaatgcagtggcacgatctcggttcactgaagcctcgacctcccaggcctaagcgaccctcccatctcagcctcctgagtagctgagaccacaggcacctgccaccacacccagctattttccagctctttttgttgttgttgttgtttgtctgtttgtagagacagggtcccactatgttgccaggctggttttgaactcctaggctcaagcagtcctctcactttggcctcccaaagtgctgggattacaggcgtgagccaccacagccagcatagaagaaaaaactcaaaatagtgaaaagcatgttccagactccacatgatcatctaggactgtgtggaggttccagttttctgcccctgatcccaccccctctcaccctcaatggtttctgagaaaacttgactatcaggtgtgcagggcatacttacaggaaaacaagatttagctatggctctgatgcaataaacatttaaaaccttaacctggccaggcaaggtggctcatgcctataatcccagcacttcgggaggccaaggcaggaggatcacttgaggtcaggagtttgagaccagcctgaccaacatggagaaaaccggtctctactaaaaatacaaaaattagatgggtgtgggccagacacggtcactcatgcctgtaatcccagcactttgggaggctgaggcgggcagatcacctgaggtcgggagttcgagaccagcctgaccaacatggagaaacctagtctgtactaaaaatacaaaagattagccggacatggtggtgcatgcctataatcccagctactcaggaggctgaggcaggagaatcacttgaacccaggaggcggaggttgtcgtgagccaagatcacaccattgcactccagcctggacaacaagagcaaaactctgtctcaaaaataaaaaaaaataaaaataaaaaaatttggccagtgtgt

SEQ ID NO: 585548 - DNA, 4001 bp, Homo sapiens
cttccaactccatgtgtatcaggtgggaaattctcctgatttcctcaccctggttgcaatcctcctgcaatcctccctgcttaagattgggaatggactgataggcctctctgttttgtgttgtctggagagatttgtcaggttattgatgttacttttttaattcattccttgaaagtgatggagctatgctaaatacaattgatcaagttgcttatttttctgccttttctgttaattgaaagtacttaagtttaataaaaatgcaatgtggattttacagagataagacagtttctgttccagcagaatgtttgcccattttattctctgctctattcccagcaacttaaaacagtggcaaagagtgggcgctcaatatatatttatgttgaaaagagatggggactcatttataagaaacagaatttaaactagtaaaacactaacaacaataaagacaaagacccagggaatcactttacagcagaatttggttgaatcacatgagttccttttgcctcaagtactgaccatagagggatatcaagtattttctaatgagttttgctactttcaggaggttaaatgaaattcttagccagtaataaatagatgagagagggagaaaaagagagaaagggaggaagggaagaagggtggaagagaaagatagaaacaaagagaaaagagagagagagcaagtttgacccaacatctgaaaaaattaaaggcaaacaaacctaaagacataacccaccttcacactggtcacccaaagttaaaacaacaattttaaatttaagaaaagtatggtttcttttcttaaatttaaataggtggttaaattaaatcctaactgtctagattagtgctatccagtataaatgtaatgtaagccagaaatgcgagccacatatggattctaaaattttctggtagccacattaaacaaagtaaaaatttacaaagtaaaaatttaatttataaatttaaaatttacagtaaattaattttaataatatattttatttagcttaacatacctaaaatgttgtatgttcaacatgtatttaatttttaaaaattattaatgagatattttataccactttttgttgtactgagccttcagtatctggtgagtatttacactacagcaactttcaatttggaaaagccacatgtggctactgaatgaatgagatcatgcagtctagaagcaggtgcaccctttcgtcaattatgcacaaaaatcttttgaccccggactttcttccatttatcaccaacacatttttcaactgtcaccaaaatggcttagctattttgatgcgactttacttttaggtgaagtaaactcagtgtttctgccattactatagtactatagcacaatagcacaattgagttttgcacagttgtgagaacaggagactgacctagattatttttaaggcccattctcaacctaaaacttatgattatgtcaaaaacattatttaaaaagcactctgtttaaataaaatatcattatcattaattttggtattcagaaagtaaatctactcccaaagtaaccaaaatgaaatggataaataattttgctgtaagagttcttggattatcaatggaattttattcctaataataatgataataaagagtcatttctaggaaacatttattgaatgccataatgccattccatcttctgcctttccccactcttcgcctccactaaactatccacttaagtatcagaatcctttcacaaaattaacatatcagcccatgaattttctaaatgcagcctttgcacagaagaattaaggaagcttaccaattattgttaggtaaaagccagccactaaatccgcttcccaagaaagtttggaagcaaaaggatccccatctcgaaggtaatggggcaggcgctcgtcctgaggcagggcagtgtgatttaacgccattctgttctcgaaccacgagggatctgaaaagcaaaccagtagagatctcagcagacctgaataagccagcttgaaccatttcataatcgtggctcctgttttaaaacaaaaagcaagttcccagggtcatgcatgattctctaattaataactggtaaaaattttaacatttttttcaatgatccaattatgtcattactcagttattcggttggcagattatccaagccttcattttctcctctgttttctcatgctactctttgagccacttcttttctccttggggtgattaaaaggttgaaggccaaactgtgcaatttactgtttcttagcaatttttgtaaaggtctgagcaggaaatgatattgtatggagtgtgcacacatacacacacacacactatatatatataatttatgtatataaattatatataatatataaaaaatttacatatgtatatatataacttgtcagaatatagtattttttgattatccagatttcccagaaaatcatttccattgtacattcaatgaggtttagagttttgtaaggaaagaaatagagcattcagtacaaaggaacatggacacttaattaattgaagctaagagctaggtgattgtcaaagtgatcttgaaatttggagctatttagaaaggattcaagctgggttgtaactcacaggcacatccacaggaaggtttgtttctcaagtttcctagagcagaaagcaatttcattatttctcaccactgccccaaatccatactttctatttgctcatttatgcttctggatgaaatcttgagcattgaggaatttctcagatacacaggtcttagtactgtttcttttgaattggagttttaaaaggtttacacaaagtctttgatgggctttctgcaaaaataaaagtcacatgatatccctcatcctgaaacttggagtcgtgtgttgttcttcagataaagtatgctgctgatgttaaaacttcctttggaagggtcattcctttgtcatgattgttcctatttgttttgaaaggggaagaaatactagtgtggctgtttctcttttgaacttgcctatttcaaatcgaaccaacagatgtcactgttcagctctctaggcaacaatttcgggcattatatgagacagcaagtggaacacagagttgtgtgccccacaggcggtgacagggtgatcggcacatatctaaccatgtaattcaccttcgcaaaagacatgaatttaacccctttctaactgccaacttacagcttacagaggaaggctagtgaccctttcagtggccagttggctgaaactacagtctcctacacacagtttgaggacagtcatgtgctaatgttcattccaaatccttctccctgagatggttagaaagctgtaggagaaatctttggctgccagatgcaccacatcccaagacctaccccaggtgaaagtttatctttacctttcaaactcctgattcccctttgactgcctcttgttctggtaaactctctcctccccaaagattgcccccgcccaactggctgtccagtcctgtcctccaccttagcttcagaatcataagatgaaggttggagtccagctgtgatacccaccctctgatcttgagcaaatcatttaaactttctgaactgcaaccacttcatctgtaaaatgggcagtctccttcttacctgtcactcatgcttgttgtaggagcaataggatatcggactcgaaagcatattatgaatggggggtcctgtatatttattatatgctgagatgcttacttttcccaaacttgcctatccatcaagatatagctattgtataagagatttcctcagggtcccatgctgaatcaatggatgcttgtgtgttaactcaagtattcactgaacatctactacaaacccagcattatgaggtaggacaacagaggtttaccatgttatctagacttagggagggtatctatcattttctggacagagaaaa

SEQ ID NO: 585549 - DNA, 4001 bp, Homo sapiens
gagcaattcttaaatgatttaagagctccgctgaaacctgcaatacttgctgaataggtgaaacaaacattgtaactaaatatgaaaatgccatgttccctatatacacatacccctggttaaaaaaaaaaaccctcgaattaggaactattttaaagtgttaaaatatttatcttctttaacaaaaacagatatatggcatttcacattcacatgtagtatttgaatatacacatcaacaccaacacaatcaatatcaatctcagtcaatactgagagcttccacactctgccaaatataccgggaacatctgggtaaacagaaagtggactacaactcttttgaattaattttacttgataagaacactttgtctagagcacccatcacaacttcctgtataagagtttctgcagtttctaatgtggaattatgatgcttttggtcactcctaattagctccaacttgtgaaggcaatgaaatacagccatgtcctgcggttctcctgaaccaacctacccattccagatgcagtttgtgacttaggcgatctgaagctactaacggcaaactggtctaggcaacacatttgtcatgtttgttataacagaggaaaactgtcatggagagatgctaggaaaacttcctctacctagtgttgcctcaggatgaaaggaagagttgggtaagggctgctatggcaggggagaagaaagggtggggttgtggtacagggaagtactaaaccagcaggagtaggaaagttgccaaggtccatctcaaaacaattgagaagacttgagactgctccccccgccacacacacacacaccggccccaaccaaatttgggaaagctaactagaatttctctcccattattcacaacttactctttccatagctcctgcagagggactgagtgtaggactctgccaagagccctctttgctcagtataaggaagcgctccaagtctatgctatagcttccctccgccccccacccctagacatttgtagcttttaccaaagcaacttctctgctcctgaaattttgaattctttctttatcagttgaagaaaaaacagaaaagtaggttttctcatagaaataacaatcactgtccgtggtctcctccagagtccccccagtttacctcccctctttcatcctcccgcccaacattgagccttgggagttaggtgtctctttgtacccccttaagccgctgaaccctccgctcggagccctggcgctttccttacctgacaatcacatacatgaccaggaagtttccgaagagccccaccacgcacacgatggagtagagggccatgatcgtgatggccgtgatcatggagggactgccggtcggagggcacaggctgtctctcccgcccaggtcggtgcggttcggaccgcatgggtcggacaggttgccatctaagtgggacaagttgacccaggaaccggggctgggtgctggggagcaacttgagtacgccaaggcatcagtgcaattgctggcgttcgtgggggcagcgctgctgtccatggtactgacggccgggcgggcaccgctgtgcgaggtagccaggagcaccgagacttttcgggttccaagcgcctcagccgcttcctttcgccgctgccacagctcctgctgtttcttacagaaaccagtcctggctgagacagagaggagcgtcaggcggaggggaccgagctgagcatctgacattctcctctgcgtatagccccctcccaccttagtagttcacagaggctcatcacctgccccgcaccgctgcaggaggggagcgtgggccatgcgggattcggaggctggaagggagggaggagggaaaaggggtggattttgcgcaaagcgatccaaggagtaggtctcttcactgggcactcttctgtgcaaacacatctaaaggagggagatggagagaagggttggggagagagatagagttagtctttggtagcagtgaaaaataagaaagggggctaacatcactcaattttccagcgcctttttctccttaaaatctggcagggaatacattggcttgatgaaaccctaacagccctaaaaccccaatgctcttccatccctactgccaattttgattatttaggaatgggggacacacaattttcttttgcagtccttgttgcctccgttgccaacatctaagaaaaggtaataatgtttctccaattttcttccctacaaacctgttgggaacaacagcgatcctttattttctgaaaaagaaatgagaaacaaataaacttttgtgcagaaaacctgttcctcattttccccaatttctagggtgaagctctgtttgcctctgattttgtttcagtgggtaggaggcataagaagtggttacagaaatcagaaggttgtggcatccagtaaagtcaactaaagataatgttgatctttcacatcttaaatctcatagacctgtttggaattgtttatcttttttatctgaagacttcctcgatagacatatgcttctgagaagaaggttgttaaaacaaaacaaaatttgcattcagtctgttttctagtgtaaaaattctaggaaaagccacataatatatggaattagagtggcctacaacaagatccttgagaaacatggatacgtttttgaattttataccttacttctaagtccatgagtgcttctattttagaaataaatttgtaaataccaagagtaagttcttggtctttttttttctaaagttaacaccaattctgaagtaattctcatttctgtacatgtatatatctgtgcatgtacatatcttttaaccataaacattgaaaatacatgtcctcagttggtcttgaaaaattcactgcaatttcagggagcagggagggaagatcttgaaaggaacatttaattccaatattattttttggcatttatcttagaaacagataactcataggtaaactctattaatcataggctattttgccaatgttcactattatttttatcctcttacattaaagcatataatttacacaataaaatgttacagagatttcctagagactaacaaaaataccttaaaacatattcttccatgaactaatgtaacaattctcttatattgagctgaaatctgtctgcctgcattcagttcctttgtgcttagttcatgtggaagacaagacacagtataataattcctgaccttggagtcaatcattttataaatcagctttgtaactttgtagctgtatgagtttggacatgttactttaccctacaggatgacagtcttctcattacttaaaaaaggcgagggtaggctaataatattcacctcatatgtctgttagcaggattaaatgagtatacattgcaatagtaattgcttaataagtgataactccttaccactatatttcatatatttgaaatcaactgagttttctcttttgcaagttaaacattagcatcattcagttgtttcttataagatgtagttctgagtcctttcagtggccttgctgttcatctattctcattatagtttgtctatctgctctgaaactacagttccagtgttaaaaataatgacctaaatttgccctgaccaaaaaacaaacaacaacaaaaaaagaaactaagccagattataaactttgtctttctaccagtacaatgaaagtcccttttttttttttttagttttattttttggtcacgttgttctcttgactctccttaggtttaccaatgacaaaatttcctaaacacaatccaagccagttccacaaatactaaagatctgctttggaccaggtgctgtgataggagctggagtttaaaaagatggatacaatagtgtttgattacggaaactttcttcttatgcctggtgaatcatatgtttcatctcctataaatttatagttgctttggagggagctcagtacaacacta

SEQ ID NO: 585550 - DNA, 4001 bp, Homo sapiens
tcataactgcaaaattaaacttggtttttaatcttcaatgtgaatcattgtattgaattacttaaagtaaatgtttttaaaaataaatacttccatcgatcttcttgcatttttccttctgttgttagccttcctctcaatagatggtgctcttttcttacagacaatacttatcttattcctcatcaaaagatcagggaaattagctttactctttaaaaatcattaattaaagaaatcagacagatgagtagaaagaattgcttataagcaatttgcagcacctgggtaatgaaagcatactggagagagcaattcttaaatgatttaagagctccgctgaaacctgcaatacttgctgaataggtgaaacaaacattgtaactaaatatgaaaatgccatgttccctatatacacatacccctggttaaaaaaaaaaaccctcgaattaggaactattttaaagtgttaaaatatttatcttctttaacaaaaacagatatatggcatttcacattcacatgtagtatttgaatatacacatcaacaccaacacaatcaatatcaatctcagtcaatactgagagcttccacactctgccaaatataccgggaacatctgggtaaacagaaagtggactacaactcttttgaattaattttacttgataagaacactttgtctagagcacccatcacaacttcctgtataagagtttctgcagtttctaatgtggaattatgatgcttttggtcactcctaattagctccaacttgtgaaggcaatgaaatacagccatgtcctgcggttctcctgaaccaacctacccattccagatgcagtttgtgacttaggcgatctgaagctactaacggcaaactggtctaggcaacacatttgtcatgtttgttataacagaggaaaactgtcatggagagatgctaggaaaacttcctctacctagtgttgcctcaggatgaaaggaagagttgggtaagggctgctatggcaggggagaagaaagggtggggttgtggtacagggaagtactaaaccagcaggagtaggaaagttgccaaggtccatctcaaaacaattgagaagacttgagactgctccccccgccacacacacacacaccggccccaaccaaatttgggaaagctaactagaatttctctcccattattcacaacttactctttccatagctcctgcagagggactgagtgtaggactctgccaagagccctctttgctcagtataaggaagcgctccaagtctatgctatagcttccctccgccccccacccctagacatttgtagcttttaccaaagcaacttctctgctcctgaaattttgaattctttctttatcagttgaagaaaaaacagaaaagtaggttttctcatagaaataacaatcactgtccgtggtctcctccagagtccccccagtttacctcccctctttcatcctcccgcccaacattgagccttgggagttaggtgtctctttgtacccccttaagccgctgaaccctccgctcggagccctggcgctttccttacctgacaatcacatacatgaccaggaagtttccgaagagccccaccacgcacacgatggagtagagggccatgatcgtgatggccgtgatcatggagggactgccggtcggagggcacaggctgtctctcccgcccaggtcggtgcggttcggaccgcatgggtcggacaggttgccatctaagtgggacaagttgacccaggaaccggggctgggtgctggggagcaacttgagtacgccaaggcatcagtgcaattgctggcgttcgtgggggcagcgctgctgtccatggtactgacggccgggcgggcaccgctgtgcgaggtagccaggagcaccgagacttttcgggttccaagcgcctcagccgcttcctttcgccgctgccacagctcctgctgtttcttacagaaaccagtcctggctgagacagagaggagcgtcaggcggaggggaccgagctgagcatctgacattctcctctgcgtatagccccctcccaccttagtagttcacagaggctcatcacctgccccgcaccgctgcaggaggggagcgtgggccatgcgggattcggaggctggaagggagggaggagggaaaaggggtggattttgcgcaaagcgatccaaggagtaggtctcttcactgggcactcttctgtgcaaacacatctaaaggagggagatggagagaagggttggggagagagatagagttagtctttggtagcagtgaaaaataagaaagggggctaacatcactcaattttccagcgcctttttctccttaaaatctggcagggaatacattggcttgatgaaaccctaacagccctaaaaccccaatgctcttccatccctactgccaattttgattatttaggaatgggggacacacaattttcttttgcagtccttgttgcctccgttgccaacatctaagaaaaggtaataatgtttctccaattttcttccctacaaacctgttgggaacaacagcgatcctttattttctgaaaaagaaatgagaaacaaataaacttttgtgcagaaaacctgttcctcattttccccaatttctagggtgaagctctgtttgcctctgattttgtttcagtgggtaggaggcataagaagtggttacagaaatcagaaggttgtggcatccagtaaagtcaactaaagataatgttgatctttcacatcttaaatctcatagacctgtttggaattgtttatcttttttatctgaagacttcctcgatagacatatgcttctgagaagaaggttgttaaaacaaaacaaaatttgcattcagtctgttttctagtgtaaaaattctaggaaaagccacataatatatggaattagagtggcctacaacaagatccttgagaaacatggatacgtttttgaattttataccttacttctaagtccatgagtgcttctattttagaaataaatttgtaaataccaagagtaagttcttggtctttttttttctaaagttaacaccaattctgaagtaattctcatttctgtacatgtatatatctgtgcatgtacatatcttttaaccataaacattgaaaatacatgtcctcagttggtcttgaaaaattcactgcaatttcagggagcagggagggaagatcttgaaaggaacatttaattccaatattattttttggcatttatcttagaaacagataactcataggtaaactctattaatcataggctattttgccaatgttcactattatttttatcctcttacattaaagcatataatttacacaataaaatgttacagagatttcctagagactaacaaaaataccttaaaacatattcttccatgaactaatgtaacaattctcttatattgagctgaaatctgtctgcctgcattcagttcctttgtgcttagttcatgtggaagacaagacacagtataataattcctgaccttggagtcaatcattttataaatcagctttgtaactttgtagctgtatgagtttggacatgttactttaccctacaggatgacagtcttctcattacttaaaaaaggcgagggtaggctaataatattcacctcatatgtctgttagcaggattaaatgagtatacattgcaatagtaattgcttaataagtgataactccttaccactatatttcatatatttgaaatcaactgagttttctcttttgcaagttaaacattagcatcattcagttgtttcttataagatgtagttctgagtcctttcagtggccttgctgttcatctattctcattatagtttgtctatctgctctgaaactacagttccagtgttaaaaataatgacctaaatttgccctgaccaaaaaacaaacaacaacaaaaaaagaaactaagccagat

SEQ ID NO: 585551 - DNA, 4001 bp, Homo sapiens
acctaagagggctcggaaaatagaatgacaccataaaggccactgttttgccaaaagtgggaactacaaaaatttgtatattcagcttaagtgtgcccaatagatcttaaaggaaggaaatacatatatctattcatgatccagaacaaaagttgatgatccatttactgctactttctgaggattaaaaattcttaataatttaaacattgtggaaagtttctattataacagtgattagaaaactaatgtttatttctactgagctttacttgcttgagattatttcagaaatttgtcaactattaaaacacagctattaaaaatcgtagcttgttacacttctattatttagcccatagttatgtccaaaccttttgttcagtccaaaccttttgctgaagcaacaatgattgtaaatactcaattccattggtgttattgatttagtctcatcatataactgctaaaaatgcaattaaggaagatatttcagtttttacatttggaagtggaagtccaataacttaaattatttagttgacagttgaagtattgcttgaattcattggaaagtagactcacgttgactctcaaagtatcaccctttttatttctgaatgaatcttttttcataatgttaaatccaagttccctgcaaacattgatgtgacataattttaatagtaccatctgtattagttgtccatctgtgaaataaataaataaatgggcctattttgtgctcattctaatggctgtcaaagatgacttctttttgaaaagaggaaatgttctaaaatagtctacacacaaataaagtggaaaactgtgacatcattttgaaagttgttgtggtcggaataatttttactttttcttgaacattcatgtaattgaaaaatatgtattttttcaactaaaattacttgggcttaaattctttgtatgagcattgtgttgaatacacatgcatataggtgtacaaagataattatgcattcttaaagcagtttatgtttacactaaaaaataccacttttgtgaaactttttaatctgtcagagcttttcttctctttgctattggctgatttttgtaaatattaatttccttagctgggagtcctagatttctctataagttgtccaaactgccaactgtctgataaagttaagaagtcaccataggaactccgaaataatttctataaaaccataatttggcataaaaatcacttactctatggccactgtgagaaaacacagacatgcacacacacactttatcatttaacccacaaaattgttaactactatttttgtgcttggtattccttatttcctgctcttacatcacagggacaaggtagaatgtatagcatttaagagatgagtgtcaagcagcccttactcctcctcttccagcaaatgcaatgaaaaggatttcttcaacaaaataaatgagctgtaccctaccctggaccatgctatttcagcattgtgccttgtgctgcttctcctgccacagtgtgagaggatatcagagttctgtgctccaggtttccaggaaacattttgatgggatgtaagggctggtccttctcatagaattacatttattgcatgtagcaaccacaagaacaaggggctgcaattacaggaaaagcaggagcccttttctatcatctcagagcagcccagttctgccacatccacttgaccgaattctcttgtttgtaggagaaaggggcaattcatgcaggcaaagtcatgtccacacactgaatccagaagcctgtctgacccggctgctttttcatgcttgctttcctatcttccagtgagttttcaggatgcaaacttagtgcaggcatacaatattgtgacagatcacacttcctttgagctcagaggagtattttcttccaaatgaacctggagggcttcccagctttggtgctgatggatttagccctcatcattttctttacaggaagacaaacaaagagttattggtgggaaggaaatcttgaacaacaagtaaatacatatgcagtgttgagccaaagacaattttgtttttggatgggatgattttgaaattaaaattctagttgcctctattcagatacaagatcaaaactggtttagggtgatttgactgagaaacatctctgctgactaaagtaactactaatactctattaaaagggtgacctttccaaatagagagaccatttttttcttaagagaagataatatactaacacttgtcatttatgaaggtctatggtccaggcactgtttaaattcatttaatccccacaacaatgctgtgtagtaggcattttctttatcctcattttataggttggaaactggaatagaatataaaaataacttgcacaagtttacagagttagtaggaagtaaaattgaacatcaattgcgtagtctgcttcctagcctatgtttctaaccattttcctctactgttgctcattacaatatatcttcagcattggctttggtgatggacaagctggccttcgaccctggatctgacacttcccagctaacttccacaaatctgtttcctcatcgtaaatttaagataatagagtcaacctcactgtgtttagaaaaaatgaatagaatatgctcgggacacttacttgggtggaaactcttcaattaaaaattagtccctttacttaaattttacatgttgtcaaattaaataccaaaacaagtttctcggctgtctccttgcagtgagatgcccttcccattccctcatctaagcttatttatctgtcctttgattatctatatgtctctcacatgtgggagaagaactaaagaattttcatatttgctgaaaatatcctgcaagtttggctgttttttcttttttcagtgaaattataagataacctcattttgaagtgacatctgaggtcaagctctctgcttttgttctggtagcgcttggttttatatggacagtgagaaaatgttttcatagtgacctacatgacaggaattactgcaattttataaggatctgtatcacagaccattatttcttgttaaatagaaaggatattttattcagggtttgttttggtgagaaacgtgagaaaatatatgtaagcacattagaaaaccatctatatttataaattgcctcctttatcccgtgtctccttctatttaccacttcatgtatttccttcaaactcatttcttccaagttgtcactcattcaatctcgacttcctcacttcctatcacttttcaacctatttaacctagttttcactttcattgttccatagaaatggctcttgacaagatcactctcgacttttcttctgataaaacaaattgacccagctctttcctcaacctactcattttctctttcttttctttaatttttgtgggtacatagtaggtgtacatacttatggggtacatgagatactttgatagacatgtaatacgtaataatcacatcatagtaaatgatgtgtccattgccacaagcatttatcctttgtgttacaatcaaattatattcttttagttattttaaaatgtacaattaaattattaaccatagtcaccctgctgtgctatcaaatactagtttttattcattctatgttttgtacccattaaccatctccacttccccctacccaccccctactaaccttcccagcctctggtaatcatccttttattctctattcccatgagttcaatcattgtaattttaagctcccacaaatatgcaagaatctgtgaagtttgtctttctgtgtctggcttatttcatttagcataatgacatccagttgcatccatagtgttgaaaatgacaggatgttattatttttttatggctgaatagtactccattgtgtgcatataccacattatctttatccattcatctgatgatggacacttaggttgcttctaaatctt

SEQ ID NO: 585552 - DNA, 4001 bp, Homo sapiens
aatggcaaagttcaataattgcaacagagatcagatgacatgcaaagcctaagttatttactatcttgcactttacagaaaaaaatgtcaacctctgatgaagataatgacatcaattgctcccaaaagtgtctttgtgtagctctttaatctttcctgtttgcccctccctgtcctcatatccaaccctcactattcctcaggcaattgctgatcttggtttgctttctgttcttatagattagtttgcatttcctagaagatgcaaatagaatcattcagtatgtactctttttttgtgctgcttctttcactcagtgtcattattttgagattcatctatgtggttgcatataacaagaattaattccttgttattgacaagtagtattacttatgcattcatctgtttttttttttaatccattcacctattaatgggaactgagttgcatacaacttttggatgttacaaatgaactgttacgaacattcatgtgcaagtctttatataaacatatgcttttcttcctcctgggtaagtatctaggagtgttatatgttttcaaggcctgcagaaattagaaatatgatagtagaatataagcaggtacacttgcaataatacattatatctgatggcagaagtataccttgtaaacattggacatcattttttttttaacattccacatatatttaccttaatttagtaatagtacctcagtttcactctgggaaccactcatttcccgttctcagtccaggtgctttgggataggctgtattaccagtccagggcgtgaagacgtttagtgaccggggccatggtgaatggcaaggatgctctcatgttccaaccagagccagtgagagtttattttgagacttatggacaaagagtgtattagttttcctgcaggacccacacctgagaagacgcatggtatgtagttgctggaggagcttgtctgaaaatggacctaatccggaggatgtggatttgagagcgtgagagagaaccccacacctgaagccaggccctccttgggcttctgatttacacggtgccatcaattccttttaaatgttagcttgtgtttactgtttttccgtcacacgaggttgagtctaactcattcagcccaagacagctgttggttggaggccctttgtttaggactgaattcagtgtccaggaaagtgttttggtttcaataacatcaggaaagtgatttcataaatctcctcagggtcaataggacagctttgttactgaagctttaaaattctgatacctgatctggtctgcaatacttgcagaagctgcattactgccagaaaagctccacattttcagacttgggggcttttttttggacttactttgggagtttcactttcttaatggattttaaagaaaaagatagagccatttaacttgaggagagaaaataatttgcttttagtttggactttaaatatggcaaatataaaaaggataatgtagacaaatactccaaagtacaaaaaccaacaaaaaagcaaaattaaaactgtggttttaagatttagaataattgaccttggtgctcaagaagttgaaacattttttatttttttaataagaagaagtttctccccaaaagagaaaataacttttgctagattcaccgttggttatagacctgcatgatctaaagacatgcttcattgcatttgccactttcctacccagcagaccttacatttcgtggcttatctttaatggtgttttatgttaagtaattggtttctttacagtcagttttctgactcatcatacttccaacctttccttcaggcttattttagcactaagtatttccaatgtatgtttattttaattaaaaaaaatcatttccttctccagagtgaggtgtttgtggaaaaaaaaattatgtcagggttcaacatggtgaaaggaaacgtggttatgcatagttaattagcatgctagccattccacaatgtgtatacatttcaaaacatcatgttgtatatggtaaatatacataattttatcatcaatttaccaaaaaaaagtgaatatttatctataaaaattctttcaacgggcattttataggaatgatgctgtttaatttttctcaatttatttaaaaagtcttcctctaaagatagccagcattcttaccccagttactcatgctttggatcacagcaacatataaaagggggctcaacgatcttctaaatatgtgaaagaaaattatacaaagctaaaggattaagaattccaattgcctccagcatatacccaaaggctttaatctgaagagatggtctaatcagaaaaggagtaatgtgggctgggcctggtggctcaagcctataatcccagcactttgggaggctgaggtgaatggatcacttgagggcaggggaaggagaccagcctggtcaaccctgtctctactaaaattagaaaaattagctgggggtggtggcaggcacctgcaatcccagctacttgggaggctgaggcaggagaatcgtaccactgcattccagcctgagcaacagagagagacactgtctcaaaaaaaaaaaaaaaaagggcaagctttcattctgttctgatgtggtggcatgaatgttgtcccagcaaagttcaatgaatgctcagagtcacatcatgggccttgcacaggagcataggactcagagttagcaaactagcaaaagaaatgacctgcaggaagaattatctttgccattcagtttacctgagtgggtccgagtagaactcctggctattaaaacacaagcctttttccttactccatgcctactgctttgtactgtgctgtgaatgtgttctgtggcaaaatgggcaaagagagactcatctggactcacaggccatcctgatattgacccttcctatggtagccactgaactccatcttctgctcgaagcagtggcccaagctatttctttctaattatcccattaaaatttttgtagtaggtatttctttaactttggtctagatgattaaatagctcttttgttttatgaattcaaatgaatttacaatgctattcgtttttgaaaaaaattgtgttcttctgagaaccatcgatgtttgacccattagagtgatttttatggaacttccagaagtgttggggaaaaggcattgtgaggcccatttgctggcagctcacctattcttttatgttgcatatatgacttttgtttatagatgttcttcctttcttatggttataaaataattcttatttatcttttgacctattcttcacacatttctccaactattactacttacaaaatgtgattgcttttgacctatttgtgttaagtgaagccagactaaataaattacctctgtacacctgatgggttttgtaaacttctgtttagttttgtggttaattatttgaattgtggtgatcgtgtctcagttcagaaataaaactgatcaagagagtgagaggaggaaggacacattttagaatccagcatgtgtgtgtgtgtgtgtgtgtgtgtgtgtgtgtgtttaattccacatcatggccttcatattgctcaactacctttttcataagttcacaatagagtcaatggtgatggacggaagagtttcatctcttttggggctaatttttctgccttttcattttttttaccaagtagtgtgaagaaagatacctaattcagtaagaattcaacaagccccttttatatgttcagcaatgtgcttggaaagatatatttcttgcatttgccatgacttttatgtccacttaccctcacatagaaattaacctttttagtcgagaaaaaaatcctccctagagtgtcatactttaatactcatatttaattggatcaatccaatgagataaagatactttcctacatttcaagtaattatttaggcaaagaatatggtcaaatgagtatctac

SEQ ID NO: 585553 - DNA, 4001 bp, Homo sapiens
tgctaaagtcataaattttgcatagaagtaaaggccataaaaatagttattttgaatagtttcatggatttctcattggtgtatctttatacctaaatgaatatgtacagtcaaatataaagaacacagtttatataacaaacctcttctctaacactagaaccacaatttgcttcccctcttccctccattctcatcctctataatggattaaactcctagtttagcacaaagccttataatttttatgtcatccccagtagatatacctaattctagagactgcgtacctgatgattagttctatccactgtattggccgtggaggggtggtctctagtgttctgacgaattcgagtggagttttgttgctcaatgttggaagaggttgggatacagaactctctgaagcatcgtttgaagttttcatccagaaatgcataaaggactgggttgaggcagctgtttgtgtaacctagagcaatgcagaagtgccaagaaacagtctggaacgtagtttctgggattgtaaccaaggctttaatgatgacgtaaatgtgaatgggagtccagcagacgatgaacacagccaccaccaccagcaccatcctggtgatccttcgaagattcctgtccttttctttggagccagagagcatgcggacactcttgaggcgcaagatcatcagtccatagcacacggtaatgatgagcactggcataatgaaggcgaagatgaaaacacagatcttcagcaggttttcccagtaccaggttggatgagagaatgttagtgtacaatctatggaacctagaagaaaggaatttaaaggaaaaattagcagcaacatttaattatgtcataaggtgttaatactgccattttgctcattcatttttagccttgaccagagctaacttaaggctataaagaaattgtggaagaaactcagttgtttgttacttttcaaagaaagttttacttctaatgttttttgtttttttctaaatttcccattttgcagtccacttcgatcacattaagctttcgttcagggaacaaaaatgaacctctcaacatgagctagatcctccatgaggtctatattgatataaaaaatgtaataattgtccaaagtctctaggcggctccaggtaatggatgttttcacttcattttttgatggattgttcaatattctgatattaggtgtagaaagatacatttgccatgtagtcagccacttgataattttaaacaagcctcagtgtaatactctttgggtttaagctccaattactcttgggagagctatgtactaatttacacaccatttttatgaagtaaatacagagaaatcagaaataaatagattacattctctttaaaggatttaataggcctaaaattatgaggaaaattcctatttttaagtattcaaaggctttttttgctaggaagaataattaaaattacaatgtgactaagacaatggggcactccataaatactgctttgcttatgacatcaccaacatatcaggctgtgaaccctccttccctcaggctggtaacatcactcaccttgcctgtattttgttgtagccatgaacattacaggaagaccaatggctgaagagaggatccagttgcagacattgataattttggcatttcggggagtacggaaatctaaggccttgacagggtggcagactgcaatgtatcgatcaacactcatggtgcagagggtgaatatgctggtgaacatgttatagtaatctatggagatcactatcttgcaaaggatggttccaaatggccatgttcccattaggtaattcacactctggaagggcagggtactggtggctaaggcatctgccagagcaaggttgaaaatgtagatgttggtggcagtcttcatcttggtgtatctaggagataaaggaagaagagtgagaatcagtaaaagacactagtgtaaaatataggtaagcttccaataataaatttgcatgaattagtagaaagcttttttgagattagatatagaattgttttccagtatcagcttggctatttacaatgatgtcaatgatgtacctattggctaaatagctgcaataatagcaacgatgctgctttgttgagtttcttcctttttttttttttttggataggatcttgccctgttacccaggctggagtgtaatggtatgaacagagctcactacagctttaacctcctggactcaagagatcctcttgcctcacctcctgaataactgggatcccaggtgcatgccaccataccctgttaattttaaaaaacttttgtagggacagggtcttgacatgttgcttagggtggtcttgaactcttgggctcaagcagtcctccctcctcggcctcccaaagtgtttgtgttacaggcatgagacaccacacgcagtgagggttttaatttttttttttgtaatgtgtcagtcattgtgataggtctaatagaaagagggagattccagtcaaatagtaggggcagcgactggatagtaattctaaatataaaagagaaaattttagctatataaatatagttaaaattatcaagaagtataattgtgcaagtgtctataggtatgtacacaaacacatgcacatacaaacacacaggcgattatggggcacagagatgaggcatctcacagagcataaggcaaagggaatagtaggagtaagatgtggaaggcatcctggaagtgcaagtttaatctcaaagcacaagcaggatgattgagttagacacttggtaggagcaggtcattctagacagagaggtaacagagagaaccccaacaaagatgtagagttggaatggcctgatgtgtgtgtcaagcacattctaccagggaatggcaagggatctgactggggaagaagagaggccagtacatgaagaacttgtatgccatggtaagattagactctatccaatccatgatgaggaacccaagtgtgtttgctttgtttttattttttaatgctttattgaggtggaattgacctataataaataacgcataattaaagtatacaatttgataagctttgatacgtgtgtacacctgtgaaaccaccaccataattaagatcagagattggcaaactatggtgtgtagacccaattggaccgttgcctgttttataaataaatacacctatttaaaaacccataagtgttttgatgctacaatggcaaagttcaataattgcaacagagatcagatgacatgcaaagcctaagttatttactatcttgcactttacagaaaaaaatgtcaacctctgatgaagataatgacatcaattgctcccaaaagtgtctttgtgtagctctttaatctttcctgtttgcccctccctgtcctcatatccaaccctcactattcctcaggcaattgctgatcttggtttgctttctgttcttatagattagtttgcatttcctagaagatgcaaatagaatcattcagtatgtactctttttttgtgctgcttctttcactcagtgtcattattttgagattcatctatgtggttgcatataacaagaattaattccttgttattgacaagtagtattacttatgcattcatctgtttttttttttaatccattcacctattaatgggaactgagttgcatacaacttttggatgttacaaatgaactgttacgaacattcatgtgcaagtctttatataaacatatgcttttcttcctcctgggtaagtatctaggagtgttatatgttttcaaggcctgcagaaattagaaatatgatagtagaatataagcaggtacacttgcaataatacattatatctgatggcagaagtataccttgtaaacattggacatcattttttttttaacattccacatatatttaccttaatttagtaatagtacctcagtttcactctgggaaccact

SEQ ID NO: 585554 - DNA, 4001 bp, Homo sapiens
aacagaacaaaacaaaaaacaaacagattatgtcctttgcagcaacatggatggaactggaggtcattattctaagcaaactaacacaggaacagaaaaccaaataccatatattctcacttaaaagtgggacctaacactgagtacacatgaacacaaagaaaggaacaacagataccaggacataattgagggtggaggatagaagaagggtgaggatcaataaactgcttatcaggtactatgcttattacctgggtgactaaataatcactgtgaggtgaaatttacctatataacaaacctgcacatgtacccttgaatctaaaataaaatttaaaaaaattaaggctcagagagattatatcattcacctgtgatcacttagctaactagctggaaaaaataagacttgactttaagtctgtctgacatcagaatctgttctcttaacctctgcggcatatgaatttccataagaacttaccttcattgaaacttttgtggccactccttacttcttgaggaatctgtctttagctggtagtagatttaattaggtataattatgtttgctaaggtactaaccagtagtaccacccaagaaacaaatgccttacctaggacgtacaaatgtcaaatgactttaaggatcattgttgtggctgaaaattttattaccttgctagtctgataaggataatattttgtaactttatccctggttgtcaacttgctctgcttctgaaattgatcctccatcctgggtttcttgtttcttgcaacagaaagcggaatagaatatgtatgtgttgtgagggtctgaggagcgcatttgactacggtagcttttcaaagataagtttgtctttctgacaggctggccctcccctaatgtgaagaaagaccttaagggagactctttgatccttaggtatttgggactgactcagagcactgcacagaagtcactatcgcccccttttcaaatctccataggcaccgttttctggatggttctctttagggcagctttgacctctgtgttccgcaggctgtagatgatggggttgaggatgggggtgaccacagcatagaagagggacaccagagggtcagtggccggatcgtagctggccttagggcgaatatagataaagagtgcggtgccatagaagagggagaccatgatcaggtgggaggagcaggtggagaaggccttgcggcggcccgcaacagatgggatccggaagatggtaacgaggatacgcccgtaggagcccaggatgaggccaaaggggcagaggatgaggagggctgttgccaggataatctgcagttcattaagcgaggtgtctccacataccagctgcaggacaggctggatctcacagaagaactgcgggatggtattggggccgcagaagggcaaagagaagatgaaaggggtgtggcccagccccaccagcaccccacaggcccacgccgacccagctagctgtagacacacccggtggctcagcagcagtgggtagcggaggggttcacagatggctgcatagcggtcataggccatggctgccaggaggcagcactccgtggcgccaaagaagaggaagaagaacatctggagagcacatccagagcgagagatgtggcgccggccagtaaggaggtggtgaagtagcagggggaccgtgacagacgtatagccaatctccaaggccgagagggtgcgcaggaagaagtacataggggactggagggcagcatcagtggagaccagcaccacaatgaggaaattgcctgccacggtcagcaggtagatagtgagaaagacagagaagagcaagccctggaggtcggccaggtgggagaagccgagaagaagaaactcagtcaccatggaggtgtttgcactcatcctgcctgcatacctttgactggaagacaaaagaaatggcaaggaaaaatcacaactatggaatcgtgaaatgggcaaagatgacctctctctgcatctgatcgcagcactagatctccctttctattagaatatcatggactttgaaattaggcagccttgcctggagtccatattccacccttgctcactcttgggatcctggatgagtatttgtctctctgagcctgaatccctgacttcatctcttcctgatagtgcctatcattctaaagaacatgttaaactgtctttccagttttacctgggctgaagattaagtcagtctagctcccttttcactcttttctgattttccaattcttcctgcagggctggagacagaattttccctcatagcagatctttttctccatcaacttgtctcctgtctgataagaggtgacctctcttatcacctcttgccctctagttttcttttttccagctctttctttagttaccagattcacttagtctttcttctttttctgtcattttaccataaatttcacagtgttcaaggaggagaaaaaaaatgagaaagatcctctctttttaagctcctatagcattaaacagttcaactatttagaggggtgagcatttctctagttttaaaacatgctcaggcaaaagatgacaagaacttccttaattgcttatttctgcatcttacagactttcaaacttagtcctcttacattgtaaacatgaaaatccccaaactacacacataaactccacaaattcacacactgtcaaattatatttcaaaatacaggcacagaagaatagcctaatattcccagatgccagatttatctaaagttgcaaatcatgtattctattggcattattacagataacagtaaaagtctaaatacactgaacataaaactataaacacccaaagatacacttgaatatatacacaaattcaatattccagccatattcaaggttgtgtattagaaatacaagtccacacactgatatccttttgcagttgaagagcccttggttcattctcctctgggggctctttcagtgttttccagaagatattatctcaaaggtgtctttctattttctatttggagaaataaccagtgaaggcagatggcatttgtgacttgcttatcttcttttttatctacatagtggatccctcttgaggaagcctctcttaggtttgttgtctctctttaagctctctgaggatctgagtctccaagcattcttggctttccaatggggagaatgcttcacaaaaccaattaatctgttattttgaatctgtttcttagattgcaagaaatacagaatgacctgttaagaacatttcaaagaatatatccagagctattggtttctcttagttctcccatatctctggttcaaccattttaattttcttcttttttctcatgattttttcccatcactgtagatgttctagtacatctacaaaaagtaataatgcaattttacccttcttatgtatattgatataatccagtaatcaatttatttgataactatttatagggtcccttgcaggttttattgattctacaggtaactaataatataaaagagaaataaacatgttttgacctaattgaggtgctaaatgtcattttcttatacaattgtcactaatttttcttgctttgatttctttttcatttattatacaaatctttctttgcatttttatcattggtatctattatttgatttgtttcttctgtgtttttatacattttcatagatgtgataaaagctgtgtgtcaaatagaatgttttcaagacataccaaccattataacaagccccaactccaacgggtttaagtaataaatttacttattaatttatataactagaagttcagggtttacataaactggatttcgtacttagttttcttctgactcctttatattttatcatttcatttatttattagatttggctgaaagtaatggaaatgccaatggctcaaagagaatgaaaatttatctctcactta

SEQ ID NO: 585555 - DNA, 4001 bp, Homo sapiens
cactgtgctcttctcttttatgtatgtttgaaatgttctacaagaaaagaagtttaaaagaaaaggaattcagctttagatttttaaaaacacatatccttagatcttgcaatttaggtgctaaaagtttattacaggaaaatccagatgtaaacaatgtacagtaaaagaatagaatacaactaaaaattcccaaaatagaataacaaatcatgtttagccatacgatgaagcccagaagaataaagaaatagatgcttgttaatagaaaaagttgttcgtgacacagtgttcagtggaaaaccagattacaaactccatgatccaacttgtatgtataaatataaatacacatagaaagaaatttttaaatgtcatacaacaataatataaaaaacaatatttctaggtttattttggtattgctgtattatttttaaatatttatgacatatttaataaagaactaatcaaagtttaaataattttgattatttgacatggatggaattggaggctactatccttcgcaaactaacacaggaacagaaaatcaaataccgtatgtcttcactcataagtgggagctaaattatgaaaacatatggatacatagaggggaacaacacactgaatcctacttgagggtggaggttgggaggagggagaagatcaggaaaaatgattaatgagtactaggcttaatacctgggtgatgaaataatctgtacagtaaacccccatgacacaagtttacctatgtaacaaacctgcacatgtacccttgaacttaaaataaaagttaaaaaattgttgccctatcattttcatttttagtataactgcagaagagttcaaagagaatggtcgaataagacaaagttactcctctccaacccatcctggaagagtccccagtggaggtgtccgaagtccaaaataacatcttcattactctccttcaatcaagtgtttcagtttgtttgatacagagaatcttccgaagtgcctgatgcacctccttgttcctcatggtatagatcacaggattgaagagaggggtgaccacagtgtagagcagggagaagaccttggagaggagctgggaatggacagcagagggtgcaacataaaagatcatgagcgttccatagaatgtggtcactacagctaggtgggaggagcatgtggagaaagcccttctcctgcttgccccagcaggaactctcagcactgccaccacaattctggcataagatgtcagaatcagtccaaaaggaatagtgaggcagaacacagacagaatgagagttgtcacctgagccactctgggatccgagcaagccaggcccacgaaaagcataaagtcacagtaaaactggtcaatgtggttggggccacagaacctcagctgggccaccagggccacaaccagtccatctaccacaaatccagagagccaggttgtgaccaccagccccatgtaccgtctgggccccatcaggagtgggtagtggagtgggtagcaaattgccaggtagcggtcatatgccatgacagccagcagtaagcattcagctgtggctagagagccgaagataaagaactggagcaagcaaccagccacagagatagttgcttcttgcaggaagccctccagcatttttggcatcactgcggaggtgtagagaatatccaggaaggacagattcgccaagaaaatatacatgggtttgtggagcctctgggagctaaccactgctacaataatcagcatattccctatgatgatgaagacatagacagcagtgaatacaataaaaaacaagaaatgcagttcagggatgtcatagaagccaaggaggacaaattcagtaatagtttcgtttcctgtggagacaatttccatgtcgatcgtccaagtttctgcttggcaataattgggggagaaattttagcatgtctctgcatcttctataccaagcctaacgttattagagctaaaacaaaacaaaacaaaaaagacaaaaatgagtctctaaaacaagactcgctcacgcaagtcttcaactatcccccttcttagttgtcattccttcctcaactctcatccttccctgccttccttaattgtgcatattctttaacgctcagaagagtttatccaaactcataattttagtctttcaaagacctttaccccattaattcaatctactacctctttcgcataatcacctctatcattcttatctgtatagtcagccatagcctccttcttgtgcaccagtataatattctccaaatgtgtgctatatagacatggcccacaactgcaaactcttctatctttctcaatcacaaccaattcctctatgagtggtttgagaattctgtctaatccccatggtcactatctcattcttctcattatctcaaccgcccctttcattccccatctcctaatcagtgataccttaccaactgttcctcggataattcttatatattcttcacttattgccttccttaaatagtagtttcatcaagtcattcaggagttggtagtgaaaatgtggtaaatggtaatagggaaggaagtaggtgccatgggagcagagaaggaccaaacccagcctggggttgtggggcagaaggtgtgggatcaaggtcggggaaggctttctgaagatagaagcaagtaggctaagttttgagggccaattaagagttggccaggaggccgggcttggtggctcacgcctgtaatcccagcactttgggaggctgaggcgggtggatcacgaggtcaggagatcgagaccatcctgactaacacagtgaaactccgtctctactaaaaatacaaaaaaaattagccgggcgtggtggcgggcgcctgtagtcccagctactcgggatgccgaggcagaagaatggcgtgaactcaggaggcggagcttgcagtaagccgatatcgcgccactgcaccccagcctgggcaatagaacgaaactccatctcaaaaaaaaaaaaaaaaaaaaaaaaaaaaagagttggccaggcaaaagacaggaaaccagaccaggcagggcatccctggcaggaaagcatatgcaaaagcaaagagttgtaattgagcatgacacttctaaatatctgaaaatggctctgtcatacctgctggaaggttttcatatgctattcaaagcaatatgtgtttattaactgaagacaatgagagagaatacagggaatgattagaaacagttgagaaaggtagagaaaaaaagcagatatcatataaataaatataaatacataatactaacagtgttactttctagaatatgggattaataaatatacattatatttattatcacaaaaaatgtaagttatctttaatacaaatagtctagaacatcagtttcctaagaggtgaaaaactggatgcctcagggaccacagtgctgggagccttcacggcacactgttttgtagttttgcctaagaccaaatctgccttttgaatggaatcccattttccatacctctgctcattgctaacgttaaatcctcgaagacccagcttaagaacttatctctaccaagaatcccccttgactaatagagccctttatttctctcccaatcatgtactaaggatctagtgtatagaagatattacatctgtttctgaggatagtgggccaaacaaaactggtccatactcttaaggagtttacactcttgtgtgacagatggacatatcaacagaaaattgcaatacgccaaaagacagttaatgaattcaacctgaaagaaatagtactaggaggaagtgatgctgaactgatgagtgattgcagtggaaaatggaaagaatggaggtgagggcattttaggtaaaaggaaaaccatgagtacacactgaggcaagaaacaacattggatgtgaggaggagaaagaggtagcagggggtaagtagccaagggta

SEQ ID NO: 585556 - DNA, 4001 bp, Homo sapiens
acaataacgatatctcttgacctaacatttccatgtctggaagtttgtcctacaaatagacttgcacatatatagaatgacgtgtacacaagattatacactgcaacatatgattggaaataacatagatgtccaatgataggagactgatctatcaaatataatacatgaacaaagtggcatataccatgcatgttaaaaaaataaagaagctctatgttctaatagggaaagatctccaagatacacattgccctcaacattggtttgctcatataacatgtattgttcattgccattcttttttaaagaaaatatttgtatttgactgtgtagcataaaggatctctgtgaggacagataacaactgattaaattgattgcatatgaagagtaagtcagtgacggagggcagagatggggagaaacatttgacatctttctatgtcttttgcattttgaatcaccattaaaagaacaaaaaccaaccgaactgaaaagaaatcatgacatacctctttaaaatttatttaaataatatgcaagttagcatttacttttccaattgaataaacatagccctacatgacaatccttaaaataaaaaagcataataattttattgatcagactaaaatgtgttaaactaaaaggatctcacagacaaacagtcctaaatatcatctatctatacaatacatgggcaatataggcaaaattctacatgcaattgcatacaagtacatgttagaatacataataagtcaattacatcaactgatattccaaaaaattttcagcattagggttccatggctagtgtcttgcattttcaagtattcctcatattacttagaaatgtattgtttactacaactagattggacttttttttcttttatccagttgcctctattttacacttataaaccatctgagaagcagtaaaattacacatctctactttttcattgctggttatttatgcctcagtagagttctctggtttattcaaatcaaagccttctgatcactctacccaaggcccccttcacttccttgttcctcaaagtatagatcagtgggtttagtacaggagtgaccacagtgtacatgatggcaacaatccggtcctggtccatgaagctctctaacgcaggatggatataggtgaaaagaacaggtgcatagaaaagaataactaccatgaagtgggaggcacaagtggacagtgctttacagagcatgctacaagaacgggtcttgaagaagagataagtgataatgtagaaataggagagaagtgtcagaaagaaggggcccatggcaattgtccccgtgacagtactgagtagccactgattaagctcagtgttcccacaggccagctttagcaatggcttaatatcacagagaaaatgatggatacggttggaaccacagaagttcaagcgagaagtcattacggagtgcagcagggcatggaaaaaaccaatgacccagattgtgatggccatctgggtacagagctgagggttcatgatgacagtgtagcgaagtggcttgcagatagccacagagaggtcaaatgccatcacggcgaacaacatggactccgtgctgcccagggagtggaagaaatgaagctggcttatgcatcccaagaaagaaattgctttgtgtgtagagagaaagttctgcagcatttttggcagtgtcaccgtagagtaacagatatccaggtaggacaggtttcccaggaagaaatacataagggaatggagtctaggatcggagatgacaatcatcagaacggctccattcccagtcacactgatgaagtagatggtgaggaaaaccacgaagagaaaaggctgcagttcttgaatgtctgtcactcccaagaggagaaattcggtgactgaggttgtattcagcatcacttcagacaaaagacaaaataatctatggaacactaatcgcaatcagaatccttccggctcagaattttctcaccaagccaaagatacttggaaggagagtactgttgtacttcttccaaacctcagaagttgtatagaagcttagctgttggtctcttcaatattaaggattcatgcatattatggactatgacttaaccactttttaaaattaagtttatcattaacgtatttctttcttctggggatttagaacatgttgctaacttacatcttctctggttgagaagaatacatccgtattctgttacaactttcctttcctatcccaagtcagcattaatagggggcagtttttaagtgcaccaccacttggatatctcttgacccaggaaaatggctcctgaaattttttgacttaagagaggaagatgggaggctgaggcaggagaatggcgtgaacccgggaggcggagcttgcagtgagccgagatcccgccactgcactccagcctgggcgacagagcgagactccgtctcaaaaaaaaaaaaaaaaaaaaaaaaagagaggaagataaaaatgaactcattataatcacaaagtctttaaagagatataaaaacctctttaaaatagtagtaattattttgttctcatcttagaacgtagatgaggctggagatgttctcttactgatctctttctaacccacatctctggcaatgtcatggagctctactgggaaaggaaaaaataatacatcaatcaaatattagcctgaggtatatttgaagttttatcactgctatatcagataatgtgcttagtttcttctacctaagcctttaaattttttcaaagtaaatcccaaattacttacttgatgacaaatgttattgttcctttagtttccagttgcactgagactttttcctttttcacacccctgaatctctgaataagaaaaactcttccaatagactcaacaattcttccttcattttacccaatagtgtcttcttctaaagtatctaagaatttagaccactgaaagttctgtcttctcttgtgatgcattttcttaagtcttatttttattttgcctgaaataagctcactttttagatgtgaagaaacattgtatccaagtgaattttctcttttcttctagtttcatcaatgtgacactgacagtcaggttctcctccatcaacccagaggtctgttggcttcataccagttctctccaaagttgccacacatttctagcctttttcatttgtaaaatgtgttttctctatttgccccttctttccatcagataaaatttccattttctatgaaagaaatgtattcatttttctttcttttgcagaattgaaataatagaattttttcagtaactgttaaaacacatgagggattataagtaagataattataatgaggtttaatatttgactaaatttatactgtttactgaaaggcagaaatatattttgaaggttttttctaacattatttgcaaagtacttgggattatcttctataggtgcactgacaaaagcagacataattttgtgaaatagcttcctgtttgttcctttcttgtacaaatgtagtggattaacttttgcatattaggagaaaagaagcaagaatgtgtgggaaatccatagaaatggcaggcacttagaaaagaataagaaccaataggaaatcagaagaaagatgcagacattagagtgtttcctataaatggggaataattcgaggttgaaaaattgctgatgagagaagaaaaggatttggtgtgactaaagttaaaaaaaataatgaactaggaaacatctctagggagcccataggatatttggctttacagctagaggaaattttgagagattatctaacctttaccacacctccatgaaggactgcctccaaacaatttaaagtagctttatttgatagccatgtatgttgcatatttttcaaaacttttaccatgtcttttaaaagtacaaatgatagataaaatattatttttggttctc

SEQ ID NO: 585557 - DNA, 4001 bp, Homo sapiens
ataaaataaaaaggtataaataaaaggacaatagtgaaaatataatgaaatcataaaaatattcccataaaaaacagtaaatgaaagaagaagcaataacggacaaataggacaaatgaaaggcaaacagttggaggacaaatttaaatttaattctatcaaaaatttagttggaggataaatttaaatttaattctatcaaaaatttatcaaatttaaattgtgcaaacactccaactgaaacaaagagcttgtcacattggcttaatgggtatgaaaatgcagttagatagaatgaagaacttctagtattcaacagtaaactaatgcagggacagtaatgtaggtttagcttgattgtggtagtctcttcacaatgtatacatatactaaagcatcatgttgtgaagcctaaatatatgcaatttttatttgttaattatacttcaataagctggggaaaaacaagatattttcaatggctagaaaaatctctccctaaaattaaatacccattaaaaattctcttcaagaattaagattaacaaaaatgatattctagataaaaactgttgtgagaaaaattatcatcagtactttcctgctgaaggaaacacaaaaggaaaaaaaataggcaaaaataaagattatctcatatggaatttcagtaagatacttctattacttggaaaattccaaaggtttttgtcctaggagaaatgccacattcttttttacacagcagattcctactctaaccctccccatacttcctacctccttagttctccttgccaccgaattatcctgacatatgtacttacgcgtttggttatttggggcctccatcacattaaactttatgtttgatgacattatggaatttgttttgcttgctcctgtgtttcttgaacctactacactgcctaatataatatgtgctcaaaatttttgaaagaaaaatataaaccaggtaaacaaatcatttcttacagtgaagtgatggaaatcagtcttaatagaaatcagatatccctcattagtcctagtggtgttgctgccagtctttaaacaacttcctaccaaagattttcttcagagccatcatcacttctttgttcctaagggtgtagattagtggattcagtacaggggtgacggcgctatacatgatggccattatccggtcctgaatcatggaggtggctgaagcaggacgaatatatgtgaagcccacaggtccatagaaaagacataccaccataaaatgggaggcacaagtggacagagccttgtggagtattctgcaggacctgttcttaaacagaaggaagccaattacatagaagcaggagagaagagtcagaaagaaagctcccatggatatgctgcctgtgacaatggaaagaagccattgattgagtaatgtgtcactacaggccaattctaagagcggcttgacatcgtagaagaagtgattgagtttctgagagccacaaaaactcaggtgtgcagtcatgacagaatgcatcagagcgtaaaagaagctgatgagccaggccgcagctgccaacagaatacacacctgggggttcatgatgacagtgtagcgaagaggattgcagatggcaacaaaacggtcaaaggccatgatagccagtaaaatggcctctgtgcttcccaaaaagtggaagaagtgtagctgggtgatacagcctagaaaagatatagccctgcgactgcacacgaggtttacgagcagcttgggcagtgtcactgaagaataagaaatatccagacaagaaaggtttcccagaaaaaaatacataggggagtggagttgtggttccaaaacaaccatcaccaatatagatccatttccaatcaagtttatcaggtaaatgattaagaaaatcccaaagaagaaaggctgcagctcctgaacaccagtcaggccaagtagaagaaactcattcattgtagtgacattctccattgctctgggaagcaaatttaacaataacagaattaatttttctgaatttttaattttacactgtgaggattaaataaagcaagtttactatttggaggaacctaggggtgagcaacagtgtgaagaatagttacgaacagtaaaactaaatttatgtacaacaaaattgaggaagactaatatacctgataaattctgagctgttaaaatggcactagactaataaaagcattatattatgaacaaatcagatatagataaagggcatttgttttcaaaactaggaagtgcaagatttgatggacataatcataacctcatgtatggcattagaattatgtattacaaaaattttaaacatacaaacagggaatagtttttcaacttatgattctaggttctggcaaaaattcagatgtagctcagtggggatttcatcacttcttctaagatacataaaagccacaagagagtaacacatgtcttctgacaacccaaactttcagtgaaagtaagaaacataaacacccacaaaccaaatgttgtatgagtagaggagaaaaaaacagcaaaattagcatcattagtcacaagactgtgtcatagcaatgaggcagtggatgtagttgggaaaaacttgaaatagttagaggtcccattagtagaagaacttcgaaaacacccccaatttttcaatccaaaaggggagtacctcccagggagtgagaatttctgtggggcaggggatagaaaaaggcacagtctaagcactgaaggtgatggagagaagaggtatagtaaatatatgaagaacaaaggaagcttgtcatttgtaagtaattaataataataataataataacaataataataatcaccaccttatcaacagaagagggagcccttgcactgaggaattggaaaggctaactaggatactcctcccacccatgcctactaagattcttctgctaataattggtccacaatatcataagttctccagtgtaagttctccataaaataactctaaaaatagacagaaataaagacatagttaaaaccacaatcacaatgagaagatttaacaagtttctctctatacctgacagaagaatcagccaaaaagtcagtaaggatataaacatctgaacaacataatttacaaatttgattaacatataaagaacactgaacccaaccaaaaaataattcacattattttcaagtatatcttgtacatatttacaaaatcaagcatgagttgagtattaccaaaaggcttcaaaaggtttcaaaaggttgagctattcaaagaatgtcccttgaccacactggaattaaaaaacaataagaaaaatgcatctagaaactcaccaattgcttcatattatgtaatacacacaaataattcataaagaaaaaattcaaataaaattagaaaaaaattgaaatgaacaatgatgaagatgagatatatcaaaacttttggcatatagctaaagaaataaatagagggaaattgtcagccttaaatgcatatgttagaaaaaaagaaatattgaaaaaccaataacctaaactttcatttcaaacagctaaatgaatgaatgcatgaatgaatgaacaaataatccaacaactcaaacctaaacaaagtagaagggaaatagctaaaataataacaagaataattgaaatagaaaacaaaagttcaataaagaaaagtcaacaaagtcaaaatttagtcatttgaaaagattaatgaaagttatcaactcagtaaaattgttaaaagagagagagaatacaaattttaagctagtatcactacagatactatcaacgtcaaacattgtaaaaggtcgttatgaacgacttcatgcccaagaatttggcaatttaaataaaattttaaaattacttaaaccaaaagtaacttaccaaaattgacagtagaagaaagacaatttcaatagtttgatatttatataggaaagtgtag

SEQ ID NO: 585558 - DNA, 4001 bp, Homo sapiens
tactcttgtaaattatgagtctttcttgaagaaatctgcagcattacacaaaattgaatcagatattcagattcacaagatttgtgcctccttatctcacacattcataagttggaactcttcatttgcagtttatctatattctgtttcatggaactagggagcatcccctgcctaactctgtaaaaccaatttgtcaaactcttgtacagatcagaaaagtaaaggaattaatataaatacctccagtaatagggatgcacaagggtgatgacaattttattaatagattatagtagtatatgcttatatttatagattatacacatcacacacacacataaacatacacactcacatttgggtaataatgcatttgccatcagtaaggaacataaatgaccttattgtttgagtcagacaaatattaatttgaatcagagcttaactaccatttatttgagaaatctcaggaaaattaactaatccttcctaaatttattgttcctattggcaaaatggggacaatatgttatagctagaagagttgttttcttgagtcaaaaaaatgtatatatataaagcacttgatacttactaggggctgaataaattgttgaaatcaccactgtaataatagtaaaagaacttaatatgaatacttaatatggatagaaaactaggaggcccactggaaataccatatatgcaccataatattaacccagttagcttcatctatctccaaccttatttgttaataacaagttttaaattatacaggccagactccaaactaattgtctttctccttcatttcagaaaaattttccaaagatgacttaaaataacacttgaattggagggaggaaggaaagctaatattattagagcacaacatcttaaattttaaagaattatatttgagaggaatatatacaatagacagcttggaagagcattctgggtagaaataagattcacctctcttccaatctgaaacataataacaatgcctttcatttgtatggttcttcagagtttaaacatggcttttaagcacatttttctctgaggaagctcttcctttgacagcatcttcctcagtgctgccttcatggaatcattccgtaagctataaatgactggattgagtgttggaggtatcacagtatagaatacggagaatacaaggtccacagtcgatgaggaatcagaaggcagtctgagaaactcaaagcctgcagctgaaagaaagaaggtggctacaaataggtgtggtaggcaggtggagaagaccttggtccggccctcagctgatgggattctcagcactgtagagaagatgcgaatgtaggagagcacaatggagatcaaacagataaatgctgcagacgttgtgaatgcagccagtgcaatctcattaatgaattcataagaacaggctagtttcagcatctgaggaacatcacagaagaattggtgaatgactctcttcccacagagaggtatggagaagttaatggcagcatgcatgagcccagagaggcccccagcaatccacacagctatcactgcatgcctacaggcacggggatccataatagtctcataatgaagtggttgacagattgctgcgtacctgtcataagacatcactgtgagaatggccacttctgatgaggccagagctatgaagaagaaaacctgaagaatgcactgaacaagagaaatgtaaccgttgcccataagtgaatttgcaatggactgggggactgtgacagagatgaagcagaggtccagaagagagaggtgctttaaaaagtaatacatgggggaatggagacgacggtccacggtaatgatggtgataatgaggaggttgcctgtcaaggccagcaggtatgtcaccagaaataccaatgcatgtaaaatctgaagcttacgctcatcagaaaaccccataagaaggaatccactcattgaagtcaaattgaccatagtctctctgaagataccaagtgtgactctgtttaggaagccaaagacagtaggaagaaaatgcatgacatctaatatatttgtgtgtcaagtaactcaattcctcagcaaggaggtactgaaatgagatgaatttattttcattgcgattagttaatattcaattcaaaaacgttttagcaattattcagaaatagaatccctgaatgtgatcaacaagtcataaacattttctggagcagagtttgcattgtcaaagagggagaaattgatggaaatgataaagtctttaccttcaataaagtcaatgaaaatgattctagcataccaatctcattacatcttctatatgatgccttagtattacaacgatgcactatatagcttcttttgctaaccagctaacatgaagttattgataccaccttgcaaatggatctagaaacagctcagaggcagatctagaaacagctcagaagctaatctagaagagaggttagctcaaagaacagtcatattttttcctttgaaaagctcttaacactttaaaaagattacatttgattgtaataaacttttcatagaaattttgaaaaatgaaatgtctcaaaattgtaaaatgcagatgccactgatatcaggcattgaatcctgagctttggagatcttgcaactaagtgacaaaggttcaccgtcaaagaacgtttaattctcaaaattcttatgacaacttggggttggacattttcaatcaaatccatttgaagaaataaagagattttctaaaatctatgtgataggcagaatgctaggtagtagagtatatatctttctagtgctgtgtctcattgtgagttcctgaatgaaaaaatatatatatatatttctttctaggacttgaaatatattagatagtgggagcccatttcttaaaataaccaaccaaacaaaaaaaaaatctataccagatgtaacaattgttaggaggattaaatgatgtaacttttcctatttcattttaaatgtgctattattatagaatcaacaccatcatagaattattttgtgtatcagaatcactctgctaactaatttttgcctcttttttttctttttaaatctgtgcatttgttgaaaggtcaatcagtatcattttcactgagtttcttctgcacaaagactattccttcatcatttctgtccatttcttcacccttgaccaaaggcatctaacatataggttctaagtaaatacttatttaacgggatatctacataattgatttcagttctatatagacaaaaacttaatggctaagttacatgagttaatgcatctgattttgaagtaactgcatctgatattgtagtttgtttcatttattaatccctaagctgtaggaaaaggttaaaaatcacttaaaccaagatctttttgattttgctgtaatttattttgagaactgactgaaactaatttttaggaaattttttttttccacaaggaacagtctcagggctggaagggcccttaatccctcactgatggtcacatcccctgcttcatggcagtaggaatcagaggaaaacaggggttactttcttcaaagtttctctagctttcttgctcctacagttttcctggtcctccataagatatagcttaatccccagtgctgccaatcttaatgcctggcttaacttgctccaaatattggatggtagttttggaatttaaaataaaatgtgaatagatgaaagcaattcacttatattttaaaacttactgtctctggcttgaaaatcaaaagcatcgtgttacttaccacttctaatacacattgttaatgtaatctaagaaaaacctctatcatttagcctccccattaaggtttctccatagagggaaggaggagaaaaatcgtaagaaaaaacttgaatgcacacaccatattctcctctcaacaactcccaccaacctattttcatttttattttct

SEQ ID NO: 585559 - DNA, 4001 bp, Homo sapiens
aacctagaaaaaacatcatctcaaaatgacatgtttcccatggcataagaagctgctacaacttttaagtgtgtaggtggtggattttgaaatctttctagatttttctttcttgagaaatctgggtttatcttgaaaaccctgaattagaaaaattagattgatttcattcagcggcaaacacaggaagatgtatactgaatcatatttcttaaaaatctcaaatttagaagattgtgaggttgaatgaggtcatctcctgaagcttctatagcaggaatgccgatccatgatgaaggacaggattgcatttattttctttagatgatctaccattgaacagtagagacagggtccctcacggtctgtatccaaacagaacccggatttttacagactgatcgaggcataatgctcagaactacatctctttagaggctcactttgcaaggaaaaaagaaatcattctgccctagaagggggctgtaggaagtattcacaatgagtcaattaatatcaagatctcctgttccaggaaactgttactaagtattacaaaggaaattttatgtgctcacataagtttagaaaacactggcttaaagctggtatagaattattctttcctagagaaatatttacagcattcactatgctaatatgaattgtgatccctagacagaggcatctgatgtgaagtaagtctcaaacttatttgactatagaacttatttttaaagtcctctgaagggaccagtgttttgaggaaaacattatgggaggtatgggactggatcaaaagctaatgaggatattgtaaggggtattgtcctggtgtggagtggctgcagcacaacttgaagagatcaatttctagaatttcatcccacatctgctgaaatcagtcatttaaaggtagggcaggagatagctccattttaaataaatgtctcagataattctcatgtccattgagggcagaggtcccaccagtgcagagatgggttaagaaccgctcaatgatgtaacttcctaggtcactgtcagtcacaatgccataatccttttcataaagccctttctactcccagcactctcttcaaagtattcttcacttctgagttcctaagactacagataaggggattgagcatgggattaaagaggctgtgaaacagcaggagatatttcttctgctccttggggttcccatatctgggtccaacatacatgataatggctgtgccataaacgagtccaatcacacagaggtgggagaagcaggtgcggaaggctttcctctgaacttcccttgattggatctgaaggatagcacagaggatgcacatatatgaaactacaattgtggacaagggtcccaccagcccagaaattgctccggccaagaccatgttctcattgatgtgggtatctgcacaggcaagtttgagaacagccaagatttcacaaaaaaagtgataaattttctggggcctacagaagggtaaaggtagaagtaacacaagatgaatcaaggataaaaggactccagtggtccaggaagtcaccgcgagggtgatgcagactctccaggtcatgatggccaaatatcggagggggtggcagatggccacgtacagatcataggacatcaccaccaggaggagacattctgtgacagcaaaagtggaaaacagaaaggtctgcatcatgcggcccgcaaaggagatgggcttggctggatgcaggaggttcaccagcatccggggcaccgtgttgcaggcgtaggcgatgtcgacgaccgccaggtgtgagaggaagaagtacatgggggcgtgcagtctggagtccagtgagatgagccccagtatggtcccgttccccagcagggtgaagacgtagaacagggagaagagcccaaagaggagcatctgaatccttgggccaacgggaaatcccagtaggaggaactctctgatggatgttatattgtctcccatatccctatgacagaggaaatcaagttaatgctcatggtttaggagaagtgtttaaaaacagattcattttaacttgttcggcactctttggtgaagtagaaaagtgttcagacagctgcagtgagtttttgtgtttttaaatgaatgcttcaagacaatttggtaacgctaaaataaatgtttaaaaaatatatgcaggccgggtgcggtagctcacgcctgtaatcccagcactttgggaggccgaggcgggcggattgcctgagctcaggagttcgagaccagcattgacaacacggtgaaaccccatttctactaaaaatacaaaaaattagcccggcgtggcggcgtgtacctgtagtcccagctactcgggaggctgaggcaggagaattgcttgatcccaggaggcggagcttgcagtgagccgagatcgcaacactgcactccagcctgggtgacagagccagactctgtctccagaaaaaaaaaaaaaagaaaagaaaaaaaaaacgcgtgcacacgtatacataggtttcttttttattacgttaattttttaataaaggctaaaatttaaaaataaacatgtcacatattaatatatccttttggtctttttttaaaaaaaatttggctcaggcctttcagggatgaatgtcacatgtcaatgtagtacacagtttttgtttgattcagtgagctatctcatatccttcaaataaattcttcttttccttggtcgtattattcagagtttttctctgttatgtttcagaaacaatgaacactaactgatacacatgtcaaagtcttaaaaccacattaagtttaatcttaaagtggaaggtttaattaagggcgggctatactaaggttcgacataccatcagccaaatacaccagtggtcattcacctcttaaactttccactcttgcactgatcatcacctccacagcatatatctcacaaaatcttttcttatccaagtgtaaagacttattttttagcccagaacattattttttgttatttactttcccacaatgtttagatgagcatttatgtgaatgactgaatagatttgcactgtgtcattatctaaacacgaaaacaggatcagtaacttttgttggatttgggcttactattgataaacactctagaatacacagttttaagcattgtctatgcaggtgattggcaatagttcgatgaatttatgaggaatgctgcagaaagagtctctgaattctctgattgaactcaggcctccttgatcccacaattaaaatgttagcataagcatgatattgtcatttttgcttaaattttattctcattttttatgtaaaattatattgtcttggagataggaaggatgagcaataatcctccatttaaatgtccataaaattataaatttaatcctgcaaaaccgactaaaaagtatttcatttgcattggatttttcctaccaccattccaaggataagtattatgctcatgttgaaaaaataaaataatttagttatttattgatttcttgtcatttatttcatgttgtcctgagattggatctaaactttgagctcctaatcattgctcagattgtgtggcctcgtaagattgtgcgtaataagtaaacaagcatctgtacacttgttaacttaatgagcttctgtatgtgacactttaagcctttttaaaaattaagtgctgggctatgcttggtgtctcatgcctgtaatctaagcactttgggaggctgaggaaggaggttcgctggaacccaggcatttgaaaccagcctgggcagcatagagacctcatctctttaaaaaaatttttaaaatagtaattatatgaaaaaaaaattttaaagaaaaaaagtgctggtcttttttgttaacgttgaacatttaccagagtcagttgcacacagatatttcttgaacttaaaaaaagctaccagccaaaataaccattaacatattgat

SEQ ID NO: 585560 - DNA, 4001 bp, Homo sapiens
gatctaagtaaaactggggagtgcagaattgttgtggattttagtattgtgttgatgtgcgaatagtgttaaaatttaagctagggctgttaaacttatagagaaaattaagacaaggttttggatacttctgttagatctacaattgtctgaaaaataatttgtgccatggagtttgtgtgtgtgtgtgtgtgtgtgtgtgtgtgtgtaaggatgaggacatgtgtatatgtatcaaaatgttttgtttctggcttttattctggtttcagagaagtctaagtctcttcccgatgtatacagactagtgctaagatgtttgagaccttaaagatttcaaggctatgctattttgagagttcataaaagatcagttcttaagacttgtgcaatgaatatatttaggcagtagaaaacagatatagttctctgtcgacattttatttgaagatcactataatagtttttctaagaatagtaataataaagcaatttggagagaattaaattataagctatgtaaaattgaagtctttaaaaggcctataatttgagaattccttttttttttattaacacccttgcaagcaacctctcaaaagctccctttacatctttgtttctatgtgtgtgtgtgtatgtatgtatgtgtgtgtgcgtgtgtgtattactgaagagatgatttctggatcagaaaggtctagtttacactgaattgtacaaacattgatgtaaagtgtgacaacccttgaaaatgttgtgattacagtttttggtgcattggaaggccaattctgggggcttgttcaatgaaaatgtttaggcaacagaaacaaatatagctttttgtcaaggaaattttctttgagggagattacaatagttttctatagtaatgacaaaaataggacaacttgcggagaagttagtaaggtaagtaagcactgtgtctttagcaaagcttatcatttgcatatttcttatttcttgattaagaagactctttgcaaccaaccttttaaaggcttcctttacctctttgttcctaagtgtatatataaggggattcagcatgggtgcaatgattccacagaagagagaaaccatctttccccggtctttggagctgggtgaaggtggttgcaggtacatggagatagctgtaccataaaaaagtgacaccacaattagatgggagccacatgtcccaaatgcctttcgttgaccttcagcagactggattctcaacactgcttggacaataaaagcatacgatataaggatgagtgtcacgggtattagaaggaatagcacactgatgaagaatagttcagcctcatttgctgttgtgtcaacacaggacaacttgagcagagcagggacttcacagaagaagtgatccacttctttgtgaccacacagtggcatcttaagtgtccaggtggactgtaatactgaattgctaaagccactaatccaggatgcagctgccaactggaagcagagcctctggtgcatgataattgagtaatggagaggccgacaaatagctacaaacctatcaaagcacatgacggccaggagaagacattctgtggaacccaaggccaggaaaatgaaaagctgggccacacagccaccataactgattactttcctggtgttgcatatgtttaccagcatttgtggaactgtacttgtggtatagcaaaggtccaggagtgagagattgctaagaaaaaagtacataggggtgtggagtttgaaatccacatgtgacacaagaattattgtcagattgccaaagattgtcaagatataggaaaacagaaacatcacaaagggtggaatctctagccatggttgatctgagaaaactaacagaatgaactcctgtgggacactcttatttacccaattcatgttaaatggttcaactcttcgttctctgaaatataagaagtcaggaagttaacaacacacttcctgattttgtcagctataatcattttgctatcaatttacataaaattacagactgatccaattaataatgtgaaaaaagtattgataaaaatataaatatttatccatccaagtatttaaaaagtgtttatatatctgtaacagcatattagcaaattgaatcgaatttcaagaatctttttttttttttttttttttttttttgaggcagagtttcactcttttgcccaggctggagtgcaatggcgccatctcggctcaccgcaacctccgcctcccaggttcaagcaattctcctgcctcagcctccccagtaggtgggatcacaggcatgtgccaccaccccgactaattttgtatttttagtagcgatggggtttctccacgttggtcaggttggtctcaaaccccaacctcaggtgatctgcccacctcagcctcccaaagtgctgggattacaggcgtgagccactgtgcccagcctaatttcaaaaatcttaagccatattttcagtttccaaattcacataatgtatcctttgatattttactgtttgtaaatgtatttttctcattcttcctacctagatatctactgtgaggtagatgtagatacagtttcctgtcatttgaattcattctaatttctcttcaaggccagcgagattccctgattgtagaaatcagttaacattagttaaagccacctcccattattccccttccctcaaaaaagccatgtagacagtatctagtaagttatcagacacaatttaaggagacatatccttttcgttctagaagctcatagaatttgtatagattccttagtaatatgatatttgaaggtgacaggctggtctcatatccctaccctctctaattagttacattcattatattggaatgcttctaaccctttgatctccacaattctcatttgtaaaatgaagatgatacagtggttccccctttatccatgggggatacattccaagaccaccagtggatagaaacctgaaactgtgggtagtaccaaaccctatatatactatgttttttaatacatacacaactataacgtttaatttataaattaggcacagtaagagattaagaacaataattaataaaatgcagcaagtataacagctccagacccccatttattgtaatacatgttatgtgaatgtggtgtccctctctttttttctcttcaaaacaccttattctagtgtactcacccctctgtgttctgacgatctgataaccgagatggctactcagtgactaacaggcaggtggatgctttaaatcaagcttgtccaacctgaggcccacgggctgcatgcagcccaggatggctttgaacgcagcccaggatggctttgaacgtggcctaacacaaatttgtaaactttcttaaaacatcatgacattcactgatgattaaaaaaaaactcatcagctattgttagtgttgctgtattttatgtgagacccaagacaattcttcttcttccaatgtggcccagggaagccaaaagattggacacccctgctctaaacagaaggatgattcccatgactgggtgggacaacacaagacttcatcaggctattcagaatggcatgtatttaaaacttatgaattgttgacttctgtaattttccttttaatatttgcagaccatggttgactgtgggtaactgaaattgtgcaaagcaaaaccacagataaggaaggactactgtaatgtttttctaagttgtcttgatgtgaagtataaatgatgtgaggtattaacgcacacacctaccctagacttacacctttagaaatggagaagagtggatgaaaggaactatagtgatccaaggtctgaggtgctcagaaaggaattacttatgatttttagaactttaaatttcctagggttactaatggaaatgactatgcctgttaaaactcaacatctgatttccttcttaacccgcaaacatcaactccaaca

SEQ ID NO: 585561 - DNA, 4001 bp, Homo sapiens
atcccagctacttggaaggctgaagcaggagaatcacttgaacccaggaggtggaggttgcagtgagctgagatcgtgccattgcattccagcctgggcaacaagagtaaaattcattctcaaacaaaacaaaaacaaagccagctagattgaagccaaattacataccaaaaacagttctgaaaaggtgcatatgatgaattttatcaagagatcagagggttcaaagtgtttgaagactttgattctgatggaataatttttggcttggaataactggtaatttaattataaggatattaaaatccctaactaaaggcgtagacaggatggttatagaataatagtatacaagtggaaggcaatccatcaaagtctcctgactaccctgaagttgataggaaattgacatgacttgtctcaaggaacagagtacattgggggaacttctgaaaagaaaggagtttctaactttgaagacatgtcatatgggttcagcattgcttcctaaacagaagaagacttttctttctttcctttttttttttttttttttttttttttcctgagacagattcctactctgtcacccacgctggagtgagtggcgcgatctgggctaactgcaacttctgactcctgggttcaagcgattctcttgccccagcctcctgagtatctgggattacaggcgtgtaccaccatgccctgctaatttttttgtacttttagtagagatggggtttcgccatgttggccaggctggtctcgaactcctgacctcatgtgatctgcccaccttggcccccacaaagtactgggattacaggcgtgaaccaccgcgcccagccaacagaggaaggattttctaattgttgacagaatttagtgaaatcaccagagcctggaaaataggaaaatgagttcaaaggtcattaccatcattgaagataaggaaagactaagaagattctcatcacaatggagtacttcttatttcttacagaaaaagattcttggcatcagcctcttgaaggcctccttcatatctttatttctaaggctgtagatgagggagttcaacatggatgtgatgattccatagaagagggaaaccatctttccccagtccttagaggtggatgaaggtggttgaagatacatataaatggctgttccataaaagagggacaccacaatcatgtgggacccacatgtcccaaatgctttttgccgtccttctgctgacctgatttttaatactgcttgagctatgaagccataggagatgaggatcaatgtcactggaattagaagaattagtacactaaagaagaagagctcagcctcaataggctttgtgtcagcacatgacaacttgagaagtgcaggcacctcacagaaaaagtggtccacttcctggtgaccacagcgtggcatgttaagagtcaaggaagactgcagcactgagttgccgaaaccaatgagccatgagaaggctgccatccttaggcagaaccaataattcatgatgactacatagtggaggggtctgcaaacagccacatatctgtcaaaggacataacagccagaaggagacactctgtagcacctagggccaggaagatgatgaggtgggccacacagccagcatagctgatggtctttttgttgcaaccaatatttaccaacatatgagggactgtagttgtggtatagcagagatctaagatggagagattagtgagaaagaaatacatgggagtatgaagtttgggatccagaatgcacaccatcatgatggacacattgccaaatatggtgattgtgtatgatattaacaggaccacaaaaaggggcatttgtagccaagccctatctgagaagccaagtagtataaactcttttggggagctctcattttcccaattcatgatgactcacttatttcgcactcctaaaaaaatgtaagataggaaagcaatcaatgtttgtttattgaatactcttactggagctgaattaaatttaatgaatagctcagcatcaaatacaatttacagtcaagtggataaagcccttgtaaagtataatatggttatgtttaagcttaaaagtagttcctgtgttttcagtagtgtttaaattactttaaagaaaatcattacatttaaatgacataaagtatgtaacatatgcataacacatggaaaattgtgagttctcaatgcattttatgttctctcctcttcttacctcctaacctatcttaataaacagtttagaaagaaatattacttttactccaattattttaaatttggcctgaaaatgctgagtaatatagagggtataagagttgaatctaaatctgcaattgatctaaagaaattttgcttcttttagtaacatctttacgtgtttttttgagttgtgtctgtctcctaaatgccatgcatgtaggtccatttccacaaagaactaccgtgggtattagtaataaaattatggctacttgtgatatatagtaatgaccacagatgtcatctccccatctgcaaataccttaattaaaatagcaaaactgataacataattgttgctttacttaacatgtgccagaaactgctcagtgtgtgaaatacattctttgtaattctcatcaaacccctcacagtcatggtttgcattttattgcttctgtgattcagtaagaataaataatttgcacactcattattggtgaggtcaagactaacacctaggatttaaagatcattctttcttttataccgtatttccccctaaatacacagatagtacaataagaatgactgcatacagcacaaaagtggtcataaattaaaatagaaacaaaccaaaagtcatatattcaagttgattttcttcagtctgtaaaagtcatcagttatttagttatattacctaagtgcacctaagtttcttcagtctactttgcatgtttaaatgaaatgtcatcgaggtggtttacaccatttgaatttgcaagcataaaaatagaaagatagactgaagagagaagagaaaataagtattgacacaatttaccacagaataagataacttttccagagtaaaaacactgatatataaagtataatttgataatggaatgaataaatgaaaatgaacagagatgaccttgagatttttaacttcttccattatatatgattttttttagctatagatacacattattttttggcaaataacagtaatacacctttggttgaaaaatagaagagaatatgagattaggcttttttgaatgtccatgtaaatttacaaaatgataaatatgtaaggtaatacatacattagataacttgatttagccactttataatgtacacatatatcaaaacatcatgttgtacactataaatatatacaatttttactcattaatacaattttttatatcagaaaaagactacacagaaagataaaacataaatggcaagatagaaaaatatacaatgtttatggaaaaaatggttattatattaaaatataaataattattacataataaatagaaaaagatcaaaagtccaatggaaaaaaatgagcaatggacataaataagcagtttggggaagaaaacaacataaaatgacagtgaaagtataaaagattataactttttcattattgaagaaacacaaataaaaacaagaagaaagtatcacattgtcttcctacttagtagcattaaaaaaaatcactgttaaaggttagctgttaggtacagtgcctctggagccagaatctgccagggttttattactggattgtgtgatcctgggcaatgaatgaacattcttgtgctacattaaaaaacaatctctgacttgataaaaagagagtattgtgaagctcaagtgagacaatgtatacacatctgaacttaggaccctgtcccaagcatactaagcatttaatgaatgtgagc

SEQ ID NO: 585562 - DNA, 4001 bp, Homo sapiens
ttatggcaaaagtacatggagttactgtaggttttcataagaaacatgataaatatattttaagctattgtattttctacatgtataatgcattagtagaagaaaacaatggataaagaagggtagcaaggttgttaaattattataatgtaaatgaatcactcaacaatcaaaagaatcaactaataatgtaaatgcatgctacttcctcagcactatgatgacttctaaaggtgttgtggtaaaatgtatggtatagtttttgtaccctcaagaataaaatataattagactattattatgcaagacaaaagtactaaacaagaactctttggaaatcattacataatgtgctattttggaatctaagctgttaagtgctttagggtttaagagaacggtagataatattgatagttgggagaattatgaaaaaaaattcatgtaaaagaaaattagctggacctaataaatatctagggtttgatttgcaaaggaagtaaaaagaatgccttcatttagtaggaaaaacatgagtacagaaatatggtaagaaaatggaaaatctggttacaattttagaataaaaattattatagatttccttatgctgatgcgggagtggaaaatttaaaattagaattgttaacctcagatccaaatttgaagtggtggggtttgagagtttcagtgagcctcgtttaactagtgtgtgtgtgtgtgtgtgtgtgtgtgtgtgtgtgtgatattggagaaagaacttctggcttttctacggatctaatttacattgaattgtacaagcattgatgggatgtttgacaaaccttgaagatgttgtgattacaatttttggtgaattggaaggtcaattctgggggcttgttcaatgaaaacattaaggcaacagaagtaaatatagctcttcatcaaggaaattttatttgagggagtttacattgttctctacagtaacaacaaaaatagggcaacttacagagaagttagtaagctaagtaaacattttgtctttagcaaagcttatcatttgcatatttcttatttcttgattaagaagactcttgcaaccaaccttttaaagccttcctttacctccttgttcctaagtgtatatataaggggattcagcatgggtgcaatgattccatagaagagagaaaccatctttccttggtccttggagctgggcgaaggtggttgcaggtacacagagacggctgtactataaaaaagagacaccacaattagatgggaaccacatgtcccaaatgctttttgtcgaccttcagcagactgtatcctcaatactgctcggacaataaaagcatatgatataaggatgagtgtcaggggtattagatggaagagctcactgacaaggaatagttcagcctcatttgctgttgtctcaacacaagataacttgagcagtgcagggacttcacagagaaagtgatctatcacataggggtcacagagtggcagctggagagtcagggtagacaaccacactgagttactaaaaccagtaacccaggatgcagctgccaactggaggcagagtctctggtgcatgataactgagtaatggagaggccgacaaatagctacaaacctatcaaaggacatgacggccaggagaagatattcagtagcccccaaggccagaaatatgaaaagctgggctacacagccacgataactgattactttcctgatgctgcataaatttactagcatttgtgggactgtacatgtggtgtaacaaagatccaggagtgatagattggtaagaaaaaaatacatgggggtatgaagtttggtgtccaggcgtgacactagaataatggtcagattgccaaagatggtcacagtgtaagaaatcaagaagaccacaaggagtggaaactccagccaaggtcgatctgagaaacccagcagaataaactcctgtatgatgctgtcatttacccaattcatgattaatgtttcaactcttggtttcctgaaacagaaaaattcaggaagtcaattaacacatatttgttaactatttcagttacttatagtcattttactacctgtttgaagatatttacagaattgatattgcttgttttattacatgaaaaatatacagttgaaaatgctcataattaccaaagtatttctaaaatttaatctttctatatctgtatcatcactgcaaaagtgaaagctaaaatgtaaaaagtagattcctgattttaaacaactttcacaaaatttcttctttgattttttgtcatttggttaatttttgtaatactgtccacatagatagctattattagattcggtcataatctctaacacatttttttcactctaatttctcaatgttaaggaaactgccttgtcatctgaaacaaacaatttgttagtttcttaaatttttttttatttcaataggtttttggggaacaggaggtgtttggttacatgaataagttctctagtggtgatttctgagattttggtgcacccaccacctgagcagtgaacactgtacccaatgtgtagtcttttatccttcagctccctccttccctttccccccagtccccaaagtccattgtgtcattcctcatagcttagttcccacttatgaatgggaacatacgatgtgaaacaattaaaattatttagaccgcctcaaaaactatgcatataggctgtagcaagctattagacacatctcagggaaacatcttttgccttctaagaccttatcaaattagaataaaaagatattagtagcatggaatttggaggcagacaagtctgggtccatgtccctactacataagtcattagttacatcctcctgggaatgtttcttactctttgtgagcttcaagctcctcacctataaaatgagtataataataccttcctgggatagtggtacaaagtgtagacaaaaggaactgtagtcatcttctgatgctcagagaaaaattatgtatgattttcagaactttaaatgtcctggggttgccaataaaaaatgactctgtgaggtaatatttatcttgttctctccacaactccaataccatcaactttaacaacagagataataataactatctgatgtgaagtataaatgtgatctttaatgtaaattacctggtataatggcacacagcaatgtgaatgaaagtatcatatgacacaggaactctgagacattcggggcagaggctgttcagagccctaaatttgctaagtactaatataagtcaatgctaccagttaaaaatttccaaatcatctatcttgctaccaccaccctctattgttttattataattttgttagtgtaaaaatgtcaatttaaggataggatcataaattttaaactattattcaatatgtatttcaattttgctcacttattctacagttctcagtataaaatggcagggaaagcttttatagcctctcaaatgagtccctgcatattattgacagctgcatattattgacatgctatgcagctgtcaataaaattaggaatgtggtatagatataaattcagatatagatatacatgtacaaaaacattcaaatccttaaggaaaaaaacaagtttctgaacatgtatttagcatgcttccatgtgtttacataagggaatataatcatattggtcagtattcatatatgtataaaattacctggaagtatacagaagtgttaaaagctgttacttctggggaatggaaatggaaagagggagaaaaatcagattttgatatttaactttatccttgctttttctaatttttaacaaatataatgctttttattattaataaagattattatgtattatataataactttaagtgaggacatattcatactgtatgttttactataaagacaagcattgctttagactttataactgaaacaatcttatatgaatttag

SEQ ID NO: 585563 - DNA, 4001 bp, Homo sapiens
tgaggtcagatgtttgagatcagcctggtcaacatggtgaaacctcgtctctacaaaaaaaaaaaaaaaaaaaaaaaaaaattagcggggtgtggtggtgggtgtctgtaatcccagctactcaggaggctgaagcaggagaatcgtttcaacctgggaggtggaagttgcagtgagctgagatcgtgccattacactccagcctgggcaacgagagagaaactctgtctcaaaactaactaaataaataataaaatattattacttactctgtagaccatacttatagttttgccaataatttctgttatatacgtgttttcccatggaagatccactccagattatgtatgtctgagcttgccctcttaagtagcctttccttagtcagtgaaataacaagccttaaagtataggctggtcggttcagttcctagcatgagaagcagagagactagaagagtatggcctcatgtattcaataaacactgggaaatacatgggaaaattgagaccctccccaacaccgccgcccagaattgaaggcaaataaattaagatgaggtgtgggttaggaaagagtctgcacaataaaggaggaatctgggtgggtgggccacggaaagcctttaggaggaggtgacatgcatttttgctgtaaaagactgtgctgagacacatgaggcaagctcaatgatgggggtgggatgcggcaccaccctggcaggtaagaggcagaaactgagggttttctgagcacagacaatggcaggagggccgtttaggggatgtggccatttagggcaagcaagttggtggtctcattggcagacagtgccctgggactttatgggatggcacaatcacctctgcatcacaggaccctgtctggtgttaaaagctgcctcccatctcccttttcatcaagactccctcctttttgtctccttctatattccttcctccatcattacgtctctccttgaggataagatttgttcccttaattttttaaaaatcatataaacaaaaagtatataaaacacatctatggattttatggaataataaacacatggtgtacctgaatctcctcctgatttaagaacagatcaaatattactggtatcttagaagtcttctgtgttctcctccctgatcacatctccttctctcccactgaagaagtaaacactattctgattattttaaatgtatcgttcctttttaaactttgcagcctcatatcttttgtgtctcagcaattgtccagagttttattcatccataaactgcagcatttcttacattcttactctcttggcaacttgtctcactgtatgttttttcttaatctcttcagtttatatcttcctttgaccctctgcactctcctattttctatctttaataacatgccttttccttaccctgtttcttctggtccttttctctgacaccaataataggcaagcactactttccctacatcccattaactccacacagaagcacattaatttattcttttttggtcctcaaagagccagtcatgtactaactgctacaaagttatgagacaaattctgccctacagttcaataataataaccacttatagttttgacagttactatctgttgatgtcctatatactaacactgtgctaaataatttcctggaatatctgcttcttaaaagaaccctgctagacagttaatatctctgcagaagaacaaacagtctcaaagaggttaagtaacttgcccagggttaccctgccaatgagtgtcagtgccaggattgtagaccctgtttgattcagaactgtcttaagaacatgtggaaattgatgggctgtaggggaataaacttgtgacttacttgcaattaagtcagactctcttcacggccttgctgccacagcttccccatagaaaggaacttctggactggttggagcctccacttgtgatctcacaatgagaactaaaagcaaactaaagaggaatgttatactcttgatgattattggaacttggatttcagttaagagtattgattgctagtgcttacttccatgggcactcaaaaaagcgcttcatatttacggctccttataacttcaaaaggtgggtactattattaccttcccttacagatcaataattgaagacatgtagaggttgaatatcttgttctggaaagtatagctagtaagcaccaaagaccaaattttaacccaggtgggctggctgaagaagctatgcgctaaccacattccaccattgctctgccagacacatgagctagagttagcgctttactatggaactcttgctaacgacttcttttcctcaatccagtaagttaacctctcttttagtgacattaaaggcagaaaaaaaggcatagtgagatgatggggggaggaatcccaagactcccatcccatagagagaagtagctcattaattctgccaagactaggtgccccataacctatagacagctaattggccacagctactaatggttaagaaggaatgtgaagattcaaaggaagtgtgccagcaactgagttccctttggcatataaaaaggtcaccactgcttctccgtgtcactggggagtaaaagggcactattctctcctgatccacaccttctgagtgtcccatatttccagccttcctctcaagcctcgaatgtgctcattcaatcccccctgactttggtttatttcctttctctttttaaaattaaggtataatttacataatgaagtgcacatattttaatggacaattcactgaatgtgaacaaatgtatacatccagacaaccattaccctactgaagatatagaacatttccatcactccagaaatttcatcatgcccatttacaataattctccccatgctctaggcaaccactgctctgatttctatcattttgttttgctttttccagaacttcacataaaagattcattcagcacatactctttgtgtttggtgtgttatgctctgtaccacagtttggagaatcatccctgttgttttgtgtatcaatagtccaattcttttttaaaaatatcagtgagtagtattctcttgcctaaatatatcacaattttttcatccattcacttgttgatgaacattcaggtttgtggttgttttaaaatatggcccccaattttcttatatccccttcacaaagtagagcctacttcccttacctttgcatgggagctgtactgagtgactcagttttaacaaatagaatctggtagaaacgatgggatgtgacatcaaagactatgtcacagtaacattgtgacttcttctttgtggattgtttactttggaggaagccatcctagcagtgaatggaaacacacatatggggagaaactaaggctccctactaaaaacgtgcaacatgtgactgggacatcttgtaagtgaatccttcagcttcatccaaatcttagaaatacaatcagctgacttcttgactacaatgtcaagaaagatcctaaaatagatacatctactatgtattcacaaaaagtttttaaaaagttaaaagaaagatcctaagctagaatcaccagctactatttagctgcttctgaattgctggcccatagaaactgtgagataataaatatttgttgtttgaagccattaagttttgggataactttttatgctgtaatagagaaacagtgtggggtggtttccagtttttgctgttgtgaatcaatctgctataaactttcatgtacaagtcttttgtgtatgtgtattttcatttctctttggtcaaaacctatttgtggaatttcagggtcatgtgatagacattctagtggatatcaggtgatatctcattatagcttttatagctttttaatttaatttttttttttttgagacggagtcttgctctgttgcccaggctggagtgcagtggcgcgatctcggctca

SEQ ID NO: 585564 - DNA, 4001 bp, Homo sapiens
ttaaggtaggctaggctaagctatgatgtttggtaggttaggtgtatgaaatgcatattcaacttacaatattttcagtatatgataggttttttgggaggtaacatcattataagtcaaggagcatctgtactttaagtgttacttgggttaacataacaattacataaatgcttatagtatcataaccatatctatgtctttgagcaaagtacagttcggatgaccctggagcagaagtctgggatgtcacatgcaataccatatttggccggtagatgacaccaaggtccacaatgtgccagcctaaacatgaagatatttttgtgtctttttggctgctcctttacctgcgatttgtgggcattgtaagagaagaaataggactgaagaagctaagtttcctttgtaaggctcaagcctgaaatactgggatatttgattatggtgtgaaagcaacagtgtgtatttgagagttgcctgactgaaaattatggggcctggattttagttctgatgctgtggacactgtgtgttcttgggtgagtttccgaacttagctgggcttcagcttccccttctcttttgctgttatttgaggaataaaatagaatgagaatacaaaacagacatatagtgaagtgggaaaaacatgagggagaagcaaagaagatatggtaggaattagaattggaggtgaaggaatagtggggatatggcaagggaggggaattaaaaatggaagtgataaaggtaggaacatgactatggaggcgaagacttaaagtagaaaaaaatataaaatatacttgatgcctataatttttcgcataaagatacctccctttactacatttcagtcgctgtctcttgcacacatacatgcacacacacagacatgtggctttcatccattcccacaatgtaatgggtgtgaagaaggcagaggggcagggaactcaaactttctgataaaagcacatagaatctcctctcttttaaagcacattaagcagctctccctcagctttgtgtgagccccatttccttccccagcaatctcctgaatgccctggttacctccttgttcctcagggtgtatatgagagggttaagtgaaggagtgcccactgcatagaagagaccaaagaacttgcccctctcttgggcatagggatttttgggctggaggtagacagcaatgactgagctgtagaagagggtgaccacagtgagatgggaggagcaggtcccaaaagctttcctccgcccttttgcagagttaatcctcagcactgcccaggtaatggctccgtaagagacaaggatgaggctgagaggcacaaccaagatgaagacactggcaacagccacctggatctcattgtaggaggtgtcttcacaggagagtcgaattagagctgggacctcacagacaaaatcatccacctgccgatcggggcagaagggcaggtgcagggtggatggtgtctggaccactgactccactagcccaatgacccaggccacagatgccagctgccagcacaggcgggggtggatgatggtggcatagtggaggggctggcagacagccacgtagcgatcaaaagccatcactgtcaagaggatgcactcagttgtccccagggacaggaagatgaagatctggacagagcagtccaggaagctgatggtcttctttgggccccagaggttgaccagcatttggggaacacaactcgtggtgaaacagaggtccaagaaggagaggttggagaggaaaaagtacattggagagtggagcttggggtccagcgcagacagcaggatgatgagtgtgttgcccactagggttaggaggtaggaagtgaggacaaccacgaagagagtcctttccagccctgggtgttcagagaagcccagaaggaggaagcccggtgtggagctttggttaaccatggcctgttcttgtttgtacctggagggatgaggctgtcactccagtgtgattcaacctgtcttatcaaaactcagcctgggtgtttgtgaggtcacagcaggtaggtgtttctcttctgtctctgctcgcccagcctccctttccaaggctcatcaccatccagcagctccttctcattccctgttcttcctggtcaaacattgtctagtgagagtgaggaatccatgaatgtactggacagcagatggatactcacactggtgcctctgacttcctgggtgagggcaaaggaggctgattaaaatatgcactaattcattaattcattcattcaggggaaatttattgagtgccactatgttctgaatgctgttctagagttgtctcttatctattggatgatctcgtaaggtatattgaatgaattttctgataagttgtctctgtaggctcaattattgctctattggttgaatgaattttatagaactctgtacattccatttattttgtattttttcatttgcaagtaagcttatcagagacagtgttttatctatgagagagattttgttttgttttaagatatccctacttatagagagatcaggttggttgccctggcctttttagcaacctaagtttctgaaccaactgactttcagggaggggtggaaattggtccacatgcttcgtccttgccatgagtagcttacaagtaggaggcaagagtggccacaagcatgttaaaatcaccagggttcacaggaacattatcgaaagactccaagaatcactctccctaaatcttgtagtctttcagacaccaccaaaaagagagtccaaaatttaaaggccagtaacaccaatgtactgggtgaatgagagtaaaggttctgtaggatgactgaccaatttggttgggtatatcagggaaagcttcctagaggaggtgactggactttttccttaaaatagagatgtattggggcatagaaggtcagttgagggctgggggtgggagactgaagccactctggcaggtcagagacaaggactcagggtcttacaggaccttaggaaggccatgaggggaggagatgagatggtgggccacaccacaaacgtgccatggagctcagaggatggcaggaatgtcttcctcttacagggtccccatcttgtattaagctctatcacatctccctttttgccaggactctctgccattgtctctgtcttcttcctgtttttcccattattcttttctcacttaaaatatatttttaattttcaaaatattgttacatatttaaacaactaggttaaggaactgagcaaatgtttcaagtatcttagaagcttctgtgtgcccctccctgatctctcaattttctcaatttgtcacccctcaagatgtcaccaccattctaattttttttttttttttttttttttagagtcacgttttatagcccaggctggagtgcaatggcacgatctctgctcactgcaacttccacctcctgggctcaagctattctcctgcctcagcctcccaagtagcggggattacaggcactcaagaccatgcctagctaatttttgtatttttagtagagacggggtttcgccatgttggccaggctggtctcagactcctgacctcaggtgatctgcctgcctcggcctcccaaagtgctgggattacaggcatgagtcactgtgcctggcctctaaatttttaattatgccttcgctttcattttttgagatgtatttaacgtaccataaaattcgcccttttgaagtgtgtaatttagtggtttaaagtatattcacaagttgtgcaaccaacaccatttacttccagaatatttcattactcccaaaagaaacctcatgctcattggctgccgccccctcctttgttttctttgtaatataaaattctttgcatgtaaccttaaacaatagccaattgtttcttatttatccatcatgtgtcatcctaattaattttctacatttctaactt

SEQ ID NO: 585565 - DNA, 4001 bp, Homo sapiens
gtgctgggattacaggtgtgagccaccgtgctcggccttgtttttgatttttaaaaagtgaaagaaagatttatacaatctgaagagtaatcagagtttattgtttctgacttttaaaagctgtcttaatgtattagcattacccccagtgacaaattaagccatgcacagatacttcatcttttatgttgccatttttcctgacagagagtgtgttctgttcagacagagtatgttatatttatacatgttaccaagaatttcacaaactggaagagagtacacattcaataagatttagctaataaagaataagttaatgaataaatggacagatgaacgaaagagccattttaaagagatattagtttactgttcaatgtgacaagtatgtagacctacaggataaattagataatttagtgtctttaaaaagtgtctttcaaccaaatacttatgatatatcctttaccatatcttaaacaatgttattcattatgtttaccatttttctttgctgtgactatttttagcttcatttaaggtttattcaataaccaaaaacctttttagcctaagtctttgcaatattgcccttctctttctgtatatatcatcagttcataatttagcacattgttagaaatattcccaacatttttgaaataatctcctcataactattcgcatgcacatttatttacgttgaaaccacagtccacaattttcacagaaataaaatatacaattgtaaaagaacaaagtggcactaatcagaaactttatctcaacataatatttcagaactaaataataaaaagagcaacaaatgtgagactgaactattctgttttgtgagctgttagaacaaaaataaatcacaaagaagcagggaaaccacctttcaagatggctaagaccctaggaaaaacaatgacaacagacaacatgatttccctgtcacttcccccactcccaccccaatagtctcttcgctgccccttttacatgcttgtttctgagagtgtagattagaggattaagactcggtgtgacaacagtataaaagagggcaatgaacttgccctgatcaggagaattttctgatggtggctggagatacatgcacatgactggaatgaaaaagagagatacaaccataagatgggctccacatgtcctaaacactttctgaagcccagtggttgattgcatgctcagtacagcccgggcaatggcaccataggtagtgagaatgagaatgagaggtatgagaacaaaaatggagctcatgaccatgagggtcagctcatttgcatgggtgtcaacacatgataaacgcagaagtgctggaacttcacagaagaagtgatccactaggcgatgtccacaaaggggtacccagaaagtaaaggaggaatgaagtgctgagatagtaaaaccaattacccaagaagccgcaaccaacaagtggcagaaacgagggtgcatgaggacagtgtaatgcaaaggtctacacacagctacataacgatcatatgacatcaccaccagtaggacacactctgtgattcccagtgcaagaacaaagtaaagttgaaccatgcaaccagcatacgagatggtcttttccgggccccggagattcaccagcaactgagggatagagctggtggtgtagcagagatccagaaatgagaggtttgaaaggaagaagtacattggtgtgtggagatgggagtccacgtatgacaggatgatgatgaacaggtttcctgtcagtgtcatcaggtagaagatcaagataaccacaaagagaactacttccagctgaggccaattagaaaatccaagtagaataaagaagtcttccgaacttgcattttttttaatcatcattcatctttttcttatacctaaagaaagaaccacataaactcaaagtctgtccatgcattgtcaaccgctcacttgcaaacagattgaagacaaaagtatcccacttccagagagtgtgcaccataatggtagtagaatttttatacagttccctttatatgcttcattgagatatttatccagctacagatacaagcaatagcttctcaagttactgagttctttatatacatccctgaattaacatttggattaatgaagactaagatagtccataatcaggaacacaatatttatgaaaaatgattttttactttaaaaagtcaaattatttttatattttcaggctatttccaattttgcaattacagagaaaggaataacagcagtcttactgatcttacttatagataggaatttcccatattaaaaagcaattagatagtcactttaaaatattaactgaaaagaaataattgaatatgattatagaaagaatcaaatgctatttatgctagcagtttatttctagacaaataaaataatgcacaaatcaaagtttaaagagaatatgcacgcacacaccaacttataaaaattcacaatatacacaaagctgattaatacagcaaaatagagtgatcggtgatagaatgcttccaaaggtaaatgagactatattactggaagacataaagattacagagtctaacaaaaacataggttggtaagagagaaatggagagtgtttggatgcacaacagtgaagagaggtctgaatgtggtatgcgaagttgaaagaatgtataacaagtttgttagacaaggacaagaagacttaaacatggtttctacaaaactgtatatgctttaggccaataactgaactatactttaaattctgagtcacaatttataatttgtattttctgggttttccacaatttttaatggagcttctgaacagacattaactaatattagtagaaagatacgtgaacattgtataaaatccagaaaattcaccttgtagttatttttttaaaatgaagaaattcaaatatgctttgatagcttgattttcagttgcttattttctcttgcacattaccaatcttgcatgagaaagataaacactcttttatgatatagtttttgcaataaaatacaggaacccagcatttcaatattcctacatagttttgccatcccccttctgctcccctcctgccacagccaactcttcctcttatactctctgataaatttggcaaaagaggccaggcgtggtggctcatgcctgtaatctcagcattttgggaggccgaggcaggtggaacacctgaggtcaggagtttgagaccagcctgaccaacgtggtgaaacaccatctctactaaaaaatacaaaaattagccaggcaggcatggtagtgggcacctgtaataccagctactctggaggctgaggcaggagaatcgcttgaacccaggaggtggaggttgcagtgagctgagatcatgccattgccctccagcctgggtgacagagcaagactctgtctcaaaaaactaatatctacacccgactcaccttcagtgttttgaaaaacttttaataactcaagtattgtaatcttgactcttgaaaaagatgtaaggagttgcctaactggttgagttacagctggagagctaggaacattgaacttgggccaaatctgtgcaaatgctccagactggtacaaagatactgtacatttttccatattgttggtaatggaatgagcattaaccttttgagaaatcatgggaaaattccaaggatttttttaaatctccctaagatgaaaggtaatatgccataagatacttgaactcaaatgctgtggatacttttgctgatgccgacctaattttctttccgaatgcagctgcctgagttccttattacagtaattaaaaggtggaatctgataactatctgttatatgacccatctttcagcattcctccggagttgataaaagggataggaaataagggacaaaaaaacccccagaactcatgtagagaaaagtctcagcttcaattttcttcttg

SEQ ID NO: 585566 - DNA, 4001 bp, Homo sapiens
aaacacatatattgacatacataatatacttattaaccataaatactcaaattagatcaagctttaaaataaaaataagctatcattttccatatgacagtttctatcataaaatttttccaatatattttcacataattctttcatacacccattggcttcaagtcattttcagagcctctctatttgcctcaaatgttttccttagttccttaggtaatgcagttgctccaagcacttacctcacctaagtatacctagcctatgatgaccatttgtttataagctccatagctcagctttaccagctccttttacttcctatatatttctcactgccttgcaaaaaagagggatctcagatgctgacttctgctatactgtttcaaagcctctcttactacaattcataaaacttattgttctactattgatactggatatgaaagaatatggaccaaaattcctctcaaaatttactatccgacaaagaataagcattgttggagaaaaggatttgaagtattttgctgtgtatttaactaaactaaagatagaagacaaaagtattctgcccaaaaagcaagaaattaaaagacatattgtagagatttttaaattgagagtatcatcttttcataggatttacagcttcgcttttatcaagatttacaacaaatttcatgccttattttcaatcgagaaatgtctgtcttggatacattaggtttgtaccatggaaaaacatcactatagatgttttatcttgattttacatagctgttttctccacaagtgaatggtatttaggctgactgtgttttattcctacctgttaccaggaactccacgaccttgttagagtacatgctcagcaagtgctaacagagtgagtgaataaaagaatggttgataaataaatagaaggatgaatcattgtgaggggagactctgttatattgttaatatgacacatacacaggctcattcccaccccattagtctcttcactgcccctcttacaactttgtttctgagggtgtagattagagggttaagactaggtgtgacaacagtataaaagagggcaatgaacttgccttgatcttgagaatttcctgatggtggctggagatacatgcacatggccggaatgaaaaagagagatacagccataagatgagctccacatgttccaaacactttctgaagcccagtggttgactgcatcctcagtatagctcggacgatggcaccataagaagtgagaatgaggatgagaggtatgagaacaaatatggagcttgtgatcatgagggtcagctcattgacatgggtatcaacacacgataatcgcagaagtgctggaacttcacagaaaaagtgatctacttggcggtgtccacacagaggtacccagaaggtgaaggaggaatgaagtgctgagttggtaaaaccacttacccaagaagccacagccagcaggtggcagaaacgagggtgcatgaggacagtgtaatgcaaaggtctacacacagctgcataacggtcataggacatcaccaccagtaggacacactctgtggttcccagtgcgagaacaaagtaaagttgaatcatgcaaccagcataagagatggtcttttccgggccccagagattgaccagcaactgagggatagagctggtggtgtagcagagatccagaaatgagaggtttgaaaggaagaagtacattggtgtgtgcagatgggagtccaggtatgacaggatgatgatgaacaggtttcctatcagtgtcatcaagtagaagatcaagacaaccacaaagataactacttccagatgaggccaattagaaaatccaactaaaataaagtacccctcagagctagcattgacttttccatcatcattcatttcctattacctgagagaaaaaaaagaaaggtaaactcaaaaaacgagtaaacaaatgatccaaaaatatcagcacacatgaataaaaaataaaagccagtttgaagggcttgccatcatttaattgtaggacaatttaaccattagtagtaatgaatttaacaaaagaagaattataaagctcatactgatataaaaagtaaaagaataaataaatgaatggtgaagataaagctattccttacagtagatccctaattaacaaatatagaaggggtgacggtgttaagaaaaacataaatgattgcaaaaactagtggataaaaatttgatggggaacagaatatgtacaaatatctaaaatagtctaaaatatctcctcacaactttctagttaatttcaaactgaaaaacagtaaagtttgtagtagaaaaacctgtcagacaccaccataaccagtgattttattgatcttaagatcaactgtatttgcacaaaccaacatcatgagcctgctgtgatgatgctctgaacaggacatgctgtcacttcagtgatatttgtgttaaaaattctaataatgaagactaattctaataatgaagacacatgagaaaaactcaaattgagagaaatagcttgcctatacaattcagaaaagtatcaagtttaagtagaaaaacaaagggtgaggaactggtccagatgaaaagagactagtgagatgtgatttctcagtgtacaatcctggattttttcaaaaactagctattaacaaaattattgagacaatttaagaaatctcagtgtggactatggattagataataatattgtgcccatattaagtttgctgatttgggtactgtgctggacttatgtaaagtaacatccttttccttagacaaaaaacactgaataaagtatttggcataaaggaacgtgtcatctccaacttactctcaactagcccagaaaaagagatagataggtagatagatagatagatagatagatagatagatagatagataaatagatagatagttgatagatgatataacaaagctttgggggaaaatgtaaactaatactcaatctggtaaaagggtaaatgttagtcttttgtactacttttttgcaactcttctctaagtttgaaattttaccataataaaaagtcacaaaaatacaaaataattttttaattttatattttatttagatgtttgccttattatagaaaaataactatcaagttctcattcattttagggtgacatctaggtaaatggtaattgaaggaaattcctaacctagctaaggaagataatttccataaaacacaaaatctttctttgttaataaataaggaactttagttttcttttcagcattttcaggttattttcttaaatgtgattgtggaaaacgtaatcattgcaatcacaataatcttacatatggatgaaaagatatgtggaaaatattgaatttagtcatttcaaaatgttcgcctaaagaaaaaatgtttagcttcaattagataagaatcttatcttgtgatttgtttacttggactcaaaatgtatttctaaactgaaaaattgaatacaagtagagaagacacagacacttgctcatcaatatatgggtattcatgatacgaactaagctaaaaatctggggagaacagtgatagaatgctttctaaaggatgtgtgactacaactgaatttgaaaagattcaaactttacagaaaggaaaggaagataaaaattcagtgagagaacagagaaggaaggaaaagtgggaggggcaggaaaatggaggagaacctgagtgtagttcttagagttgcaggtgtgtctatcacagcgttcaagaagctgaaccacagggcctgaagaaggtttctacatgatgtatttttctccaggacaataatttagatagtatataaattctgagcatgagctataattagtacatatttattctccaagttagagagttctgaatatttaatgaatcattaagtggctgttcatcatttaatacattgtgcccagtgaatct

SEQ ID NO: 585567 - DNA, 4001 bp, Homo sapiens
ctttctagatctatctagattggctactattattaaataatgggcacttttagagaaaggtatcagatcatggcaaaaataaaagtttaattaaaaagtaatcacattgtcccataaaagctaaatattatattatgataaatagaaataaaaagatttattctgttatgcaattccactacatataaacattaccacatttctaaaaattcacgtaaatccgccagttccacagatgtatgtcaaaagcctaactggtttcaaactagtcatattatctttccattaagttgagacaatcatggaataaacatttaacgaatgaaagagaaattgataagactgtgtcattacctttaaaaccctttaatttgtggctttatattacgatagagtagtaatagacttaaatagcagagaccctttactcaagatatcgatttgaaatttcattgaaaaaagagtgaattgttttaaatggggcttatgacaattactgtcttataaactgcactgtttgcatcaaacacaaataaatatttgggtggcattacaaaagattgggtgtacaaaatcattattgtgtatatgtatattttttctcaagctccaatagaatgaacattatgggtatattatttaatatacacaccataatgtatatgaaaccatttgctcaggtctatactttggaagaggcaaggattaacattgaaaatacaaaactagataaccaaaacagtttctatgtggttttagaataaattaaatgcattcaaatttatgtttacatcccatttgtgttttatttcaagcaaaaataaaatttctaatgatctgttttctctgatgatataccaatgatcagggacataaaggagctaagtagaatggttgtaattttgtttgcatctacaaaatgtttgtatataataattatatttatggatctccatgacctaggaattacttgcatttgtaaaaattaaagaaaattagaaaacatatttaattgccttattcactctagtctttatctatgacttgcaattcctctttatttttgtagatttgtggtgaaatctcatcagtttcttcagggcatccttcatgtccttatttcttaaggtgtaaatgagcgggttgagacttggagtgatgacggtgtaaaagagggtgaggaacttgccctggtctttggaagccctgttacctggttgcaggtacatgtagataatagttccatagaacatagacactacagtaagatgagatccacaggtattcattgcttttcgctggcttgcttttgacttcgttctcagcacagctttggcaatgtagccataggatataagaataaggatgagaggtgtgaggacaattataatgcctaaagcgaaaacagacatttcaactgttgtggtgtctacacaagctatcttgaccagagctggcaactcacacaagaaatgatccagaatgttgtttccacatgtgggcaaattcagagtgagtgtacataatactacagaattggccaaactaatactccagatcatgataatcatctttagacatagatgtgggttcatgactacaaaataatgcaagggcttacatatagctgtaaaacgatcataggacataacagccaggagaaggcactcaactgagcccaaccacatgtaaacatagagttggatgatacaacccacatagctgatggtcttatcaggtccccacaagttgaccagcatctgagggatgatgctggttgtgaaacatagatctaggaaagataaatttctgaggaaaaagtacattggtgtatgaagctgggaatccaggagagatgcaagaatgatggctgtgttacccaccaatgtaattaagtagaagatggcgacaactcctgacaggatcatctccatttttggatggttagagaagccaagcagaataaaaccatgtaaagaactataattgctttggtccatagtccttcaatgtctaaatcctagagtgagaaaaggaggaggaggaggtagatgatgatacaaggataaggagaaggaagaagaaggaagaagaggtagaggaggagaaggaggagggagaggaagaagaaaaggaaaagaggaagaaacaatttgtcaacatgaactatctaaataatttgataaaattagaactaaacaaagagagataatttatgttactaattgaaaaaatttaatggataaaagtaaaaattacagccaagaaatctgctatttgtcatagattcttttatggcaatgagtttaatattagattttttaaaaaaaatccaggtgaccttggggagttcacttttaaacttgaggtctgaattatctaacgtgtagatttgaaagtttgaaatagatgctggttctaaaatgaccctatgattctttataagctagttagcttgataaaatgaacatattcttttatttgatcagtaaattcacctataaaatttaagtactgggctaatggtaggatgaggaaaagatgtgataacctggaggatgaacctggggacatcatgctaactgaagtaagctgaaagacaaatattgcatgatttcatttatatatggaatccaaaaaagttgaactcatagaggtagagagtgggggcaggagatggatgggaaaaggggagatgttgatcaagggtactaagtttcagttagaaaaaaggaaccagttttagtgatctcacagaatggtgactacaataaacaataatgcattgtttatttcaaaattactaagagtagattttaagtgttttcaccacaaaaaataagtatgttaggtgatgggtttgttaattagcctgatttaatcattacacattataaacatatattaaaacattatattgcaccccataaacatatacaattgttgcttaattaaaaataaaccttaaaaaagagtgaggaaagattgttcttcttttttcatatcttagtgactaagcacctttgatctcctagtttgttatgtaggacatctggtgtttacccttggacgccttgtctctctcattcttaacgccttatcaccaaaactggtaaatttggatgcaaatatatatgctaattatcctatcactttaaaaaatccctaccaccacaaccctaattcaaatcactatgatttcttttctggattctggcaatagtcttgcatccagtccttgcatccagtcttatgcctttacattgttacaacatttgatgaaatcatgtcatccatctccttaaaacttgtcagccactttacactacatttaagaaatactatattgtatacttaaaattttgctaggagggtagatcttatgttaagtgttctcatcacacgcacacacatacacaacacaataaagaaggtgggaggaaactgttggaggtgatggatgtatatatgggatagattgtgttgatggtttcacaggtatatactcaccttcaaactcatcaagttgtatacattaaatctgtactgcttttgtatgtcagtcatacttcaataaagtggtcaaaaagctaatataaaacatttggttaaaaaataacagccattagccaggtgtggtggcgtactcctatagtcccagctactcaggaggctgaggcgggaggatcacttgagcccaggagtttgaggttgcggtgagctatgattgcaccactgcactccaccctgggtgctggagcaagatcctgtctcaaaaacaaacaaaacccagataaatatcaaactggtgcttcttctctctctttatatagatgtagtacaaaaagttgtgctttttttgtttgttatgccatttcaaatatgtttttttgaatgttattaagaaattacttccaactgtggccatgattcaaaagtggatacatttgtgagactaaccggagatggtggttgaaatagccgttttgagaaaatcattt

SEQ ID NO: 585568 - DNA, 4001 bp, Homo sapiens
atttatttctctcttccaccacttagtcttccttcccatttgtcttgacttcataactgtactttacatggtaataacacatagaaaatagtaattaagtacttttacttttaacattagtaatttctacttttttttctaaatttagtcattatataactaagactttttattccccatcaaaaaacccttgttttttctgtatgttttatctgattctgttttctaaatttttagcgaaaaaagtttcccaaatttaagatactctataaaatagtaatatgttttggggacttagttttagaaaaatccctcaggaaattctgccttttgaatagaataaagaatgcatgtcaaatgggattgaaaattatgactgtcttcattccaatgtgaagataaattggccttggcccatgcagcaggtgataaaattaaaattagctaccaacagatctggaggtaaaacatcactttactgtgtttacatttcttaatctattggtgatgatgttttattaagaagggcctactaaagaaagaaaggtcaaaagcatggcttaagtagtaagaacagaaaaatatgacacacatatgaggaatgtgaagaaaaatatttcacattatttaatatacagaaagcaatatgaaaaagcagggaaattttcaagtgatgaagtccattaaacaaatatctcatgaaagagggaaacagtctttgaatgcaaaattcaggaatggaaaaataaataagaagataatatctaaagagagcaacattgatatctctcatagaactaactaaagctcaagaataagtacacttagactggagtgtatcaactcttcaatatctgtcccaacattgcaattatcttttaaactttcaataaaaacagctgactggtgaaaaagttaattttgtagtataagattattgaacctgtgaggttcaataagtgagtttactatccaaagaggaaattggtggctgccacttgctccctatagttttgacagcttctttgatgtccttattcctcaatgtgtaaattatagggtttagcatgggggtaacaacactgtacaacactgaaaccaacctatctttctttaatgagtaagttgagatgggccgtacatatgtaaagatggcgctgccataaaagagaaagacaatggccaggtgggaggcacatgtagagaaggcttttcgtcttccctctgaggactggatcctcaagatggtggagattatgcaaatgtaggaaagtacgatacaaaggaaaggagtccaaccaatgaagaccccagtggatagcagtgccaactcattgacagaagtgtttccacaagacaagatcagcaaaggggggatgtcacagaagaagtaattaatctgattgttgccacagaagggcaggcagaatgtcaacactgtatgcaccactgagttaaggaaaccagcagcccagcatgaggctgctaattgattgcatagaaccttgctcagaataactgaataccttaaaggattgcagattgcaatgtaacgatcatatgccattgctgccagtaggagacactctgatcctacaaagaaaacaaatgcaaaaagttgaaccacacaccccacataagaaatgctttttttctttgagaggaggtgcaccatcatctgggggacattgctggtggtgtagcagatgtcaataaaggccaagttccctagaaaataatacataggtgtatgcaggtgtggatcagtcacagtcgtcaagataattaatatatttcctcccaaagtacagaaataagtcagaaagaagatggtgaatagtaaaaactgcaattcatttaggttggagaatcccaagatgatgaattcagttatagctgtttgattctttctttccatgatgtcgcctggtttcctttcaggaattgggcaaagagaagaccagattataaaaatgaatcatatgctgcaatagcatgacctgaaaaataagggaaaaaacggttacaaataaaagtaatcaccatttatgtcaaaccagagaagcagcattcttttgcaaaccatagctcctacctaccatgcaacacagatataaatacatccaatgtttcacctgcagatcaaatctttttaaatatacaacactggaagttttaaattagaatacaaatggacaccatatgtcctagagttctctgttaataatggctgggtcatgctcaccggcattttcttggggatgtgtgaacttgtgctgtagaatgcgatttctagaagaatctctggtattcatttgcttctttgaagccatccctgctctcctttttcatacttcaacgttaatataaattttgttttatattcttttccgattaaaattaatgtatttgttttagaatatttgggaaaaatatagaaaagaaaatttaaaacattaaaaatctttagtagtcaccagagaaaatctctattaatgatttggtatatgttcttctgatccattttccatatagaaatgttgaatagaggatcaaaagtacctattttaatctgatttttccttaattttccgtggcaatacattttatgctaaaacatgatctttgagttgtattcaagtatttgtatgaatatagcaaagtttttatatatcccacccttattaatgaatatttatattgttttatttgttcatttttgatatgataaatttcaacaagaagcatattgaattagattccctgaatttggggttaggttatctgaatttttataaactttccaagagacttatcctaatgaattagaaacctattgctatagatcatcaatctggaaaattcaagagctatttggctggtgcaggaattagtgtctgtttcaacaaattattgttaagtgcttcatatagaaggatgctgataatctctgagcacttcctacacagcatctcatttagtctttacataaatcctttaagataagtaatatttatcattcccattctctggatgagagcaccaagcctcagcaagataaacgtctggaagatgtcacgcagctagcaggtaaaaaaaaggtaggtttatcactcccaaagctaatatactttcagttgagtggctaaaaatttaatttccattaacttatgacaacagaatgcccttaaaaaacacttctcttgttttgaatataacctacgttcatacaactgaattattttaactggttacaaattgttatgacttctatttctgactgttaatggcaatgtgctatgcctgcagtgttttgatggttaaatccaattgtttctaaatacctggtttttatttgaatatgtttatttgaacaatcaatttctagtgtagttttttatttcctggaccagctatagattaatttaaatgttcatgtttgtgttattaaaagatactcttctagagcttagtttaagttggttaataaaaatgtttaataaaattaaaacagttgtagggagaatcccctaatttaaaatgctcagggcctaattcaagtgagaaaaattaatctgcagtttgatgtttgaagcaaattataaaaacttagataaataaaacaaaataaaaacttaaaaatgaagataattgttgtatattcattcaaactatatactttatcgattgccctcacctatagacaaatatgcatttcaatgtcaagtttgagaggtggcttaattgtgcttttgttgtaattgctgtcttctttcctcgtgaactactgtggatatttttaatgaagggagaggataagttgaaaaaattcacataatatagtatttcacattaccacaactgaataaattcactgggacaattttcattccatctacagaagaactccaaaattgtattctcaaatcaatctttttccctattccaaatctctatctcccctttcatcttttttaacatttccttccacttctgaggag

SEQ ID NO: 585569 - DNA, 4001 bp, Homo sapiens
gatgaaagagacactaaaatgttttgatatgtttaaggaccgggcgtggtggctcacgcctgtaatcctagcactttgggaggccgaggctggcggatcactcgaggtcaggagttcgagacccgcctggccaacatggtgaaaccctgtctcttctaaaaatacaaaattagctgggtgtagtggggcatgtctgtaatcccaactgcccgggaggctgaggtgggagaatagcttgaatcggggaggtggaggttgcagtgagccgagatcgcgccactgcactccagcctggtaacagagcaagactctgtctcaagaaaaaaaagaaaagaaaaagaaaaaaagcttgcagttccataaattcatgaaatagttcttaaagcttcttattcatgtaaggtctcatcccaatacagacatttgttataataccaaaaatgctttcctgaaaaatcttactttctgcaagatacataaaaataagaggtgcttatgcaatcaacaggattaagggatagaccattcaaaacctacagaacattataaccaggacaaaataaaaccagtaccatttctaataaaaatactacctttgaatctctactagcataaccttaaaccccagggcttgtcctttttccttgagatgtagtctttaaaagcactgcttctcataaaccgttttaatcaaaataaaaaatcagatccatgacatagccttcttcatcaatccattgttttaacatagggagaatgtagcttcttcatgtgcatttttcagctttctcagacagcttaacttcaggggcttcccgctgcacttacaatagaactcaaggtcttactttttgtggtccagaacagcgctgtccaacagaactttctgtaatgatagaaatgtcctatatctgcactatctaaaatggtagctgcagccacatgtgatgattgagcacttgaaatgtggttagtgcaacggagaaactgaatttttatttaatcttactttattttaactcaaatttaaatagccacatgtggtgagtgactaacacattggacaatacagctctagggcttatcttcttaccaactacactatgtcttgcaatttcttgccatctaggtagccaacatgaggaggtctataagatatcccaccacacacacccgcatccacattactttttcattctcatttttcatgacgctcccactctttgtctactttctgattatgatttttaaattcctctaatatgccattttatttctatcttctgggccgaagaaacatgctgttctctctgccctcctcgccctaatccttaacctaacttctactcatttttcaggtctcagcgaaagggtcactttctccaaaaagcctccgctaacccccgacaacctatattaggttcttcccactcttctgttgtctgcctagaactcttttccttgctaacacttaaaatttgtgatcgtcagtttatctatgtttaccgactttcttgactgcagaaactgaatctgttttgtttaccactgcatcttggtacctaacggagtgcttggcgcacagtatttgtgagatggaaaaatgagagactgggccacatcatcaggacatccgacctccaccaaccagaacttaaaaatcctcctagccataccacaaggcagatccgcgtcctcgctccccaagcaaagttggcctcaactgatctggagcaaggacgcctcagctcagtacgccgctccctccctcctctccagccagggaagggatgcctacgtaacctcggcttcatcccttcttcaaaggggaatgaggcagcggtagagccacagtgcgcatcggccaccacataccttagacatcgaggacgtagccatggtcttactgactctgcgtattccagatgcactcgggatttcccgcgcgccctcgcggctgcagggcagaggttagtggcgagccacacggctccttgattggctggcatcaccctccggggcgggtttccggcgcggggaggcgggtcgtataaggaggtggggcgaggccggaactggcggactgcggcgcacttccgtagaggtggacatggcgtgcggctttcgccgcgctattgcttgccaggtatggatcccggagcgcgcagaggagtccctgaggagctagggaccccaaaggcctttcaccgctgcgggccagtcctcagtcagctggagggtgggtcccacggaatcctgttagtttctaccacctcctcccccttctctggagctggtggagcttcagaagtcctgtggagcgtcggctgggatcagtttgtctcggtgaaaagtaaactttgaaaggtacctggtgctttcttctctccttcccaccccacagctatgaatgctttacctgggtggcggcaagtcattagaccatgattagaccccatagaagttagtgttctttacactttagtgacattgatgatggatctggattgttcttcagaaggacctcattttaaagctgcttatttctcttgcagtcacttaggcagcctaccctagaattgtttttggtaacgcccaaagatataagagctatctgagactcagtttttcttggttcagggtcgtatttgaacagctctgttgtgaggaagggcttacaaaattgcaatataattgctttgttttgtttttcctttttgtggagaacggggtctcgccgtattgcccaggcaggcctcaaactcctgggctcaagctgtcctccctcctctgcttccctaagagccgggattacaggcctgagccaccgcgctgggcaaaattgcagtataaatgtggaattaatcaaaaagaatttttaagactcattggccacccttgcaaggaaactttctattgtggtcttggctaacccatttccttctgattaatggatgtactagtggacgtaattagcctggtgtataatttatcttggctcatttttacagtatttctagacatttgtggggaaatccctctgccttgtctttatgtttatagatgtactgccctgtccggtgataattcgccaaatatcaccaacatgacattttgttaagacagctgaatttattgctcactgggataaggaagaacaccactgagagctttggtagtgtattaaactgggaaagcaaggtcagattttactgatgggtatggcttaaggctggtctttcagagggagagggtaggagggtgttggaggaagatggcttgattagggttggactctgatctgatacagcggtttaagattgataggaaaagcaaagagtgcaagaagccttaaggcataaactattgaggttttctattggaagaactaataggcctggcatgtggttcatgcctataatcccagcactttgggaggccaaggtgggaggatggcttgagcccaggagttcgagaccagcgtggacaacataggtagaccccgtctcaacaaaattttttttaaaaagtagccaggcatgatggtgcacctctgtagtcctagctgcttgaaaggctgagtctggaggatcacttggacggacccacgagtttgaagctacagtgagctatgattgtgccactgcactccagggtgggtgacagagcgagaccctgtaaacaaaaaataaaaataaaaaacgtgaaaagctaatagatttctcatgaagttcttataatgaatgattaagttatttgggcagaagtcttctagaacagtaaagttatgctaatgaagacaaaaaataataaattcatgttaatgtagacagtaaaccatatcagggaaggtagttttggaccttagtatctaagctgtgtgtaagggtggacgttttccattcttagcccttaagtaaagatagtgccatgatgagaaacaaattgtgtttagttttgcaaaggctgtgttctttgtaaagactgtaaattggaccagg

SEQ ID NO: 585570 - DNA, 4001 bp, Homo sapiens
acagatttttattttatttttatttatttatttattgtgagatggagtctcactctgttgcccaggaaggagtgcagtagtgcaatcttggctcaccccaaccttggccttccaggctcaagtgattcttctgcctcagcttcccgagtagctggaactacagacgtgtaccgcaattcttctgcctcagcttccagagcagctgggactacaggcacgtgccaccacgcccggataatttttgtatttttagtagagacgggggtttcaccatgttggccacgctagtctccaactcctgacctcaggtgatccccctgcctcagcctcccaaagtgctgggattacaggcatgagccaccgcacacagccatgacagatttattttaaataacaggctgacttaaagcaggatccaactaggtacaaatttatatttagtgcaactataaacaagtttagacaagtttaaatttatggaataattccaaccacattttcatgagactacttgctgtccccgtaatacaagaggaactttctcattctccaatcccaatgttattcctcatgtttttcctttaccaagcatatccggcccacacctcgtgactcccaccaaccctgacactctaatcttttcctagtctaaactttataaagtacttaggagcaggaattgtctgtttttctttttaaaattaagtgcctcacagcagctaccacacacctagagaacccttaaggtatgaagaatgaagagcagtcttacaatttcttaaaaatttacctcccatttacttagaggtattactatgtgttgttttctaaaacctccttttatccccattttacagattagtaaacaggcacagagaatgtaagtaacttgcccatagtataccgctaataagcagagtggaactggagtcctggccgctagctagctccagactgttcacatcactaagatgaagtcacaggcaatatctcttttaattcttccaacagccgcattaggcagatgttctttccactttatagaggaggaaactaaggttctgagaagataattaatccaaggttacatagttagaagttggtggacatgaacatttctggctacaaagctcaaatttctaaccactaccagtgtctccaccccacttgtttcagaaaaggatccttcctggcaactccaggtgaagatgagaagaagccgtggtggagtgggtggaggaagagcaagagggttggggaatcaggacccccaagaaaaccaatcacacctatatgaaccaaagatgtccaacagcattcttggaagcaaaaacccaaatcccaagccccataatgccaccccctttttctgatgacccaactctacagactcagtccaacccctttttcttactgttggggaaactgaggcccccagcgctgaccatcattacaccctcctcctttcccaactctcctgagccacagtcccggacgtggtcctgtacccacccccgcggctcggctgatgttgtccatcttgctgacgacctgttggaagagggggtagcaggtctgacagaggcgcacgggccgggcgctgcgcaccagacaccctgtcagctctgcgctgctgttggcgaagtccagcaggagctcccggcactcaggatccagatccggcaggtccgggggcagcgacagaggccccagccctccaccctgcaggagggacagggacaagtcctccacctccagcaactgctgctccgacaggaggtcgtggaagaccctgtgcggactgctgccgaaggggagcgcgcccagggccagccccgaccacagcagcagccccagcggcagccacggcggcaacgaacacctccgctgcgcggctgtcgggcccggctccatcaccgggctcacacaccccagggagcccaccgccgcctctccgcccccagccggcaccgcggacagccgccgcttccggtttccgcgagcgcaggccgagagccgggtcacgaggagggcgcgtcacggccccgccccctgcgcgcggcgccccgccccattggctgccggctgcctccgggccgcaggccttcgcgcgtgcgggagggcgcctaccctgcggccgcgcgctctccagccggcgttaggcgcggggcggggcggagtggtgcattggggtatccgtagccgaggctcgccagccggtgaccacgagcacccaccgctttggacaattgcatctcgggggtcctgacccttgaacgcccaaccctctgggagttccgggcgtcctacaagtttcttacctcgctggaccgacgacggcctccgctgtggaaatggccgtcggctgcgttcgcagagaaaccccgctggcctgtgcctcggcagattttctgcatggtgttccttagcgtagttttttcctcatcccatttggagagagtaataatgcccgttggttattataggtggtggagactagcggtttccaagctttttgtttttgtttttaaaaaaactctcaactgtctgcctcagcgttgtcagaactctgtgagatgagggaaatattctacatctgcgttattaaggcagccactggccacatgtgtggtgttgagccggctgaggaactgaatttttaatttaatttagggccggcgcggtggctcacgcctgtaatcccagcactttgggaggccgaggcaggcagatcgcttgaagccaggagttggagaccagcctcgccaacatggcgaaaccccgtatctactaaaaatacaaaaattagccgctgggcgtggtggcgcaagcctgtagtcctaggttgagcggggaggatggcttgagccaggaggtcgaggctgcagtgagccgagatcgcgccactgtaccccagcctgcacgacaaagtgagactccatctcaaaagtaaaaagtatttaacttaaatgtaagtagccacatctgtgtagtggcaactgtacttgacgtaagtctggtcctacagtggccaacaagcaggtttgcttggaactgaaggggtaccagggacgcagcgcgttcagtgctaaagcccaggaaatcctggacaaactgctcaacttgaaactcctatccagtttctgacatgcccgaggcaatagcaggggacactctaaaaagcgtcctgataccgttgccagtctgtaaaaagaatttaagctcataacctggaaaacagttttctgacaagtatctgaccaaccaggttggtagaaaattatttccgggctttgtgtcatcctgcttttcagggttgtaatttttgccttgtaaattgcagagctgttgcactaaagtctacttagcttagggtcctaatttatgtttctgagggttcttcaaaaacttttttgttgttgttgtgtattttgtttggtttggttttgagacatagtctcgctagactgcccaggatggcctcgaactcctaggttcaagggatcctcctgcctcggcctgccaaacaattggactacaggcacaggctgctgtgcccagcctgggggttcttatagttactttttaccccgtctgtttggttattgttttatgttcctaaatttgcttgggatagctaaattttgtttcatttttgttactaagaaactgaatagtaggaaatttgatttgtgtaacaataaacgtatttccaaaagagaaaataagttgtcttaagttttgcaaaagtcatcatgtaactcttaggtctttctatgtattagaattatctttcttttaaattctttcaagcaccatcctgtgttgcaggtggatgtgtaaattgttaacttctatggaaatcaatgtgcagaaccaacaaccttgcaaatgcacaagctctttgatgcagcaagttcacaaccttgtcatagacacttattcattacaatattgtttgtagtggtaaaaggatggcttcaaaaagcatgttaaggggc

SEQ ID NO: 585571 - DNA, 4001 bp, Homo sapiens
gcagacagctaaaatatttgtatatatttttaatcttttttctctaatgatacttagaatattttatttttattactacaaataatagagatgaaatatgaattgtattagtagcagagatatatgagctaaagcttgtattgtttaaagcacatcatcttaaaaggcctgtcaggaaacagtgttcatattaagttggctttcagtactctaagaagatgacatcattttgtaagagacaagtgttgttagagcaaatgctaggatattctaaaatttcctaggttgaagtgaagaaatttctcattatagattatttcatgagtttatgttcccggttgtatatcagctcatgttaaattttgcaagagtttatgatttctaagaactcaccttctataaggccctttgctgagtggggctagttaggaattagtaagtaaaggggatcttttttcctcgtgtaaatagcttaagagtaattttgggcggtccagaaaccataagttatcaggaaggtgcttataaatgggcagagtacatcacttgcccaagattctaacaacctagcctgccccccacacactgtggggcaccgtttgctacttgccaagtaactgccttttttggcaaagaccacccaggacatggctcagagtccatcctaaggctggccaacctctgtaaatctcgtgtcccctgattcagagcgagtgcatttaattcaggaagatcacttacgactgagtttttcatcatggctttgactgtgaaaccctcagaaaccagagagtgaggctggtgcaccgggagcggctgttgtgccagcagcttggtcctcttcggcatcttgtctgggcatttgtttaagctcagggtctctttttctgccaccatcttcctagaaaatgtcttgttctcataaaaagtgtagtaaaagaatcagtgggctttacggatgtgagcaggaggtctggaaaaaaatatcaaaaggcgcgataatggtagaaattcaacccctcgtagtgcccaggttgatccagatgtttggcagctcctaggtgaagggagctggaccctaggggcggggcgggaagagggcaggaccttggctagagctgcaacaagcttccaaaggtaagcctcccggttgctaagcgactggtcaacacggcgggcgcatagccccgccccccggtgacgtaagattgctgggcctgaagccggaaagggcggcggtggggggctgggggcaggaggcgtgaggagaaactacgcgttagaactacgactcccagcaggccctgggccgcgccctccgcgcgtgcgcattcctagggccgggcgcgggggcggggaggcctggaggatttaacccaggagagccgctggtgggaggcgcggctggcgccgctgcgcgcatgggcctgttcctggcccgcagccgccacctacccagtgaccatgataggtacgtgggtacctgccaggtacagcctctctgcgccgccccacgccccggtatggcgccacgccccgcctcggccgaccaggacccccggtgccaactgtcaatgacggggccaaagtgcccgtgccgtccccggcccgcgccgccgggctccccagctcagcgacgcgggtccggggccccagtgtgtgcgttcgaagccctcgcctgcccgcccctgctctgagcgttctcatgaagaccgcctcgacggggacgccaggcggccccgcacccccgctcctcgttcgcggtcccccggaccgtgtggggtcccgaagccttctccccgccgccgcccctcaccttcgccccgccgccgcccctcaccttcgcccctcacctcactggccggttgtggtgcggttcaggacccatcgagacccactctctgtggggctctttcaggaaaccgcagcaaagcattaaactctaatggaaggcacctggtgagggtggctggctccacagaaactcctccagatagatctaaacttgctccctcggatgtttccttttaaacttctcattggagggctgagatgaaagaaacattaagagtaaatagtagccaagattaaatctattgccttttgcaaaataacctttcttttttttttttgtaaaagaacgaccgaggtgcaagtttgtgaacgaaacttagtggcatcagagttgttcatgaacacttgatgtgtaagatgagcaaaggtcctctcttccagggttgttgagccaaaagttactttaggggctatccctgaaaattaatggaaatgcaccatatgtttgaaaaacagtgctagatggggtttcattattgtggaggtttctccaggttatgtatggagggtttagtgagcttgtttattcctgaggagggtcctttacaaaacacttttgattgcagtaagtacgttcgaagtcagatgtggtctgtccagaagaaagatgagaggtggatttataaagtatatgatctttatgcactgaaaacacttcttacatctgtttatttgtgaagttattgttaaaatgtaaacattctccccatcagtgggagaatcaagccagctaactggcatggtctttgtggtaaaacaagaatgttgtccaacttttcttccctttctagcatggtctgacttttggtgaatgacttgaaagttaatcaaattacgaaaaaaatattttttatgagtcttcttgagctctttttaggtgacatttacgtaagattcacttgcaagcacaagtttgaactgaatcagaaaaccaagtagaagagattttccaatatctgtgctgtcagtctacaggaagaaaatagcctataccttattttgaagacagttaaatacattttattttaatttaacttaatctagtgcacagataattttaagagaaacaaatttattgtaaagctatataaagacaagcacttaagatctaaagaacattactcagttataagttatgacctaataagtgattatataaataactttattaggatgaaatgtgtttggacagttctgtttagttttatctggaattcttccaataaggaagaaatatctttggagttgatgattaaacagttatcaattactggtaatgacatggagaatataaggttggtttttaaaagtgttatttctctcactccagccatggttttacatagtgcaaataagtgtgcagtacaacataaatgattaaatccatgcctgctttccctaggaaatgtgccttacatataagatcatggacaatgtgcaataaaatattcaactagttgcattgcctaattctgaaattagacacacgtcttttttttttttttttcctctttttgagacaggttctgtctctgtcacccaggccggagtgcagtggcaccatcacagctcactgcagcctccaactcctgggctcaagtgatcctcccatctcagcctcctgagtagctgtgactacaggtgtgtgccaccatgcctgccaattttttgttatagtttttgtagagatggagtttcataatgttgcccaggctggtctcaaactcctgggctcaagcaatcctcccgcattcgcctctgaaagtgctgggattacaggcatgaaccaccacgcccagcctcattagccacatttcagtaaacatctgaatggtcagtttgggatttgggtgtcgtgaacagtgctaaaggtaggtgaaagtgaaaaccattaaaaggaagccttggagtgatgggttttgtgtttttgtgacaaaaattcagagccaggaaagacattatagactttatccagtgatcactaaaatgtaaatagtatgtatctgggattttctgttaaaggtaagagtgcttctcaaagcttgctcctttcaggcctatgctttctctaactattacactcaccttgttgcgggattcgggagtatgagggagacctcaggttgaagcaggagaatctttattga

SEQ ID NO: 585572 - DNA, 4001 bp, Homo sapiens
gtacaagattttcctttagaacataaaaagagaagataatggatctcaattaagttgtttataaagaagcctgcttcataatcaatgttttttttaagtcatgtaggcatacttattacatttggcaatacagaaacatcagattttgcagaactatctctttaggtgtaagattatattaaagaattaatatgatacaagaattatgaatacaggtttaggaaaaaacagaaaagaaccccaaccagtaaaaaaaaaattaaagtataacattaaaaaacatcaaaattgtaaatattgtgtagaagaaaaactaaatgattaacctgaatggttatggtattgctgataaatgcatcatcttgactcctaggagaaccaatttatgtgaaattccatgaaaaagaattagttacaacaagcagaattttagtccatttccaagaattttaactactgtaaatcacctgacacacttcccaataattaggatatcgttttgcatagccacatgggaacctggcctagaggtctataggtaatctgtttcattcatgtattttaagtatgtcgtttaggaataagttatcaggtttgcaacctataagcaaaggaaataatgtgacactggaaaacaacactattcatttaacataatgaattgccatgtaataactcagatcttcccagggtgtaaattacacaaatttgaaagatgcatttattatttaatgcctcattcccagacagttgcttactcagtagcaaaatctgtcttagcataccaagtgtaaagctatttaacaaataggaaggtttaaaaaatatatactatcatgcagacagctaaaatatttgtatatatttttaatcttttttctctaatgatacttagaatattttatttttattactacaaataatagagatgaaatatgaattgtattagtagcagagatatatgagctaaagcttgtattgtttaaagcacatcatcttaaaaggcctgtcaggaaacagtgttcatattaagttggctttcagtactctaagaagatgacatcattttgtaagagacaagtgttgttagagcaaatgctaggatattctaaaatttcctaggttgaagtgaagaaatttctcattatagattatttcatgagtttatgttcccggttgtatatcagctcatgttaaattttgcaagagtttatgatttctaagaactcaccttctataaggccctttgctgagtggggctagttaggaattagtaagtaaaggggatcttttttcctcgtgtaaatagcttaagagtaattttgggcggtccagaaaccataagttatcaggaaggtgcttataaatgggcagagtacatcacttgcccaagattctaacaacctagcctgccccccacacactgtggggcaccgtttgctacttgccaagtaactgccttttttggcaaagaccacccaggacatggctcagagtccatcctaaggctggccaacctctgtaaatctcgtgtcccctgattcagagcgagtgcatttaattcaggaagatcacttacgactgagtttttcatcatggctttgactgtgaaaccctcagaaaccagagagtgaggctggtgcaccgggagcggctgttgtgccagcagcttggtcctcttcggcatcttgtctgggcatttgtttaagctcagggtctctttttctgccaccatcttcctagaaaatgtcttgttctcataaaaagtgtagtaaaagaatcagtgggctttacggatgtgagcaggaggtctggaaaaaaatatcaaaaggcgcgataatggtagaaattcaacccctcgtagtgcccaggttgatccagatgtttggcagctcctaggtgaagggagctggaccctaggggcggggcgggaagagggcaggaccttggctagagctgcaacaagcttccaaaggtaagcctcccggttgctaagcgactggtcaacacggcgggcgcatagccccgccccccggtgacgtaagattgctgggcctgaagccggaaagggcggcggtggggggctgggggcaggaggcgtgaggagaaactacgcgttagaactacgactcccagcaggccctgggccgcgccctccgcgcgtgcgcattcctagggccgggcgcgggggcggggaggcctggaggatttaacccaggagagccgctggtgggaggcgcggctggcgccgctgcgcgcatgggcctgttcctggcccgcagccgccacctacccagtgaccatgataggtacgtgggtacctgccaggtacagcctctctgcgccgccccacgccccggtatggcgccacgccccgcctcggccgaccaggacccccggtgccaactgtcaatgacggggccaaagtgcccgtgccgtccccggcccgcgccgccgggctccccagctcagcgacgcgggtccggggccccagtgtgtgcgttcgaagccctcgcctgcccgcccctgctctgagcgttctcatgaagaccgcctcgacggggacgccaggcggccccgcacccccgctcctcgttcgcggtcccccggaccgtgtggggtcccgaagccttctccccgccgccgcccctcaccttcgccccgccgccgcccctcaccttcgcccctcacctcactggccggttgtggtgcggttcaggacccatcgagacccactctctgtggggctctttcaggaaaccgcagcaaagcattaaactctaatggaaggcacctggtgagggtggctggctccacagaaactcctccagatagatctaaacttgctccctcggatgtttccttttaaacttctcattggagggctgagatgaaagaaacattaagagtaaatagtagccaagattaaatctattgccttttgcaaaataacctttcttttttttttttgtaaaagaacgaccgaggtgcaagtttgtgaacgaaacttagtggcatcagagttgttcatgaacacttgatgtgtaagatgagcaaaggtcctctcttccagggttgttgagccaaaagttactttaggggctatccctgaaaattaatggaaatgcaccatatgtttgaaaaacagtgctagatggggtttcattattgtggaggtttctccaggttatgtatggagggtttagtgagcttgtttattcctgaggagggtcctttacaaaacacttttgattgcagtaagtacgttcgaagtcagatgtggtctgtccagaagaaagatgagaggtggatttataaagtatatgatctttatgcactgaaaacacttcttacatctgtttatttgtgaagttattgttaaaatgtaaacattctccccatcagtgggagaatcaagccagctaactggcatggtctttgtggtaaaacaagaatgttgtccaacttttcttccctttctagcatggtctgacttttggtgaatgacttgaaagttaatcaaattacgaaaaaaatattttttatgagtcttcttgagctctttttaggtgacatttacgtaagattcacttgcaagcacaagtttgaactgaatcagaaaaccaagtagaagagattttccaatatctgtgctgtcagtctacaggaagaaaatagcctataccttattttgaagacagttaaatacattttattttaatttaacttaatctagtgcacagataattttaagagaaacaaatttattgtaaagctatataaagacaagcacttaagatctaaagaacattactcagttataagttatgacctaataagtgattatataaataactttattaggatgaaatgtgtttggacagttctgtttagttttatctggaattcttccaataaggaagaaatatctttggagttgatgattaaacagttatcaattactggtaatgacatggagaatataaggttggtttttaaaa

SEQ ID NO: 585573 - DNA, 4001 bp, Homo sapiens
tttcacatgagaaggtctgccaggggaggtcaagtctcaatccggcttccaggcaggtgccctgggctgtgggcacgttgtgtgcaatgaattgggccagggaaatgtgtcccagaagcccatcctggcagccccgagccaacctgtgaagcagcaacctgacagggaggggcccgggcctagaggaggcaggccaggggctggaggtcggggccaggcctggagggcctgctgagtggacagacgttccttcagctctcacccaaagaacctgccctccaggcctcaccagcccctgctccagtggaggtgggggcggccgctgacgggcaactgaggccagcaggcctggctgcaggaggtgaggcagggcagatatcagctcccaccctggtcaggaaggaggagagtgcggggttcggaggagcaggggcaggcagtgtcagtgcgcacaggcgaatctgcatcccgtttctgccatccccgagacctgcccttctccctcctaggcccttgatcccaaagtgggagcccctgagtccagcactctgtgaatgtgcgtctaacgtttgcagaaatgagcagagccacgccagcttctcagcgtgtatgcccctacccatcatgtgacccctcctcagcccctgcaccaggccctctgacccgagtgcccatgggaaggggacaccccacactgtggtccagtgaaagacccagctgggctctcagggggtgcgggagagaaagcaggtggagaagggcaggaccttaagcacgcccatagttgcacacatcaaccttctgccccttgcaggctagcatctcctccctatgccacccaaggtggctcagctccattcagggcaaaactggaccaggtgtgccccaccgtgaactcctgtgggccccctccagccccctccctgcccagagttggggcagagggcccagctcctcccctgcaccccaccctgccccctcctgagcagctggcagaggctcctccgcagtggcagtgcccaagagctcccccagcagcagcgagtctgtccccaggagcaatgcagcagagggacagggagcgcaggagggagggccacaggcactcccaccccatcagaggcctgctccctggtaccccaacttggagaccctgggcttgctggggatgggcatgggggtcctttgggagatctgggattggggacagttcactaagtctccagggagaacgaggaaggggaagggcctgaggttggggcaggaggtagatgcctctgacctgaccagggggctctaagcccagtgcctgagaccatccagggccagcagggaggctctggtgtcatcgggggtgggaggagagtctgcttatcccaaatggccagagcctagcagtgccttgagtggggcaggggcatccttactcctccctgccctctgccgcataccctgtctagcttcagactgtgggtccctggaggctccagcctccctcggcctgctgccccaaggagggggcatggctacaaagtcaggacctgtggcagtggtggagacaagaggtacagaggaggaaaggcaacagggacagtccccctgatgaggaggatcaaggttctgacggttctgacaagacctctcaggatgctggctgcgccccacaccccgctccccagcctggtccctggcccggcccctccagctggcctgtttggctcctatcaggtgccgctggtaggaaggcagggcagccccgttccccactctccacacagcctcttccagccatcgaaatgcctacctgggcccgtgtgggcaccaagctgggggcaagtaggagcttactgcccccgctgggccaggccagggctggaggggctggctgtcctccttctcctccgtggtggcgggcggagagggggcctgctgccgggctgggggctctgtcctctagggttccctccaccgctcactcaggaaggcagcagcgccagaactgcaggagccagctccctccaccgctgcctcctccccactccccgatcccgacccgcctccttctccagccacccacctccttctgctcgtttctatggcaactgggcaatgctctgcacagacagcctccctcccatgtacagcaggggatgcccgcctcccgcacggcgccgcatcaacatgggcacgcatgcatacacttcacggccacagagacgctggtggggacacaggctcggccgccgccctcgactgggaagccctgctccatcccctttcttccctttctccccaagatcccacctcccaatcgtccttccagacagctgcacctttccatgcactttgcttgggtccttaaaatctaagcgcttgctgctgggtgaagcatttctatttgtttaatcatttattctctcatttgatgaaaattcaaaattttgagttttttctaggccaggctgagtgtgagagatgctcatgcacaacctcgtgccataaggcttcatacccatttgacagattggaagctgagggccacagctgtaaaagaattggagagtccaaggttcctgggctagctgtcggcaccgagaccttgtgatgccagttccgacacttctcccacaggccatggctgccacacaccactcaagcgcacacatgggtggccctaagcactcgtgtgtccaggacatgtgcaccccaacaacacacttacagatacaaacgcccattacatatatttgcacacatgcatttccacaagtctgtgtatcttcctacagtgcacctataacacacacacacgtaactgtgacactaatatcagcatacgcacatctttaagacacgtgcacacacatctacatggattcagaacctgtaacacacaagcccttcctacacaaactcagtgcggcacacacaagccctggtgctagcctcatgagcagggttcagggatgggagtagaagtgtcaggatcaaggggctgaataatgagtggcctcccaggggaggatttgcctgtctgctccgccccacctggggatcaggcactaatctgatctcagcagtgtctcagctctgctgctgaagggggatggggtggggttggagacagggcccaccctccctcactctcattctggaaaaccacactagatcccccctagagccccctcagcctagggggctcacacatatccctactcacccctctagcatcggtacttggagttatgacagggcacagtaaaatgactctcccagagaggagaattccaagcttcacacaggcttctagacttctgccacccccaggagggacagtgtgggtggtgggtggcaggagaccagagtggggactggggcccaggacacacagcatgccccacaggacatgctattcccagcccagcaccactgcagggcctcgggcaagggtcactgcagcccctgtgccccagggtaattctcagggaccccacactccccagagagggaagatacaacagaaaggaaccagaagccaccacaaattaagcaaaaggccctcttgtaataatgatagctcttccgtattcatcacttccaagacccctctcaatcacaaggctgctgccagtgaaactcaaacatagctgcatgaagcattccagtattagagatgccaagagataagagaaaaatcatcttgagatgcagaaatggggcatttcatccattcaacagacactgactaggcacctaccatgggtcagagatggttctagacactgagatacagctgtgggcaaaacagagtccctgcccttgaggagatgatgagctagtgggttctcggaaagcccaggcctgtctcaagggctctcctgcagtctttggctgtcacagggccttgcatggtgaggctactggactgattaggaaataggctctgagagatggagcagtttgtccacaatgacaaaggcagccagtggataggctgggat

SEQ ID NO: 585574 - DNA, 4001 bp, Homo sapiens
ctggtctaaagttggcaccccgggaagaaagtgccaacccagcggcctgaggagagccagaccttcacatcaggccttccctcaagccaggaccaggcctggacactcaaaccaggggcccataagaccctctggagccagcaggttgcaacactatctccaaaaggcatagctgcccatcaactccaggcttaggaagggcctagccgggcatgatggctcaggcctgtaatcctagcactttgagaggccaaggtgggcagatcacctgaggtcaggagttcgagaccagcctgaccaacatggagaaaccccgtctctactaaaaatataaaattagccgggtgtggtggtgcatgcctgtaattccagctactcaggaggctgaggcaggagaatcgcttgaacccgggaggcagaggttgcggtgagctgagatcgtgccattgcactccagcctgggcaacaagagcgaaactctctctcaaaaaaaaaaaaaaaaaaaaaaggaagggcctactaaagagaaccacctggtttgagtggagtggctctttggtcctggggaatagagagaaagcccaagaaggggctcgaccccctccctcaggttgccagctatttcccagagtttacattcactcattcaataagtcatgcattccacaagatattttcttggtgccaaaccctgctttggtgcaggggcaatgacagagatgaatcagattcccagcctgaaggtacttctggtctagaaggagatgaacaagacaaataacccagccacaaggcagtccaagaacatagggcagggggcaaggatctcacctggggtatcagggaagctgctggagggtgatgatttggacttgtgatagaaaggccaggatggaggatggaagcaaaatcactgacagacagtcctgtttgcaccccagctgtgccaggggctggggcaatgtgggttatttatggttgtgcctagaaataagcggccatatgtgtcactgcctatgtggtgcagacctgggctgttgtgggtaggggcagctggggcttgaagctgggtctggccaagctcccgggtttgccaccatgtctcctacaccctgatgaccctttaaccttttcatagcctcttgtaaggtgaaaataaggggcagaggcagctccaacaggcagcaagtggcctggggcttgcaggggagggcagtgcccagcagcccatggcttctgtatctgcggggccttttagcattatcgcctccttcttgcctcctcccccctccccgctcccatcccagctgtgggggaaggggtaggggacagaaggaaatacctttaaccataagccagacaggcatcagctgctgtgtttctccccagcccactctgatccataaatagcctatgcaccaagctggcaccagcccacccaccccttctggtagcagtccagagacccggaccgcccgggcccaggccccagcttcccaaggaacctatttccggcgcttttcctggggtaagggcctccgatgccagctcgctcccccaagggacccagcgcagtggcatcctggcactgcctgggtgatgcccgcgaactccgtcccctgaaggcatccccgaacgcgcacccgcttctctccaggcaactgcccaaccctgcccgggctctggcccagggagatgtcagtcccggcgcccacttccaacacgcactccctaactggacacccgcacacacaacccccccgccctctattcaagggccagacctcctacctgggggcaggagctccggggaccatcggcggcgactcggggcgaagcgggacgtctggggcccggcctcaagcccggccgacttcccgggggaggagggggctggcgctgccgccgccaccgcgtcgctctgggatctcgccggggctgcgggaaggaggaaggtcagagctgaggcggagaggggggaaggatgaggaggaggcgtgcaccgagcagagcagattagagaggcatttttagcgagccaatggtagcgcgggcagggcggcgcggtggctgcgcaggtggacgcgccgcggctgccggggaggcagcaaccagtttggcaggcgccgggggtggcgggtggcgggtggcgggtggggtccggctccccgctgcttcagccgacccctgccccagcagtcttgcctggctccctcttctgggggctgcccgcggccccgcgcgtgccgggagccctccggtgcgccctcctccccagccctcccagctggcgcgctcggagcccgggatgttgctccctgcctctctccccatctccccatcgccttggcctttcctcctctcccgagcctcggcgtcccttggtgcgtgcgggtgcctgtgtggtgggtgtgttgaagacgtgcgtgtgagctgacttgggagcgacaccccctgcaccaccgccccactgatgcccacccctgcccgcagcttctgccctgtgaccccatggggcgggatcgctaaccctcatgtcctagttccagcaggaccggctgtcgccaaagcaaactccaggccatgtcgttggagctctctagggggcttggggcctaataggggaccctcaacggccttcactcttccgaacttgagccctgaatgctgcctggagcctggacgctgcagggaggagcggggcacatacctattgaaggcctgttctgtatcaggcactgatgaggggctgggctgcagcagaggacagaacagaccaaaactctgccatctcatagttcacatgtgtgagggaagatagatactcaatatcagcagctaagagtgttttgtttggtttttgttgttgttgttttgttttgttttgagacggagtttcgctcttgttgcccaggctggagtgcaatggcacgatctcggctcaccacaacctccgcctcccgggttcaagcgattctcctgcctcagcctcccgagtagctgggactacaggcgcgagtcaccacacccaactaattttgtatttttagtagagatggggtttctccatgttggtcaggctggtctcgaactcccgccctcaggtgatctgcccgccttggcctcccaaagtgctgagattacaggcgtgaaccactgcgccgggccaagagtgtattttaaagtggtatgcacagagtagaaaaataaagcgggagccaagagcggtggctcacgcctgtaatcccagcactttgggaggccgaggcgggcggaacacgaggtcaggagatcgagaccatcctggctaaaacggtggaacccggtctctactaaaacaaaaaattagccgggcgtggtcgcgggcccctgtagtcccagctactctggaggctgaggcaggagaatggcgtgaacccggtaggcggagcttgcagtgagccgagatggcgccactgcactccagcctgggcgacagagcgaaactccatctcaaaaaaaaaaaggaaagaaaagaaaaaaataaataaataaaaataaaaataaagccggaggaagggaaaagaagtgagattgctcaggaccagaatgggtccctgccctttacatgtgtagggattgcggggtgggggtggtggctgaatttgaatgtgagcccctcaggtaggcatgcagactctagtttgccacagagctccctattgtttgagcctgggataatcacatgtttatatttcctgacttccctctccacacacttcacgagaggcactgaaattcatgccccagtgacccagggcaatgcctgaatgcagtatttattcgtgcaataagaattctctgagcactgactgcatgttaggtgttggagcctgggggaactcaacacctagctggggaggccagatggtagtatgtacgtcaaggctgaccagtgcggctaagtgagtggacaatgttctggagaaggtcagtataaggctctggtttaggccatccag

SEQ ID NO: 585575 - DNA, 4001 bp, Homo sapiens
attttttcagatattcacatttttatttgaatttattctttcaaataatgagtgcctactatgtgtctggcactattccaagcagttgatacacagcaatgaactgcgattctcccacctaagcctcctgagtagctgggattacaagcacttgccatcatgcccagctaattttggtagagacagggtttcaccacattggccaggctggtcttgaacccctgacctcaggtgatccacctgcctcgccctcccaaagtgctgggattgcaggcatgagccaccgcgcccagtggacaagtcttataaagaaaaaccaacagagtaaaggtatgtttccatgagtaccaacgtaagctctagagaatcaccaataacgaaatctcaggaactctgtgcttattgccatgtgacaatagcattaggaagtctgattggatgagtgcgaagcatgacagcaaaatacacagacacacacacacactcactcactccttaaactgaaggaactgcatcaaaaagtatttgcaaaacaaaccgaaaaagaaaaaaacccatcaaacttctttgaacatgtgttactgcaaatcaggtccttagttacagaagatactccttccatcatttaagaccaagggggcctcctttgaatcaagcatttttgcgggtctgctatggccttaaatcaaataataaccttttaaaattcacataatgtaggttatctaggctattgcttagatttagtagaagtatagggtaatggttaagagtttcaaatgtcagagaccctcgggggctcctgacattttggggtcagctgtgtcaattattatctgtgtgtccttcagcagtcacttaacctatctaggaccaacattttggtacttcatctgcaaaacgagaataactgcatcctcctcagagggttgctgtgaggactactgtgtgtctggaacacagttaagtaatttcactacaaaaaaaaaaaattaaatagcatcatctttgactattcaaaacacatcacttttcagccaaagacaaagagcaaataactggagtaggaaacaaaataaacgaaagcaataggccaagtgatatacttccaaattttctggataattaaagaccgacgccttgacttcataaagaagtactgtactcaattttctagaaaatgcttagaattgcttcaagaataaaagtgagctagatgttaggaggtcggattcctagtcgtgagtatagtcctatctacctatttgactactgataatttatttgacctttttatctattcacacatctagtaatatcatattctgctgtaatttctctccatctatgcgtctcctcagtcctccaccccttatgtaggcaacgtctctaaggcaagatccatacctccagcatctttgcatctccaccgcccagctcgccataagttcccaacaaataatgaattggtatcgctttacctataagggatttatcctaatctagttctagtaatttgtaaaattccagggcagaaattcagcaaaagagcgagatcttctttcattaaattctgaatactgtcaacttatgggatcgatccttaaatccacaatctacgactcatttgtccgtatgcagaaatgccggtttcctttgtgtcccgtggaccttttgtctactagaaaaggcagatattgcctcattttgataaaatgtccattctacggtttaaaaggttagcttttctcttaagtctcttaggtttgattcatcaaatcatccagtgaacagcaggcgctccaatgttcacctctgctgtgtaggaaccaaacccgaccttcccggccccgcctccgactgtctctaactacgcggtatctcacctcgtggtcgccgcaagcctcgggctccgggtgtacagcgaacccaaagaggacctgctcgtagcaaccagcgaccagctccattcagcagcgcacgtgcctcttccgccagcccggctcagcctggaggtgacagaaccggaaaccaaaaaaaaaaaaaaaaaaacacctgactcctttctgcatcggcgctcgaattatacgtcaggctccagggctgcctttaagtcgcctgtaacgtggaaacactttaagcgcggggaggtcacatggattttccaagaagagaataagtaaagatgccacatgaggaggttctcactgcaaggagaaaaaaatcgggggcaagcaggcatatctcaggaaggtgccagctacgcccgtctgaagggagcgggcgggacatcctctgcgaagcccttcatttccgtgacatcaggaggaggtggggccgacttccggccggttgcttaggggctgtagcgccggcagcgtgcattgttgtgggctgtgtactagtagggtaggagtttttgttcagggaccagcggaacgaggctttctgtcgttaatagggtaaggaggggtgggattagggttcgcggtgacttgttccagcggcgcagcgctcgcgctgccttgacggactcggagtgctagatgtgtccgcgttcccgtctgcccgggccagaaccccagccctgcacactttctctgtctgcttgtctaactctggggctgtattggccaaggttgcggcacctcctggggagggagcagtgagccttcatttttttttttttttttttgagacggagtttcgctctttttgcccaggctggagtccggtggcgcgatttcggctcaccgcaacctctgcctcccgggttcaagcaattctcctgcctcagcctcccgagtagctgggattacaggcatacgccaccacgcctggctaattttgtattttttagtagagacagggtttctccatgttggctaggctggttttgaactcccgaccgcaggtgatccgcttgcctcgacctcccaaagttgctgggattgcaggcgtgagccacagcgcccggccagagccttcatttgagagttgggaaaacaaagtgagcctgagcaacatattttgatgccgtctctacaaaaatgttataaattagcccagcatggcgacgcccgcctgtggcctcagcaactcggaaggctgaggtgggaggattgcttgagcccaggaggtcgaggctgcagtgagccgagatcgctccactgcattccagtctgggggacgagccaggccccctttcaaagaaaaaaaaagttttatttaataaggtttagagattcaggtatgtcttagacattacagctttcctacaagctcccaacagagtaaatcttggttcgtatagttctcataaacaccgtagtaggtcatttggtaaacaagatgcatagtccatccttctcaaatcttcagcctccatttcaagtgcgatacagtgcttcagcgcttagacccttttgtttccaataacttttcttctctggtgttctgaattgttagtacgtgttaatagaggctagtttgggtcttgcagaaatgatttcatttgggatgctttggttgtcactgcagtgcagaaaagaccttgttattgttagaaatagataattggtgacacgaagaaaagtcagcatggagacaaaagatctctcagcaaggcaatttttactttatgcagaaagggtgctcaattgcagatggaacgatggtgagagcactcctgaacaaaggaaaagcagacatatttgtcccttacgcctttgggttgtccttactgctgtgtcctgcatccgttggctggggctggacctcataatcttaaactgatacccgatttgctaaacaggctgtgagctggaacgtgcctgggcctgtgagcatgtcccgcagttacatacaatagggcttaacagagttattagcacaaagcaaggaggcttgaagtaagttagtctttaaaagaaactattgtttctaacatttatgatttattctttaacaagaagggaaactttgaagaggcaactttttac

SEQ ID NO: 585576 - DNA, 4001 bp, Homo sapiens
aaatctggtgcatacacacacccgcaaaaaaaaaaaaaaaaaaaacatatctttcaatggatatatccacttaataagattcctctactctgggtcttccagaattggttgttacgccaaataactgaaataattaccatacataattaacaatacaagatgggttaatgtaagatagtcaacatttaactaataattgaaggacacgcacccaaggacaaacagcagaaataaaaaacaaaaacaaaaacaaagccatgccttggtcctttgtttttagatacacacttggatactcatccactgaggtcctaagcagtctggctcccttccagttgacctggtcaagggtgcagcagctcagggctgggtacacgttgtggataaccttaacagggcagtcaagggcagtctaccttccatgcaggcaactcctattaacttcagtaacaggagtcttcactgacaagcaaatactcccaaactgtacaatactctcatgtttaactcgactggaatgcagtgcgtttgtggacattgtttggtgtgtgtatttgttgtggattttcctcgtttttacccagaaacagcttctcagagtactggaacaagtagtacacacgtgggtctaaaaatcacacatacagtgtattgtatgagttatccctaaggcgcgcacacacacgggtaggtattacctgtacatttgaaatctcactccataactaatttttttagcccaggctcttctcattgggttcctggacaaaatcatttctaacccagctaagaaatatggaatgcaacttaggtcaagacaatgagcctgccaaggctcctggacttcccactagtctgccagtgcctggagcacccacagctgcacaggaagctgctgtgcccggctacctccaggtccccgcaccgggtcggcaaggtgcagcagcccccaaacccaggctccgaatattccccaagcgcgctgagtgcgaggtccccacccgcctccgtctggggatgcccggtcttgctccctagactagattccctctcgagttatctacgaccctgttccaccgagggcgctgcgttctcatagcctagacagacgttcccagcgttccagccccaccagccacctccgacaccccaccgcggcgttcccatccagccaagccccagcatccgcccattagccagctgccggcggttcccatcacaactccgctcctcgcgcccaccctctcagagaagccccctccatctttccccggcgaaagcacatgcctagacccaccctactctttccggggttcccctacctcgggctgcccttcctcgggctctccctaccgccccgggcttcctctcctccgcactcccctcccaggttccgttcccctccgccctgcggagggcgccccacaaatgcggacaggacgcccctcgttctgccctgtcggactcccccacgtcttggtcctgaatctcccgccctccgggctcagccttcccaacatcgcggtccccacacccccgccagctctccaggctcaggctccatgactccccagcatcgcagtcctggccaccccactacagccgttcagagctccagggctccccagcatcctaacccgtcgtccccccttccgggcttggattcggagactcaacatcggggccctaaactccggcccctggcctcaggttcccaacgctgcgactctggacctcccctctgagctcggggtgcgaggactccccaacgccgcgatcctgacgtccccgcctcccgagctcgggccccggggctccccgacctcgcggtcccaatacccaactcgacccgttccgcgcctcccgcggcgggactcaccggcaggggcggcggccgagcccgtgcgcgtagcccagcccggcccagcccgcgctcccgcctcggggtcccggccacgagcttcccgcgggtggctgtgaccgcggcgggctcggctcgggggagcggccgggaggaggagaccgccgggggcgggtgacgcccagctccgccccttcccgacccgggggcgggatgcgcagacccgcgcgctccgctgcagcccgcgccgctgccgccgctgcgaggaagttgactgacgccgcttccttccacccaggacgcagaccctcgcagtccctggtagctgcaaaaaatccggagagtttgagacagagacgccttaaccgccctcatattctttccaagaattcacctctcagggggccatttccgaagtccctcgggaagggcggaaaacaataacaaacttcatctgcgctgtcaagactgatttaaatcctggcctttctctcaccactctcgggtgaacgttcagggtcatgcccatgatataaataatgtgatgacataccacggaggcccttgcagacacttccacacccctaagatacacccgcccaagactcgcgcctctcccatgactacatcacacagacacatctgacactgacctgcagaagatcccacttctaccctgtgtcctcaatccacagccttcgtgggtcccagcaatagcgacccacacatacaatctattggaggcagggtgcgggggtgggttccacctcccgacttgctcctcacccacaatgttctcggtattttaccatgagaaaaagacagttaagaagttggatgatcaattaacaaatcaagttggctttgcttttaaaaagccttcttcattatctggagaaaagagaaggcctgggaagatggcctgcttactgtaagattttgtcagacaggcctaattctggtctgcttactgtaagattttctcagacggcctaattctggtctgcttactgtaagattttctcaggcctaattctggtctgctggttcccaaaacttctcttataccaccgtgtttcagtgacatgttgcacaacatctcacatttgtacaatgtttccatttttcaaaacattttagccgagtgtgatggttcacacctgtaatcccagaactttgggaagccaaagtgggcagattgcttaagcccaggagttcgagaccagcctgggtaacaaggtgagaccctgtctctgcaaaaaatacaaaaattagatgggcgtggtggcacacgcctgtagtcccagctacttattctcaggcaaacatcacgaagcaaagaaagtaatcttagcaggattatttcagttccataaatgaagacatttagactctgagcagttgcacggcaggtttgaagctgagtcagagccaggaaagagcccaggggcctgtctttagagccactgatctccccagggaatcatagtccagcacttacttataggtggatactagtggaaatgtcacaggaggtctttggcagctttgctccctccatctcttcttcaccccaaagatgtcagggaactctcccttaacctcaaaaacccgggctctcctttatcgtcaaaaacctatgataggccagaggtcacaaccgtacaagagggcttattgagagggagtgaaaactccttccactttgggccactctagaaacaaaattacaggttagcacatctaaaagcctatccacagccttcatccaactaacgtgagctgtcagccgggagctgatgagcctccgaaatgcattgctgattatttttgcagtgtttttctccctaacagttaatccatgtggaatgtgaagaagtcttaaaaggagactaacaaggcttctaattctttctcaatggtaaatgttcctttcttcttgccctttatccaaaaggcagatgtgaacgtgcatgtaaagtgtaatgggtgtcaggcattgttatctgtgcatgaggcagttctgtttccaagtgacgctgtccagagccactaaataagaatggtggttctcatccttcatgccttttaaaactaccttggtctcaagctagcttcttttattttctactgtgaggta

SEQ ID NO: 585577 - DNA, 4001 bp, Homo sapiens
tcagaattaggcaatgcaactagttgaatattttattgcacattgtccatgatcttatatgtaaggcacatttcctagggaaagcaggcatggatttaatcatttatgttgtactgcacacttatttgcactatgtaaaaccatggctggagtgagagaaataacacttttaaaaaccaaccttatattctccatgtcattaccagtaattgataactgtttaatcatcaactccaaagatatttcttccttattggaagaattccagataaaactaaacagaactgtccaaacacatttcatcctaataaagttatttatataatcacttattaggtcataacttataactgagtaatgttctttagatcttaagtgcttgtctttatatagctttacaataaatttgtttctcttaaaattatctgtgcactagattaagttaaattaaaataaaatgtatttaactgtcttcaaaataaggtataggctattttcttcctgtagactgacagcacagatattggaaaatctcttctacttggttttctgattcagttcaaacttgtgcttgcaagtgaatcttacgtaaatgtcacctaaaaagagctcaagaagactcataaaaaatatttttttcgtaatttgattaactttcaagtcattcaccaaaagtcagaccatgctagaaagggaagaaaagttggacaacattcttgttttaccacaaagaccatgccagttagctggcttgattctcccactgatggggagaatgtttacattttaacaataacttcacaaataaacagatgtaagaagtgttttcagtgcataaagatcatatactttataaatccacctctcatctttcttctggacagaccacatctgacttcgaacgtacttactgcaatcaaaagtgttttgtaaaggaccctcctcaggaataaacaagctcactaaaccctccatacataacctggagaaacctccacaataatgaaaccccatctagcactgtttttcaaacatatggtgcatttccattaattttcagggatagcccctaaagtaacttttggctcaacaaccctggaagagaggacctttgctcatcttacacatcaagtgttcatgaacaactctgatgccactaagtttcgttcacaaacttgcacctcggtcgttcttttacaaaaaaaaaaaagaaaggttattttgcaaaaggcaatagatttaatcttggctactatttactcttaatgtttctttcatctcagccctccaatgagaagtttaaaaggaaacatccgagggagcaagtttagatctatctggaggagtttctgtggagccagccaccctcaccaggtgccttccattagagtttaatgctttgctgcggtttcctgaaagagccccacagagagtgggtctcgatgggtcctgaaccgcaccacaaccggccagtgaggtgaggggcgaaggtgaggggcggcggcggggcgaaggtgaggggcggcggcggggagaaggcttcgggaccccacacggtccgggggaccgcgaacgaggagcgggggtgcggggccgcctggcgtccccgtcgaggcggtcttcatgagaacgctcagagcaggggcgggcaggcgagggcttcgaacgcacacactggggccccggacccgcgtcgctgagctggggagcccggcggcgcgggccggggacggcacgggcactttggccccgtcattgacagttggcaccgggggtcctggtcggccgaggcggggcgtggcgccataccggggcgtggggcggcgcagagaggctgtacctggcaggtacccacgtacctatcatggtcactgggtaggtggcggctgcgggccaggaacaggcccatgcgcgcagcggcgccagccgcgcctcccaccagcggctctcctgggttaaatcctccaggcctccccgcccccgcgcccggccctaggaatgcgcacgcgcggagggcgcggcccagggcctgctgggagtcgtagttctaacgcgtagtttctcctcacgcctcctgcccccagccccccaccgccgccctttccggcttcaggcccagcaatcttacgtcaccggggggcggggctatgcgcccgccgtgttgaccagtcgcttagcaaccgggaggcttacctttggaagcttgttgcagctctagccaaggtcctgccctcttcccgccccgcccctagggtccagctcccttcacctaggagctgccaaacatctggatcaacctgggcactacgaggggttgaatttctaccattatcgcgccttttgatatttttttccagacctcctgctcacatccgtaaagcccactgattcttttactacactttttatgagaacaagacattttctaggaagatggtggcagaaaaagagaccctgagcttaaacaaatgcccagacaagatgccgaagaggaccaagctgctggcacaacagccgctcccggtgcaccagcctcactctctggtttctgagggtttcacagtcaaagccatgatgaaaaactcagtcgtaagtgatcttcctgaattaaatgcactcgctctgaatcaggggacacgagatttacagaggttggccagccttaggatggactctgagccatgtcctgggtggtctttgccaaaaaaggcagttacttggcaagtagcaaacggtgccccacagtgtgtggggggcaggctaggttgttagaatcttgggcaagtgatgtactctgcccatttataagcaccttcctgataacttatggtttctggaccgcccaaaattactcttaagctatttacacgaggaaaaaagatcccctttacttactaattcctaactagccccactcagcaaagggccttatagaaggtgagttcttagaaatcataaactcttgcaaaatttaacatgagctgatatacaaccgggaacataaactcatgaaataatctataatgagaaatttcttcacttcaacctaggaaattttagaatatcctagcatttgctctaacaacacttgtctcttacaaaatgatgtcatcttcttagagtactgaaagccaacttaatatgaacactgtttcctgacaggccttttaagatgatgtgctttaaacaatacaagctttagctcatatatctctgctactaatacaattcatatttcatctctattatttgtagtaataaaaataaaatattctaagtatcattagagaaaaaagattaaaaatatatacaaatattttagctgtctgcatgatagtatatattttttaaaccttcctatttgttaaatagctttacacttggtatgctaagacagattttgctactgagtaagcaactgtctgggaatgaggcattaaataataaatgcatctttcaaatttgtgtaatttacaccctgggaagatctgagttattacatggcaattcattatgttaaatgaatagtgttgttttccagtgtcacattatttcctttgcttataggttgcaaacctgataacttattcctaaacgacatacttaaaatacatgaatgaaacagattacctatagacctctaggccaggttcccatgtggctatgcaaaacgatatcctaattattgggaagtgtgtcaggtgatttacagtagttaaaattcttggaaatggactaaaattctgcttgttgtaactaattctttttcatggaatttcacataaattggttctcctaggagtcaagatgatgcatttatcagcaataccataaccattcaggttaatcatttagtttttcttctacacaatatttacaattttgatgttttttaatgttatactttaattttttttttactggttggggttcttttctgttttttcctaaacctgtattcataattcttgtatcatattaattctttaatataatcttac

SEQ ID NO: 585578 - DNA, 4001 bp, Homo sapiens
ggaagaaagactgtttgagtcccctctcggtaatgttttaatggcagagtcttacacttgggaagtttcttcagatggttagttttgatgttcttaactcggggcatttggtcttctagagttccttttggaaagaatgtgatcattagtgaagtttgagagtgaaatggctaatttgtcttgctgcttataacagggagaaatctcttcttagcctgaagccattgagacccttcagaagatttgtagcaatctctagcgttaaggaaaaatccaatgtttgatgaaaaatatttaactcctgaatgtgtcgttgttggaggttgatctaacaagtttgcaaacatattgtttgtgcagttaatgcagggaagtgtctaaaatatgtggttctgctaagtaaatggttctcaaacagccttccctcttcctgctcataaggttgagtgatgagaatctttttctactttgcaaacagactaatataattcttactgagttttcctcccatctttctttaccctttgatatgactgccttcagcagatggtaaaaatatatgaaaaagtaatgaacaaacattgaaagcctggagatgtgattttcctttaaatagtttatgcattatttttgagatggagattttcatattatctattaatatctttttaaagcaccaccatttccaagtgtttactatatttcaaaatcactctactaagtgtctttaaacttttctcacataatcttaatttaagcgcatataaatgcagaggccctcatcacttactctggatgttctatagatccaaacagaatgggaaagttctctgattttttaatcatttattcagcaaatatttgattgttttctatgtgtcaggcactgtgctgggcacagaagatcccatagtgaagaaaacaaaaccaaagaaaaacacaatctgtgtttggaggccaatgatagagtcagaaatcaattaaatatataaatacactagtccccacttatccaaagtttcactttccttggtttccattacacattgtaatgtctcctcaactcttgactcaggcatgacttgaacatttcactagttactaagcgaaaattagtggtatactataagtattgtttttatccctctggtgcctagcggagcatctggcacatggcttactaattgctcgttagtttagttattgactaatggagagacagaaacacatgtggtagtttttaatggcccactaggataaataacaaactaaattgagataatagataataatctatgagttcaagattgagaaagatcaacatgggtttgtattttagaattgaaataacctcctacatcatcaaattcttttcataagtaaattgaagttggaatggttcagttacttggctgggcttaaacagtcattggtagcagaattgccttttcaaccatttttatttttctggaaaggctttgcagcagggctgagagtttatatgatctgtggatgtatagttttggataagtagagaagacagcattccagacctagggtctgagttaactgcaaagtcaatgtgaataatatggcttctgaagataatgaggaacatttcattgaggaacctttcatggtcaagtgtgtctgcaagggtgtgagaattgcatggtgtgactgttctatggaataatcaatgaactctgttgccttttgacttctttttactttttctttttttcgaaataccttgtagcagaatggtaagagcacagtttctggagctagaatgcctggtagccttgggaagttacttaatctgtgcctcaattttctgatctgtaaaatgtgaataatattgtgcatatcctcatatttctggttccttaagaaggccctcatatttactactgtaaattgaattgtagctctgtagcatagaagaataattttgtaaattattatacatcaattagccacctcgatatatttaaggtcctaaccatcagccatgattccacaatctaaggaaaacacccactctttagctgagccaatgtttctgttccatcctacgaggtagagttttatgatttgattattccagaagagctctgtaattattgtttcagatgtagagaatcaggttggctgtagccctttaacaaccctatcttgaggagcttgcttggtcaggtctataagtataaacaataaaactatcaaaagttctgtgtttgtatgggcagagacaatttgagatgaggctctcattctgcagagagtctgagagggaaagagaaaaggaaggagtgagggtgttatctggggcataccaatgaaatttgacttcttaaaaacccagctgtgagattaagtcaaaatctgcttgttacagattaaacttgaaaaaataagtcgtggaacttttaaatttgttgcttttttagacctttttttattgatttattaaggaaatatatttttgttgccaacagtgcataaaactatataggattaaaaacaaaatattcaaaggcaagggtttataattcagtaggaaagcaataaagaggcagccaattaccacaattcaaggtagctgtgtatgtttaatcaggagaagagttcaggaggcacattcaggaggaagaagcatgtttagcagggcagaacatccttttaaggaggggatactatttgagttggactttgaaaggtaggtgggattcagataattatgttgggagagagggcattcttggtagagaaaaaaagtcctggggatggaaactgagattagtgagggatagtggacgatgagcctgaaagggtggttgaagaggctctagagggcctgctctctgtaagcaggcaagtgatccagacagagctgggtgttaaacatggaaggtgaggagggggaggatgggtttgcaggatgattcaggaatcagcagaaccaagtctttggcatcgtgaaatatcttattggaagaggctgagccagaggtaccaggacttaatccaggtaggtggcagtaggaaggggccacctgggctgaatgcagaaaggtgtggctgagtgcactgacctggtttgcagaataaggagcagctggtgactggcagtgacatgggcagtgagtaggtaggagagggaaagcccaagttgcctgcaggactcacagccagagtttctggttgagtgatggtcttacgggactaatttaagagatagagactgagttcatattatcaggtctcaatatttatatttaaattttgacatagatgtgcgtgtgtgtgtgtgtgtgtgtagaatattttaaaagatgaatttaaagaagtgctagtagtttaacattatgggcattccaaaagagaaaaagttaattgtaaatcccatcatgttgactgattcttgtatactgatttctcatcatatctacttatgtgtttatagttatattcattgtgtgtataggattttttttcttttatcttctcttttcttttccttttcctttctttttttctgcagggtttcactgtcacccaggctagagctcagtgatgcaatcacgcaatcacagctcactgcagccttgacctccaggtctcaggtgatcctccaacctcagcctactgggtgcgccactatgctcaaccaatttttgtatttcttttgtagagacaaggttttgccatgtttcccaggctggtctcgaactcctgtgttcaaacaatctatctgccttggcctcccgaagtgctaggattataggtgtgagccactgcagccaacctatttcttgctttatactttaaatcataagcattttccacatggttctctctatatatctatatatatgtagtcctttaagtacagttttaatgttagcataattaagaattttttatttttatttttctattatttccattgtatttattgccaatacagaatacttcctgtatgttctggatgaaag

SEQ ID NO: 585579 - DNA, 4001 bp, Homo sapiens
ggagccctttgaccatgggattcccctgcaagagcccttccctccacccacccaagcctcctctccttacctgctcatacttctccagctccgagtggtatatgtgacggatctgggcaagtttgctgcgatagtccgagtgttcgatggagttgtcaggggacacaccaccaccagaggctgcagcggctgcagctgctgctgctgagccgccccctttctcgggcccagccacaccctctgccagaagcatgttgtccaagcgcatcagctgtgggtccaccggctcctcctcctgggagctccgaatgctgaggcctagcatgcaggcgagtggacttagggacccagagaccccaatacccagtgctcagtcctcctggtgcttcctggagagccaagttcccaggctttggttccttccccagtccccctgactccttactttcctcagggccccaagttgtcacactctagccctataatgaacagggttctgttcccagagttgagcaatccggggggggcccacataccagttttctccttgatttcacacaggacgctaaagagagcaggcttcattcggtggcagtttagggcgtgtttccttgggaggagtgggagtggggaaagagaaaagttgaggagctagagaaacagagcagggggcctgagaacaaggagggaggagggtcagtctgcggagggaggaagcggattgggggtggaatgagttgggggtggaatgaggagttcttgggaaaagatcagctcccagagcatggggaagctcctcagcttcagggagacacagggaagatgcaggcagcaggttaaaggctgcgggctttgggagatggtctagaaaggtaggaggaggaatctgggagtggatggagaaaggaaagtgacttggtaggtttcagagggagagagacagaggctggggttgagaagagtcagagtttgaggtggcagagtggggctgggggtgccgagctaactggggagatcagtgtagggtgtgtgaaggggtcctggggctgagcaggtgggaggctttgatgcacctagtgtctggctgagcagtggagaggagctttaggggctctggagagggtgtggaggtctccacatctggagagaatgagggggctgggtggagagttaggggagaagataacgtagcccaagaacagtttcttagtctgggagccagagggggctcccggggatggggctgttccaggagactgcaggggtcggcaaaaggttaggagtggggagccgggccaccgggggttccctctgtgaaggtttcagggcctgggggtgaagggaggtttgagagggatcacttttctatgggctcccaggaataaggagagaagagagctgttggatcctggagagggccctggagttggggggggctcccagaagattcagaacatgtgaacggggtttgctgggtctgtgtggggtcccggagtgggggcactcacttggcctgggcctcgtccaggctctggtcggtgatggtcattatctgctgcagaatgtccccgatgtcttgcttccctcggcctcccgggacccccccgctacccccaccggggtctccgccaccgggaggctcgccagggcccccaggctccccactcaccaatcccaggcccccccggcccccgcctggagggggcggccccagtagccgttcgtccatagctgggggggggccctgaggccccctccctgctccgcccctccccccgcctggttacttctccccccaaactcgctggggccgctgctccctccgccccaacccccgcccgtctgcccccggctcccggctcccccgggggttcaccccggcactgaagggagacctgggataccggctgggccccccacaggagaccccggcccccggcggcggagaaaatggagccggagagagagaggaggcccaagcgggggtgtgtgtgagagagagggaggagggaggagggagaaggggggggagcgagggagggaggctgggggaggggagccggagaggaagaggaggggagaagagaggaggaacagggaggagctgggggcggagagagagacacagaaacagaggaactgagacctagtggaggaggggagagggaagaggggatgaggggaggagacgggccatctgaaagatatgggaaagccccctggctggacttccgcggcctaggagtggggctgtgttggcggctgggggcgtctgtcacctgggtcctgaatcagggatctaagcgatgtggactcaggccgctggaatgcctgggttcaccggcagctcagttcatatttcttgttctaatgactcccctccctgttctacttaattaaaaccgaagaggggggctgggggagataattagggaggtctccagccgctgcttaatgagccagtaattaaccagccggggaggggagctggcctctggccagactggggagagaaaaggcctctggcctcaccttcctacctttcaccccgcctgggccccccagataccagtctgcagtccagaggggaattatatttattcacacaaccaaaacatcagacagactcagcagcagtggggagggagggtgggcagggctgaaggtccattcacagcccgtaaacccctcagtctcagggatcgggggtgctggtagtgggactgggagaatagtcttaatctctcaggtgcccacccaccttcccttcttactgggaggaagggtagagctgtctctcaggttataacctctcaggtggaggcctgagccctcagaccctactgcctagtagcttgacaactggtggtgtccccacaagttagggaaaagactcccagccactccttgagatgggtgcctgggatcccccttactgcctcaagctcccatggacctgtgggcggggagttaaatccctgttccatctcgcctgttcccagagtttgaggactttcaccctgtccagttcccagggaaggtgatgtgggagatgaatattgagatttgtgccgtgtctttcagtctctggtacccctgccaagcaagagttgagggcatgcaatgggctgcccagctttgagaccagtggcaaggaagggctggttggggctcaagtctcagcaggtgtgtgtggggggccgggacctttgctcctccattcgacccccaccctgaactctcagcagcaactccaggagctcttgcccccctggagggaggggaggctctgaccgctgggcttccatccgctggcactggaggagtggagggagagggagagctttggtgagggtctgagaggaggaggttcttgagaggatcaagggttggtatggggaggcatataggaaacctgtgaaggcgatggggtgcctagggagaaacaggagtagagccccaaagagaacaggggccaagagaccaggaggcctgggtttgcctcctggggggatgtcttacctggtgactgaggatagtgctgtaaagctgttctctgtcctcgagaggacggagtggggcaggggctaggcttgaggggttttggggggtgtagaaggtggccctctgctcctccaggcggcgggactgggcttcagccaccaggtccagaaggagttcagtctgcagggagagcagggaggccgagcggggtcccagggctggggagaggggtgtggagggctcagagacccagagaggttggcagacaggagccgtgggggagtgtggacagggtgacgtgattagggactttggatcagaggagagggggtgcaatggggaatcccaaggggagtctggaggaggtggggagagggcccacaatggagtgggccttggtaatggggtcaggatgtgggcactagggtcggggctctccctgggtgggtaggggtacctgtgtggcgggtccctggaggaggaggggatggaggagc

SEQ ID NO: 585580 - DNA, 4001 bp, Homo sapiens
agcctggccaacatagtgaaaccccttctctactaaaaatacaaaaattagccaggcgtgctggcaggcgcctgtagtcccagccactcaggaggctgagacaggacaattgtttgaacctgggaggcggaggttgcagtgagctaagaccgcgccattgcactccagtctgggctacagagggagtctctgtctcaaaaaaaaaaaaaaaaaaaaaaagtaccaaccatgtgccaaacagtactcctaatttctctcaattacctttgtctgtctagcacagatttaggcatataacggacatttaatgggcatttatgaaaaaaagggatgactgttaaattcttagagaaaattcaaaaaaaaattttttttttgaggcggagtttcctcccttgttgcccaggctggagtgcagtggcaagatcttggctcactgcaacctccccgtcccgggttcacgcgattctcctgcctcagcctcacaagtagctgggattacaggcaggcaccaccacgcccggctaatttttgtatttttagtagagatggggtttcaccatgtcggcctggctggtctcgaactcctgaactcaggtaatccacccgcctcggcctcccaaagtgctggcattacaggcgtgagccaatgagcccggccaaaaaaaattttttttaatggtgccagccgttaaggaaattacaaatcgagttgagaaataagacaaacacatgaaaagctaagtaacacaggacaattaaaaataccatgtgacaagatatgattactgcatagtagcgaataatgctataaattctgaccagtgagtttattatagactgcggcccttgtagtctcccaacaaaacggggacgctatatttcgatttaaaaaaagaaagtgacacagcactcatcctatcctaaaattatcatcagaagaaggaatacagtaactaaggagagtgatataaagaaactccacataaggtttttaaagcctatggtagccctgaaaaaagttagaacatcagacacacaaccctctgctgatccaggacctgcaaaggctcctgaaatacaagtctctcaggaacagcatcccctgttctttctccgccccgcacggagctttccactggacagccgcccgagaaatttctcccagcatctgcaatggcaatactctcatcttcctcccctcgcctgtatcagacggtggcatctccctccaggggaaaaaacggagggcgggggaggctgcataagagggaaagcttgcagcgaggttgattatggaggaggaaggtgagaaaaatgcaggggacgagggtggggtctcctgagcgccagcccactctccataaggcctagcccacacgctcccaccccgaaggcacgcccctcacaagccggacccggacgcggacctgagtgacagcagcatcacctgtactgcactccctcccccagggcctgcagggagacgactgcccctgcccccaccagcagcggcccctggctctttctctccccttccagtccacgtcgtcgacgagtgacaggtcccgagggaggcgactgcaagcgcacgccgttcgggactaccggggcaactctgcgccgaagccctccaacaggcgcgcggggacagacagaacgttccggacggcccagggggacccggtccaggcccagcctgccccagctgccctacaacgggcggaggtggcacttactgcggagattgtggattagctccgagtggctggcgccgccggatttccaggccatcgctaagcacactcggagcaggtacagaaccaccttcagcgcgacgacggtgcccagcagttttcccaagagtgagaccacctcccacaccgtcaccgccccgctcgcgtccccgctgtagctgccgctgttactgccgtcgccgccgctgccgccactgcgcgctcccggcatcccccgcggcacgcatgcgctctgtgacgccgcgcggcttagggtgcggccgggtggggccgagggcgggggaggcgtgtggcccagccgcccgcccctgtggctgctaccgctgccaggggactgcagggaggccgggctgagtcagcgccacttccgctgctgcgtgtccctttctgaggcctcggaccgcaccgctttcgccctgcggcccggctcggtagcctgatcagtcgcgttcccggctgtgtctccggtcaccgagcgggacggcgggatggcggggtcgatctgtgcagacgctgctagtggttccgcagtcgtcgctgggtcagctgtttcgagcggcggatctgctcctatagatgtccagattgttagacggtgggcttcatccgtcctacctcgcccaacccagttgactaatatttgggtcggtggagcccgaataatacaataagaataaaacccaacgacaaaggccctctctaacccgagtacaccggcctctggctttgtgacaagcacgtcactgttaggctaagcagagactttggaaccccggttctaaagctctcagagtggaagagtaccaggacatgggggtgggggttggggcaaagctttgctcccttagaataataccaacgtacagagttgcgattggttaaaaaataccactgtgtcctttggtgaacgtgttattctcccgacgtaagtgtgcatttccacctaattaagcctcacaaattccaccgtggctttattgctctcagctctgcaagaccatgagtgagaagctcactgagaacattgcttgtcgcgtccaaatcgctgactcctaattagacctgagactgacagaatccagccatcatctagtccagtaacttttttttttttttttttttttttttttgagacggagtctcgctctgtcgcccagactggagtgcagtggcgcgatctcggctcactgcaagctccgcctcccaggttcaggccattctcctgcctcagcctcccgagtagctgggactacaggcacccgccaccacgcccggctaattttttgtatttttagtagagacagggtttcaccgtgttagccaggatggtctcgatctcctgaccttatgatccgcccgcctcggcctcccaaagtgctgggattacaggcatgagccacagcgcccggcctccagtaatcttttagaaggaaacaaagctaagacatctgtgccactatatcagcacaattttcaaattctagttcttatccgattttgtaaaatgtgacactggcctgcttccaatccaaaatcaacattacctattttctgggattatgtgaccataaatgaaactacaggcaaaactggtttctttttgtttttttgcttttgattgagacggagtctcactctgtagcccaggctggaatgcagtggcatgatcttggctcattgcaacctccacctcccaggtcccggttcaagcaattctgccgcagcctcccgagtagctggaattacaggcacgcaccaccatgcccagctaatatttttgtatttttagtagagacagggtttcaccatgttgaccaggctggtcttgaactcctgacctcgtgatctgcctgccttggcctcccaaagtgctgggattacaggcgtgagccaccgtgcctggccaaaacagtgttctttacttcaatattaaacatgaataaaattgttgatttgggactgtaacccacttaatattttccatttcatctttctacagtttcttgatgatcttccatttggagaaaagaaaaaagtcaaatccttgataggaaactggtaactctaaagctgacccagatggattgcatttacatgcagtgcttccgtaaactgtccctgtgaagtaggactaccaatatcacataaaaacaacagtagcataatggccctttttaaagaaataaccaacatacagttatgaatacctatagtgtaaaagagcttcattttttagttgaataa

SEQ ID NO: 585581 - DNA, 4001 bp, Homo sapiens
aagagaaacttttaaggggcccttctgcgtgcccgacactgtgctaggcactcacactatcccgacccgagaaaccgatctgcgacccagaggaacttaccaagcctccagcatcttgtgcagccctactcatgggaccatctggatacccacccttgtctttacagggagcagaacacacctcttatgtgtcagaaaacaaagtccaggaagtatatttttacctgaggcaatatctgaaaattgtatgctacagcctccaaagtgagtcttcctctcagtacctctcttctaggcacatggagccctttcttccaagtattatgtttaaccacttaatgaatgaagtcctgaaactgcttacccatgctccctataatctctgagtaatcttccttttccacaacctcaggcataatctcatcttctgtttctattacaatttcaaattctggaaaaaggaagttgtggtctggaattatatggtccagatgatctgaaacaaaaaggacagcactattagtaatcatttagttttgaagacagtctaataatttgctgtctctaaagtactatattccctatagttctggcattttagataaagggtcataaattaaatgcctatatggtgacattattcagtgattcagacttcacagccttttttttttttttacaaaggtgttccaggcatgaaaaattttaaagtactatacctttcctaattttacctttaaagttgtcctggaaatatctgggttgacaaaggcgatgaaactgaactgagacttaaaaaaaagattacccacctggttgtgcacaagcctgcttatgtcccaatctccagtctagggtctgatgctccttgctgcagtaatatgctttgtggcatctggagcacgttttggggcctaaacagccacaaaccctgcagagatgagcaccagacttaagctggagacacactgattctcctgtttctgggggaggattctcagaaggtggctcatatgagtaaaaatcgtttttcctgggtagttgattcctaaaaactaaaaaagaatacagagaaaagttttatcttcaaacaaaacagcaattcacatattttatcctctgcacgtaaaactgaaaataacaacaacaaaaaagaaatgaaagtttttgctttcaggaataagcttttaaaatccagaaactagatttcgtccggtacacgcaactgagttgcctcctagaggtggtttgagttaatcaaattaataagactgatcgttaagaacgactgccaaaaatacgaaaaagctactgggatccatctttccaagacaatttctattatctgaattaacaccatacctggtacccactgattaaaagctgggggttaccaatgcgcgtgggcacagttagaagcttatgtagcaaaaatgagcacatcctggaagggcccgggagaaggtgctcctggggcagcgcggagagggagctctgaggctggggcggcagcggtgcttgccgccgtccccctggtcgctcccggaattaacgccgcgcacgcgtcggaggcatggccccgtcccgaccccgtttggcggctcacctcgcaggccggcacagcacggctgctcgcggcagcagaagaggaagatgcagcggtggaaggcgtccgggcggccaggcagcggcgcatacacctgcagcaggaaggagagcgggcggccgcacagctcgcaggccagggcctggggccccggcagcccggccgcgcccagccatgccggccgcccgcccaccttgctggggaactgctcgctgcgcagtcgccacgccggcgccgactcggcgaagcccagctccacaggcctggccccggcggcagccatgcggggcgcgggctggcgtggggcgcagcccacagctgggtcggaaggcggaaatcgggcgccgggccggaaggcaagaggcgggcacctttccggaggacaggaggcggaaacgcgtctgacgggagcggttgcaggaccaatgcgagggaacggggcagaggaaacctctcggcatcagccccgcccctggcgcctctgcctccgagccgctttcctggtgcctccgggtgctctgggatggttctggtctttgggagagtggcagctggtgacggcgctccgctcacctctgcacatgtcttgctgtgggcctgcgggtggccgccagggaggcagagccctcccgcaaaccttccctgctggtgtccacctcagggtgtgggaaacctgtgcgctggccgagtgctaaccaagagtaggcagtgaaagacaaatgaaggttgaacaggtaaagtgaggaccctacagcggaaaccaagaatcctgtgtgcctgagagtaatgaagaagcctctgcagaagagtcttttctgtcagtcttaaggtctctgttttaatgttagtgctggcttgctgtacctgaattccaagggaggagtgtataatgaggcatggccaacccccacttcccatcattgcctgaactagtttttcaggttaacttcagaatgcccttgggcaagcagagggtccatcagtcggttggagggtttagaattttactgttggtttgcaaaggtctgaaagaaacatgtaccacctgttctctttaaggagttctacttaggaggtttcatttacataacaagaccgtggttgtcagccaggtctccacccgcataacctgttatgccacaatccaaacccccattctgtaacctcaagatggtatataagtttctgaaccccatttggggcttcagcaaaatcactctggttctcccccatgtgcatgttaataaatttgtatgccctttctccaattaatgtgccttttgtcagttgacttttcagtgaaccttcagaggacaaaaaggaagctttcccttggctactacagtggctttaatggaagtaaagtcatcaacaacatttatttttgacaaaatcacagtttagttggcagtatatttgtttgtttttgttttatttgagatggagtctcgctctgtcgcccaggctggagagcaatggtgcgatctcggctcactgcaacctccgcctcccgagttcaagcattctcctgcctcagcctcccgagcagctgggtagcagtatatttgtaatggtacataaaataatgtctgtttttaaataaacatttacattgtaaaccaaaagttaactctccatcaatttttttttttcttttttgagatggcatcttgctctgtcacccaggctggaggagtgcagtggcatgatctcggctcactgcaaccttcgcctcccaggcaagcgatcctcttgcctcagcctcctgagcagctggaattataggtgtgtgccaatacaaccagctaattttcgtatctttggtagagacagagtttcaccatgttggccaggcttgtctcgaattcctgacctcagttgatctgtccgtctcagcttcccaaagtgctgggattacaggcatgagccaccacatccggcatccatcaatttagaaagtttatttcaccaagattaaggttgcacccgtgacacagcctcagaaggccctgatgaccatgtgcccttggtggtcagggtacagcttgcttttatacatgttagggagacatgagacatcaatcagtatgtgtaagatgtactttagtcaggtaaagcgggacttgaggtgagggcttccaggtcatgagtagataagaggcaaaagatcgcatttttttgagtccttgatcagccttccactgaatacacaatttagtctggctcagtgaattatcatttttacgtaaacaataggggaggggaagcaattagatatgcatttgtctcaggcgcaccttaaagggataactttgagttctgtctgtcctttatccacaaggaatttccttgtgggcaaattttaagggaggtacgtagcctcttatcttggcag

SEQ ID NO: 585582 - DNA, 4001 bp, Homo sapiens
aaactgacaaaattgtgtatctaaaactggccagatgaaagagaaacttttaaggggcccttctgcgtgcccgacactgtgctaggcactcacactatcccgacccgagaaaccgatctgcgacccagaggaacttaccaagcctccagcatcttgtgcagccctactcatgggaccatctggatacccacccttgtctttacagggagcagaacacacctcttatgtgtcagaaaacaaagtccaggaagtatatttttacctgaggcaatatctgaaaattgtatgctacagcctccaaagtgagtcttcctctcagtacctctcttctaggcacatggagccctttcttccaagtattatgtttaaccacttaatgaatgaagtcctgaaactgcttacccatgctccctataatctctgagtaatcttccttttccacaacctcaggcataatctcatcttctgtttctattacaatttcaaattctggaaaaaggaagttgtggtctggaattatatggtccagatgatctgaaacaaaaaggacagcactattagtaatcatttagttttgaagacagtctaataatttgctgtctctaaagtactatattccctatagttctggcattttagataaagggtcataaattaaatgcctatatggtgacattattcagtgattcagacttcacagccttttttttttttttacaaaggtgttccaggcatgaaaaattttaaagtactatacctttcctaattttacctttaaagttgtcctggaaatatctgggttgacaaaggcgatgaaactgaactgagacttaaaaaaaagattacccacctggttgtgcacaagcctgcttatgtcccaatctccagtctagggtctgatgctccttgctgcagtaatatgctttgtggcatctggagcacgttttggggcctaaacagccacaaaccctgcagagatgagcaccagacttaagctggagacacactgattctcctgtttctgggggaggattctcagaaggtggctcatatgagtaaaaatcgtttttcctgggtagttgattcctaaaaactaaaaaagaatacagagaaaagttttatcttcaaacaaaacagcaattcacatattttatcctctgcacgtaaaactgaaaataacaacaacaaaaaagaaatgaaagtttttgctttcaggaataagcttttaaaatccagaaactagatttcgtccggtacacgcaactgagttgcctcctagaggtggtttgagttaatcaaattaataagactgatcgttaagaacgactgccaaaaatacgaaaaagctactgggatccatctttccaagacaatttctattatctgaattaacaccatacctggtacccactgattaaaagctgggggttaccaatgcgcgtgggcacagttagaagcttatgtagcaaaaatgagcacatcctggaagggcccgggagaaggtgctcctggggcagcgcggagagggagctctgaggctggggcggcagcggtgcttgccgccgtccccctggtcgctcccggaattaacgccgcgcacgcgtcggaggcatggccccgtcccgaccccgtttggcggctcacctcgcaggccggcacagcacggctgctcgcggcagcagaagaggaagatgcagcggtggaaggcgtccgggcggccaggcagcggcgcatacacctgcagcaggaaggagagcgggcggccgcacagctcgcaggccagggcctggggccccggcagcccggccgcgcccagccatgccggccgcccgcccaccttgctggggaactgctcgctgcgcagtcgccacgccggcgccgactcggcgaagcccagctccacaggcctggccccggcggcagccatgcggggcgcgggctggcgtggggcgcagcccacagctgggtcggaaggcggaaatcgggcgccgggccggaaggcaagaggcgggcacctttccggaggacaggaggcggaaacgcgtctgacgggagcggttgcaggaccaatgcgagggaacggggcagaggaaacctctcggcatcagccccgcccctggcgcctctgcctccgagccgctttcctggtgcctccgggtgctctgggatggttctggtctttgggagagtggcagctggtgacggcgctccgctcacctctgcacatgtcttgctgtgggcctgcgggtggccgccagggaggcagagccctcccgcaaaccttccctgctggtgtccacctcagggtgtgggaaacctgtgcgctggccgagtgctaaccaagagtaggcagtgaaagacaaatgaaggttgaacaggtaaagtgaggaccctacagcggaaaccaagaatcctgtgtgcctgagagtaatgaagaagcctctgcagaagagtcttttctgtcagtcttaaggtctctgttttaatgttagtgctggcttgctgtacctgaattccaagggaggagtgtataatgaggcatggccaacccccacttcccatcattgcctgaactagtttttcaggttaacttcagaatgcccttgggcaagcagagggtccatcagtcggttggagggtttagaattttactgttggtttgcaaaggtctgaaagaaacatgtaccacctgttctctttaaggagttctacttaggaggtttcatttacataacaagaccgtggttgtcagccaggtctccacccgcataacctgttatgccacaatccaaacccccattctgtaacctcaagatggtatataagtttctgaaccccatttggggcttcagcaaaatcactctggttctcccccatgtgcatgttaataaatttgtatgccctttctccaattaatgtgccttttgtcagttgacttttcagtgaaccttcagaggacaaaaaggaagctttcccttggctactacagtggctttaatggaagtaaagtcatcaacaacatttatttttgacaaaatcacagtttagttggcagtatatttgtttgtttttgttttatttgagatggagtctcgctctgtcgcccaggctggagagcaatggtgcgatctcggctcactgcaacctccgcctcccgagttcaagcattctcctgcctcagcctcccgagcagctgggtagcagtatatttgtaatggtacataaaataatgtctgtttttaaataaacatttacattgtaaaccaaaagttaactctccatcaatttttttttttcttttttgagatggcatcttgctctgtcacccaggctggaggagtgcagtggcatgatctcggctcactgcaaccttcgcctcccaggcaagcgatcctcttgcctcagcctcctgagcagctggaattataggtgtgtgccaatacaaccagctaattttcgtatctttggtagagacagagtttcaccatgttggccaggcttgtctcgaattcctgacctcagttgatctgtccgtctcagcttcccaaagtgctgggattacaggcatgagccaccacatccggcatccatcaatttagaaagtttatttcaccaagattaaggttgcacccgtgacacagcctcagaaggccctgatgaccatgtgcccttggtggtcagggtacagcttgcttttatacatgttagggagacatgagacatcaatcagtatgtgtaagatgtactttagtcaggtaaagcgggacttgaggtgagggcttccaggtcatgagtagataagaggcaaaagatcgcatttttttgagtccttgatcagccttccactgaatacacaatttagtctggctcagtgaattatcatttttacgtaaacaataggggaggggaagcaattagatatgcatttgtctcaggcgcaccttaaagggataactttgagttctgtctgtcctttatccacaaggaatttccttgtgggc

SEQ ID NO: 585583 - DNA, 4001 bp, Homo sapiens
aattcacaagcccaccagataggggaccaggaggaaccccagtcctagaccaggcctataggctgatgccaacaccccgggagagctggtggggccccatcctctaccaccttcaatgcatggccaaagggcacttcagtagggaaaagtgcttctactgaccacatctctggccaacagagaaggccacatgctctgtccatgcacacccatctccacaccccttccccacctagactgcagcgggggtgggaggcagacaccgggggggaggacttaggggtcagaggacttcgggagcattgggcccgcgccccgctagccaatcaagcgcaagcagcgactcgctagccggagcccgcacgggtgtacgagaggccgctgaccacgcggccgccgtggactcgcccgtgcccgggaagcggggttgcaaggagcggccgatcccggcgcgaatacgctcgccagcccgggggctgcaccccaaaggtgcctgagcgggcggtgagcccggagcagcttcggccgcagggaggggctcaacctcgggtgccctggagacccgggtcggccaaagcctgggaatgagccgcagttgggagcgggaaaccgaaacagcaatcctggaagagcgtcggcccagagaaggcgccgcggaaacgcggctcctgagcgaggcgcagacaaaggctcgggtgcacacgcggtggacggtggctccggagccgcgctctgggccgcgggaagccgcacccgccccgactggcgccggagtcgggcgggggcccatgggcgcgacctcctgcacccggaggtgctcctacccggccccgccgcggtcttcccgtcctcaccctgctccccctccatccgcgaccgcgacgcccccctcctctgcgcaccgggcgcctcctctttcctcactgtctcccgcctgcctgcttccttctagcgaacccctgccttgacttttctgctcaatcttgtcccccacccccgtgacatgcctttctgccacctctgcctcagcgcgctctcggccccgcgcccgcgggtggcgaggaggagtggccacgccacagtgggcccgggggcgcatcctgcgagtcggaggcggcggcgcctttctcttccaccctagcgacctattgtccttcccttttctctaccaccccggaccccagagaagcccgggaccaacaggacgcggcccggggtgggggtgcgtcccctgggtggaggtgcaaccgtttccaccccgccagtccatgctctggatgccggtcactgcgcggggtgggaggccgggcgcccactccgagtcctggagaacggcggtgccatcacagttggaagcgcggggttctgaggccctggcctccctcaccccggctacagggacccggtgggctggacccccaagtggaaggaagcgcatctgctccagccaagtggccacaggctcaagagggaggaacctaagtggtcacaaagttgagtataaatacgcgccggacaagtgtggccagaaacggcacgaggggcggagaaggaggcggcaggtcccgctcgcaacgtccaagctcccgccgccctcccgagccgcccttcccccgagcgctcgcggagcctgggaaaccccggcgtccctgcgcggccgaacgctcccgcgctccgccaggggcaccggctcctgcccctccagagaagccccctgggcgctccacgcccgggcacgggcacctcgctcgacacccgcttcccacccagcagtccaagccccccacctgcccccaggggatgaggagccgccccacctccggggaacggggagcaggccacttactggggctcaggaagcactcggtcagccttcggaagcagctcgcattattagaaggtccatcttccatgtcggagccgaagagcagcgcggccgcggcggcgagggcgaagctggcgccctggggacgccgcggagtttggccgccgccgcctgggccggcgccggggaagccgggggagcccgcgcggcgggcggcctggccaagggggagccggggcggcggcggcggccggggaccggcacgggctggaagcagcaagccctggagcgcaggcgagaggaagagccgccgccgcccgccgccgctgccaccgccgccgcggtgactactgctggtggggacgctcaagggagctgcctcttgtcctcctcctcctcctccgccagcatcgccgcctcctcccgccgccgccgccgccgctgcgccctcccttcctgggagacgcacggggaggtgaaaggcagatgaggaggggagaaaagagggagggggcggggggggcggcggccagaagtaaaagaaagatggagaggaggaggggacccgggacgagaaggcgagcgccaagggagcgcgggccgcgacccagccgcagccgccgccgcgcgcagagagggcgccggggcccccagcggggctggggcggcctgcggaggagaggggcgggcgcgggggcgcggcgcgctccgcccggccacggccaggccactcgggggccgggcccgggcccgccgcgctccccccgccggccgcgctgagccggggttccgggcggagtttgccggggccgcagcccggctcgtccccggccgctggcaggggaccctgggggcggggagcaagaggctcctcgaggctggccatggttcctccccgggccgcggaggggcaggccgcgggcgggaggggcgcggcgggccggggctcggtgggctccgcccccgcaggacctgcccacccctgccggccgcccgaaccgctgcctggtcctcctctccggtcttcggcttccctcccagtctagtcttcacattgtgctcggcttgggttgcgggaggacccgggcctgggggccaggccccggcgacggcgcctggctaccctcaggcgcgcacaatcggcgtcctcccgggccggggctagggacggcggagaccctccctgcaggcgtggcgtggtgtgtgcgcgctccggcggctgagcctcggcggcttctcgaaagcagcggagaaaagcgccgcagtgccgctgcccgtggaggcggtggtggcggcggcggcagaagacgcccactggcggagcaggcgctccccacgccgccgccgccgccgccgccttccgcgcccacgtagcgcgccccgcgggactcggcccctgcgccaggctcccgcacccgagtgatcctctgtgcgccgcctgcacccggggccggggcgggcggacagagcaaccgctgcgtctctgccctgccttgtcacatctgggtccggtgtttcggattctaaatcctgagtcctgcagctgctccagctgtgcgctgctgggcgagccacgtcggcctgcccgttgcccgagccagggaatcctcctggtagcgggccagcagctccgacccagctgtgctcagtcagagttcccgggagagagttccaactcggacctttggttggagtttaaatcaactcgcagtgtttcccataaactagggtttgaaatacggttcctccccaggactccctttcgcatactcactttaaaacgaacttcgtgtgcacaagcccagtttgccttggttggggttagagaacggaaagggcaaactgtggccaaaaatgagcaagactgtgcgatcattgccccaaaccctgagaccgccttgccatatgcggctctcttggacacccccacccccttccgtagccatgaatccaggcagttgccactgaagggaaatgagccgcccaatgggcgctcagaactaggagccgccagaagtttggggaagttggagcgcaagagcgcacacagatgcacaggtgtccgcgttcgggcaggcacgcgcggcggggccaccatggcgcgctgggtccgaggaggggcggtggctgtgctgttccacggtggcacgggctgtccggactgcctggacgaggt

SEQ ID NO: 585584 - DNA, 4001 bp, Homo sapiens
caccactgattttgtcacatgttgttcaagagagtgagtacattctgaaattagacagcttacagtgtcaggtaaaaattcttacaaggcagagacagtttttggagttgcaactagttaactgtgggcttctacttgagacaaaagtgacttcattttattggagaaaatgtcaatcaagacgtaactactgacacctgtctttgtttcaccagccagtaataaaagataaagcagaggaaatggaggagctgcagttatgcgtttgcaacacacaaagtccttgttttcccactaggcgctgcagaaaagcaattgtccattcacggcacatcctctgcatttcagagctaatatttttgcagttcttaacttagtacattccagtcttatgcagttaatttttttaaccctttgaaatacacctcatgtttgaaatcgtgcttaatattactgctaacatgacccagttttaaagctttcaggttctcaatgttgagaatagaaactttaagaaaatcggttagaaattttggaacagggtaaggatttcaaataatcctgtcttatttgctattgcataactttgagaagggtaatagggaaatccatggtaaccatatattacttaaattgctgttacaaaaaccgactctttggataggaatgatttttagcagggatcctccttaagacataataatgtgccactgaaaacaacattagccctgtattgaattgccaatcttcctgcagcatttagtgtgtttactgtatatgaatgcctatgcctgtctctggtgcaaagaggtttactcttattgcaatagtcactctggctagagcacatgaagaacagaatttttaaatgattaattagtccccaggctcaatcacttaagcccctaattgaatatctgactccattttcaactattgtaggaaaagataattagcaaatttgcagtggtaataaagaagttttactttcctttataaataataatatctaaatttctggtcatgtaacttagtacttgcatctctcctggacttctgaatccaaaacattttttgaaaaatgcaacaaggtgatgaaggatttttcttcagagctcattttttggacatcttctattgatttttttctaccttcagtctcactatcagcttcttcccttcttgccactaatttcttcatcttgaagtctgctatcaaccaacatgaaaaactcaagaaaaaaactaatttccttcttccctgttccacaaaccttaccaatccctttaccagcattttcctatcctgtcccaccaaaaatgaaaattacccaactccaagatttatgttggagaaaaaaaatattgcattctttatttttttttttaaagaccacctcagtgtgggctcaaagtgcagtgaaaatgccggagtctcattacactggttggaatgaaaccctgctgcccttaaacggttaattcagggtaagtgataatgtttagtcagttcgcctagaaaaaggaaggaaattcaaaagctggttgctgtagtaacaatcacagacaaaaaacatatatatgtacaggttcattttaaataaaaatcctgccatctctctgtgactctattctctcaagaaaactgagcttgccgcttaaatttgttgtacatacctcaaccattaaacaagacatttaaccatagtggcagttctgtgacctttgaatgccgtgaaatctctgagcggtgctgcttgttcatgaagacttgtgctgcagaatccagcaacttcatccaggattaggaatataattaagtaacaaaaaaaaaaaaagaaaaaaaaggaaaagaaataaagaaacacaaaagcacacaaggagatcgagaaagaaggaaggtagaaagagagactctccctgggtgagtaacaccacttttctcccagacaagtgctgggacagagccgagcctgctgcagtgcccagaccaactgactggctgggtgagcagccgccggcctgctaggctgggaggtgctgtcagttgccacaggcaaggaaaagcagagaccaatcggcttcaactctggcagcttactggagtggagccttttctgtttatgtttcctcatttcaagagtgacgtcaaagggtttagtttttcctctgcatgtgctattaattttaaagtactgtactatgggaagaatgtgtgtgtgcctgtggtcagcctgggcaccccactctcaggagagcccaagaaacattttctatattcgggaatacatttaaagaatttaaaataccttgtggtgaggtgtataaaaacaaaagcaaaacaaaacaaaaattaaatataaaaccctgagctaaatcatagcagcaagatgtagattttttccatctgtgagtgtatgtgctccatgctcacttggcagctgttgcttatttttttttacctaattcatttttactcttacctaaaaatgagttgttaattaaacttgatagccatagaggcagaatcgtacaaatgcactggtgaacaaaatgatgtgcaatgaaacatagaactcctgtgtcagtttgtgccatgggtccctgcgtttcctccagcttccgtggtgaagcctcaggcttgttcctgccagggagatgcctcctgatgccagcaggagtcattcaagaagcaaggctatggtgatgccatgcaggtgtgcctggggcctcagcttgttctttcccaaagagtatgaaggtccagttatttagggatacttcctttaccagggaccccagcttatccctgggttacacttcccactctggaaaaatccccatagttgccatctgttgtttctgcctcccccacatcctcctccttttccccatccccatcctaaattctgctaacagaccttttttgggtgggcggtgggcggaactttccttcctctatcttctatggattgcatggactttgcccccagccccattcccacgacagagccacaagggggcatgggacccacaggggccaatcagatttctccattgctccgaggcagactatgttttaggggtgggcgcaacactaaagaatgtccacattcctttttcaaatactaatattgtttctttgagaaagaaagtatttatgtatccctaagagcctaggcgctaggattaagcatccctgtagttgttggggtttatctttggtgttgaagctacaatagtgaacaaaacagatggttctttgcccccatggagtctacattttggagaagcagggaaattgtcaaagaaaaataagtaaacgtataatgtcagttggcaatgagggcttcaaaataaggtaaggagaatgaggtgtgtgtgtacacgtgcatgtgtgtgtgtgtggtgtgtgtgctattttaggaaagatgatcagggcagccctctgataaagcaacttggagcggaggcccgaatgatgggacatagcaggtactgtgtgcctctaccttccatgcagatgaagccatggaaaggtcccacaacacatgagtgcttggcagagccaaggaacaggaagggaaatagagtggctggaagagaatgagcaaagggaagaaataagtttcagaaggtatgtctgggacaagatcaggacatgtcttacaggccatgcacacgacttagattttattccaaggtgaaaacctacctatcagagtgttttgaactgaggaatgtctatgattcgacacgaattctgaagagatttctctcttttctctgtggaagatagactcctagggagcaagagtagaagcagagagaccaataaatgaggccactgtgctaacctaagtgagagcacatcatggctcggacttgggtgagagcagtggagaaggtgggagggccagattttggaagggggcctgtgtatttgcagagagcgttggcagtatttgaagatgagaggtgtgagaaaaagagaggaatca

SEQ ID NO: 585585 - DNA, 4001 bp, Homo sapiens
gacaaccaaaaatgtctccatacatgccaaatgtcctcagggggggaaaattgccccagttgagaaccagtgctctagtcataaaagccaagaagagatatgaaaatgttcctaattgaagaagatgaaagagatataacaactaaacgcaatacttgatcctggactgaatcctgtcctggagggtaaagaatgctataaagaacattattaggccaattaacaaaattgaaattaaatggtagattaaataaaagtattgtatcaatattaaatatacctaagttggtaactgtagcgtacttacgtaggagattactgctatgcttaggaaatacatactgaagtatttaggggaaaaggatcgtgatgtatgcaatctaccatcaaatgattcagaaaaaaatatatagaaagatatatacacgtgaatagtatatatatctgtgtgtatatgtatttaatgtatatattgacatatatagacatatctacgtagcaggtggatctgattaaagagtatgcaagtgtgttctttgaactatattatttttgtaacttcgctgtatgtttaaactaattacaattcaggtgtggggtttaagtggaagaaaaaaaaaaaacttttggccgggcacggtggctcacgcctgtaatcccagcactttgggaggccgaggcgggtggatcacgaggtcaggagattgagacgatcctggctaacacggtgaaaccccgtatctactaaaaatacaaaaacaaaattagccggacgtggtggcgggcacctgtagtcccagctactcccgcctgggcgacaaagcgagactccgtctcaaaaaaaaaaaaaaaaaaaacttttataaatcctaaaggcaggtttcacagcagtagtacagcataagtgataaacatcccaagaagataatgactactaacgggataaattcctacttcaaccccaagacattcgttggaaagaattatctaccttcagcctctctctctctccttgcctactttctggaggtgaccccctgaacagtgcgggacagaaaattaatctatcccattaaaaaaaaaaaaaatttctaggaagtgactcaataaacctacatctccgctcgatttctccacaaatcactgaggcatcttcatcctcaacaattaagaagcaaaatcgaggaaagcatacaagtgtttcaaagaaaaccacttatgcactcagctgagcaagaacgttaagtggactagagaagagacaacacggaatgtctaggaggagtgagtaaaaaggaaggactaaaaagagataaatcaggagccagtctgagagagctagaatgcgtatgcccgccagaaaaaaaagtattccaatgagtgcgagtgtgtcagcgggagaggggtagctcacctggctgtggtaagcagagggtgctgagtgcccaccagcttccgcacctgcatagcgatgttgctgagctcgtcgctcagcaggcagcgaaggctcatgaaggacgtggggtaccccacgatcttctccgcctctgacactacctgattccagtgggccggggacttggaggaccgaccacgccaagagcccaccgaggagatggtgtcgagggacggggaccaccacaggcgacgcggggaacccgaggctccaagataacgtggcaagtgcaacagcagctgccgaaagttcatggtttgagtctggaagggtctgggacctgggggtatccagaagtgccgcgggaaacaaaccaggggcagaggaggaacttacagtaactaaaaggaagcggcaattcttgaccctcagagtaaggtggcttcctggagcagtgaccagaaacgaactttaactgctgctttctgcagcccaggctgggcaaacaacagtcccagctcagcactgcccccggccacccggggtagaaaccacagccactgcctatgtggaggacgccatattggaggcatggaatgcggcctgccgtaaagacagaggcgggttgttaagtatactctctactttacggcgtacccgagaacgcccccgcaggggcggtgctttggaggtgaacccgggttgggaggttcagctcctcccaccccgccgctctgggccagcaaaggtcgtcagtgacagggatcagttgtgggcggcgagtggtccctctgcacacggtatctgggccgagtctggattcattagagtccccggcgcccagcactgagtggcatgcataagtattggtgtcacgaacaacggtcagcccccggcttgcccgcaaggaagggcgtcgggcggaggcaccagttcctcccggaagctttttgtcgctatcgccaccagcccctggcagtggcagtggccgtggccgggcgtgaaggcggcctctcgggctgcatgcctcctggagctggggccacgtctcagtggtggaacgcctagtcggggcgtggggctgagccctcgtgtcctcagggcccaaccagacataaggcagcgtggtgcggcggaaaggggtcccaaggaaagtcctcggatccaacttcgaattaccggcctcctcgctgagccttgggagaaacagcggtgcctccttcccgcgggtgcggagaggaagaatgaaacgttgcctactccctgcctcttatcttcctctttatgcctagcctggagctcaactccaggattgaagactatcgctgaccggagtgcttttcacgtactagttcatgtattactttatttaatcctcagaacaacctcattaagtagataatattagtattctccgtgttttgtatgaggaaactaaggtgcagtcgagtcgcgtaagttccctaagaccacactagacagggatgtgagcccagacaatctggtttcagaatccgtattctaaccgaaagattacaccgtctaaataataggctcccatccactcttttctccttattgctgagaggaaacagtcaatatgattatcttttaagtaatgctacctatttttttttcaaatgtgcctaagatcttacctcctttcttatcacctaaaacaggtgttaaccgttcttaataaaggatatattatccattttttacactcttaaaaatagcttataaaactctctaaaactttcaaaatccttccaaattcatggtattttatttttattttttatttattttttgagatgggtcttgctctgtcacccaagctggagtacagcggcgcgatttcagctcactgcaacctccgcctcccagtttcaagcaattcttgtgcctcagcctcccaagtggctgggactacaggcgcctgccaccacgcccggctaacttttgtatttttagtagagactgggtttcaccatgttgaccaggctggtctcaaactcctgacctcgagtgatccgcccacttcggcttcccaaagtgctgggattacaggtgtgagctaccagctaccatgcccagcctgtcagtattttttaaatgagcatcatgcataatactgtaccagcctcttgagctacaaataaagattgggacttaaagagtagttgttcactttgcaaaacaagatgattttctctacaaaagatttagcttcatactctccctttggcaagttttccttgtgatttaaattttttatttacaaaaattcagtttaggtgtaacttttcaggggcacattttatttaacatgaattgtgattataagtatcaaacacagtctatgcccttaaagtaagtaagctgaagtttgaaaataattcctgtgaaagagataaactcttggcaacaaaattcaggtctgttaggagatgaaaataaatatggagagtgagatactttaccattccaggagatgaaaataaatatggagagtgagatactttaccattccaaaaagttccaaggccagagcttctgggttatccaaggtgaaagaagtcatgaaaatacaaagatagat

SEQ ID NO: 585586 - DNA, 4001 bp, Homo sapiens
tcacaagagggctgtggtcacagccagagccctgcaggtcaaatcatgtcccgtcagtagcactgatcatagttctgccaatatccccgccaccagtcaaaggcacgctagtcttactttatatgtggaggattactgcatatactttgggtctgcattagtctttggagtagggtataattatcaaagtatgtttaaaaacacacacgcagatctgttaggtcccctagaagagactgagttcagatgcattttaactagaagatagaggtacattatttcaaaaaacaattaattcgctttaaaaacctaaaacactggagatgatacaaacctgagctggcacagtgtatgggttttcagagaagaaaacacacaaactgcaaagaaagctggaattttctgcagtgtttacattttattacctggctaatggggaccatgcttccttttgtggggaagtgacgtccaaaggattacacaaaagaaagggcaccaagttgctgatatagtcccccggaaacacaaataaacaggattgggttggaagccctgggccacttcaaagaaaaaaatcaagtcaatggtaatagtaagaaatgaaaacaggcagggtagcttgctgtctgtgtttaaaactattaaacccggtaggtaaagcccatttggctttaaggttttattaggctctcacagaccccatctccacccccacacacattgctaatcacagtagaccccagctgtgattcccatccacccccaggaaaggagagggggcttcccactgtgaaagaaaatgccttctcagacaagaactatgctccagtcctgactttcagcaaggcaagcagggagcttcctccatgctgggaaaatggcatacagtacttcacctgctaggtacattaaatttgtcaactctgcttcacgtcgcgagtgtagggaatgtgtttgctttttagatttcaaatcggattaaaataattaagttttctaaacaacaatgccatgcttaaaccaaaggacacgccctagaacaagagctaacaagaactagcctgaccggtaaagtagactgaaatatctattgaaaacgttaactgctaaaactgcctgaaagggcttttttaaatgagaaagttttttcagctatatcaagttgaacgaatccactgatattagggaaggcacgttatttcaatatttatattttaatcataagaagaaacgagaaggaagagaaatgggaagaaatttcaggtctccaagaaactttgttcattatatttactcatctaaacttgcaatgcttgaaataatctttcgtacgtaaccgacaaaacccaggaaaaaaactatacagtttgaactacggccttttttttttttctgtttctgagcttggtgttggccacccaaagctactgctgctgcatttggttcaggtcggatgcatgagcccgagctcgtcctaaacaggcattctgaaaagcactggctcccccgaccctgtgagggcccatcacgcgcggcggcttttgcaggccgcggccccgagggcttcctggaggcggcgacggcggcggcggcgggcactcaccgtactccatgaggctctgacagccctcctcgtaggacccgctgccgccgccctcttgggagcatttccaccacagcgaggacgtctggccgtggtcgctagactgcaaccagccgcggccggccagcgcgatgatgtcgaaggcgatggcgctgagtaggagcaggggcaggatccagcggcagcgctcgcaggccaggccgcagcggatcatgttgacgggcggcgcggggccgagcggagcggagcggagcgggtcggaggagcgcgcgggacgggcgacagcagagagtggcctgcgagcgcgggcgccgccacaaaagcgaagaggccgcggggaggcggctcccgaggacgccgctccgggcggccccacctagattccggtgactcagagcgcgcccgccccgacctgccctgccgggccggggcgggcggggccgctggtaaacaggctgggttctggtgacaccgggcggcggcggaaggcggcccgagggtcccgcgcgtcccacaaccctccagtcccgctctcctggcctctccaggcgcgtgttttgtcttcctggcgcaccaacatatacacttgtttatctgcacagcgccagcctaatatctgacccctgatgtcgcatcgtggggcggtggtcagcagtgccatatctgagttttcagcagtgtgagatgggtgttctaattgcacctgtggataaaggctgcactcctttggacgcgtgcacccaaacccagaagcccgtccctgacccctgctgacacaggtgatcccttcctcctaggctccgcctttgcaccttggaccgtggctccccgggtactcttatctctttgcatgctgttctttcctgctgggttgccagattttggaaagcggaggcgatgctgaatttatctgtgtatccttagtgtccggcaccgtgtttggatctcaaggggagctcagtgaatttgatgaatgaacatgtaatttaacaaatgctcgcttcctttcggaaaggcttcatctggcttccccagataatttcatgtcgcctctgctgcagtccacttcctatcacgaatctctacctatttaaactgcactctctctactcttcatttactattttgaggtttttccaaataaaaatcatacgtcagcatgcaacctgcatttaggatccccccttcggtgtcctgggctagctcccgtcgcagttctgactcctaagatgtgacaggaagggtggggtggcagccaggtgtgccgctgaggacaaaggagttctcagtgtcaggcacctcggtggccttgggaaaatcactgaaacatcgtatgggggtcatgtcttaaccctgtacctccaaagatttcttctgaatcccctattttttctgttaatttaatataaaagtgggaactacttaaaaatattttaaattgtattccaatttgatattctcaatagaaacagaatactcttttgacttatgccattttctggcaattcttgaggacgaataaaagcatggagaaagtatctgaaaatacatgaaataatttccctagccttcattttacataattcaagttttacataaaccacgtcatatatttttattacaggaaaatattttcactttcaaagaacacaagagggtgttctgccaaaagttaattttgtatcgtggaagctgtgtgaagaaaatggtgatatttatgttctcagggttttcaaaagtaatgaagatatttgtttaattagctatgtataatatatttgtgagaaaaaaaaattcttataagtcaaatactgaccagaagcaaagtggcttcagacaaaatgagagttttgcaggcatcttaatatctctggataattttggacttgatatatataatttattttcgttattcaatgaaaccatttccgatgggcttgaggaaaagagctcattaatgccgaggtgaacacaaagagattagctcttcacaatttctggaagagaccacattgaccctggtgggtttccaacaataatatacccaacatgtggtacagactctggaaccggatggttcaggtttacacgctttctcatattcgctgtgtgacactgggcaggttagttcagttttttgtgcctccatttcctcatctgtaagacagacagtgctaacctcagtgttttaatgattgttaaaagagcaaattcatctaaagtgctcaagatagttcctgcatatagtaagggttgatgatgatgatgatgatttttcatataggttttccacttttgaacattgaaagaggggaatgtccatgtttctaaagggcaaattctataggtgaataccaactgtaagtgactaagttatttgagacaatgcaatcattca

SEQ ID NO: 585587 - DNA, 4001 bp, Homo sapiens
ctgtagaactttctccctgaagcagaaagaacatgagactcaaacaaatgccaaccacggtcatctactcttcctttcttttcagactgactccttttttgatataaaacactaggattattttctctttctggccgtctgaacttttctattttttgcattcctcttattctgtaactataaagctcttgttagttttttaaaaaaattataagtttaagtatactcttttgcttcccctgtgattatttctaatctactacaaagttgttccataagctgaaggagtattccttctgagatcgctaaagagataattttccttccttcagtaaacgcaaaaatactttatttgtatttcttcaatcacacatatatttttagcttttataaataaaatggactctgtagtcttaggataatttaaatatacattagatactagcgactgaagatatcagaaaataccttttatatataaaggatttctcgaaggtgttcaaaatttacatatgcttattattgatgtgtgatagacctcagagacatgcaaaacaccatccttggctcagcaacaagaactctgtttcaaactttcaagcatcaccaaaatctgaactattgatgctaaaggtattaattgcaaattgtttggggagaacagaatacaatctaatacgtactgttaatttcaaattgtttggggagaacagaatacaatctaatactaagagaaaagccaaccaaattctttgggaaactctgttcttgattttaagtacttttgtaaacatagcatgtaataagtgatgagactatttctcaaaaactcaagttctaacaaatttcctcttttatagttcctagatgtccttttcatataattcacaaaacttttattccctccttcaaatccctgaatattatcacatgagcattgtatgagggaaaagcgtctcaagatttttatcttatctgtttctaaatctcctctgggcctgtgcaactcagttatgtcagctagattacaatgatcccaaccttgaagatcctgaggaagattgcacaacatccctcaagcatttttcttactgccatagtttgtattctaaaatggcagaaacagagctaaaatattgatttgtttttctttatctaatccatatctttcagtcctttaggacaactgcgctgttttcaaaaattcaaatcgactttaaccaccacccgaagtgcagcctataggtaacttccctagattattattaaactcctgagaagggtgagagccaaagtatcaagagtgccaaggagaaatgcagaatctcacaggaaagcagaattttttttaaaaagttcctgtaagagaatggtgccttgaaacagaaacttaaactgtgatgagttctccaaaggtccgtgagaaaaaaggataggtgagaaacagagttaagagtcggtgacagggcaaagggcacagaggcatttctcaactgcagagatgggagaaccctggaggttggccacctcccttttcatcccatggttgatcgaactccctctacatatcccagactaggatcgcccggcctgtccttattttagaagaagtcacctctcccacccccttctcccaatgccccctttcaagcacgttgtcacccacctccaaggaccgtgcccaggaagatgcatttctttttgtggcgtttcagaaaattccatacagacctcagcatctttaggccctaggggtgtgggctgactaggggtgagggactgcttcaccaggaaactgtttcttcgtcacctggcccagatgacccagcaagagcgccgtcgtcccgttctgtgctctcccgaaatcacaaacgtgactttccgcagagactgtcaccggagcggcaagggggcgtggactacagcaaagcagctacgctttctgccgctgccgccgcgcagccgccgccgctcactggtccgacaagcccaggtccgttcagaaatagctcccgagtgccttttcattagactacccccggaaacggggtcccgggcccgccgcgttccgctgcccgcgctcctcctctgccgcgggctctgtagctgagtggtggctgggtatggaggcgaaggcggcacccaagccagctgcaagcggcgcgtgctcggtgtcggcagaggagaccgaaaagtggatggaggaggcgatgcacatggtgaggagcccgggaggtagatgctgcggggtgggacctttctccagccctcaacccgaccccggcatttgagcaaacgttctttctcgtcaccataatttttatggcagtcagatgttctgggtgaacaactggctttactgcctcgaaactttctgtagcccattctcacagtggctctgggcgaaggaaggggaggaaatacacaaattatttgtttcattgcggtggagtatgctgcagacttaacattctgtcgccggctggcacgtgctgcctccctttcctttctgtggtcacacactctccaatctacaaagtcacattatttgaggttttggcccttggaacatgtccagcagaaggaaggaaactgagaacgtttctggtagagagcagtatggaaacaagtccctgtacaatcggcgtctcgcattcattcattatttcctctgcccttttacttccttccctcactcccttcaggactgcgaaataaagggggctttcaacagaatgctgtgtgctagcgagcttcttaactgggaaaaaaagtttgtttgtaaatatatgtatttacattttaataactacatacagccacgtgccacacaatgacctgtcggtaaaggtcgttatcctggagcattaaatctactcaccttagccctattgtcccatccaagtactaaccaggcctgaccctgcttagcttccgagatcgggggacattcagggtggtatggaggtagacaaccctagtttctatgtagacttctgggctaaacactttcgctaccttttaggttgaccctgggctagcacatgtaaatacatttacatacgtttacaaacaaacttttatcccagttaagaagctcgctagcacttttcagctccattataatcttataggaccacatatacagcggtggtgctataggattataatgaagctgaaaagttcctgttgcccagtgacatgtagccctcctaacaagtactttttttcctttaagaccttgaagaaacttgtatatgctaaaacccaagaagcagctgcctccttaatcctgtgtaggaggacgtaaactatggaatcacatccctaggtgtttataatacaattaagagacaaaaaatgtcaaagccagagaggtctagaaattctttgaaaacatctacatgtttaaaaagatacaaagtagcatggccagatgcagtggctcatgcctgtaatcccaaaactttggaaggcagaagcaagaggatctcttgatctcaaaagttgaagaacagcctgggcaacttagccagaccccgtcactactaaataaaaatttaaaaattagtagggcatggtggcatgtgcctgtagtcccaactactcaggaggctgaggaaggtggattgcttgagccttgggagattgaggtcgcagtgagccgtgtctgtgccactgtactccaacctgggagacagagccagaccctgtctcaaaaaagaaaaagatacaaagtaaaggaaatacaaagaaggaaaatatttgcgacatatataaaaggacaggtttaataaccgtagcatataatttatataaaatctaagtactttccgacgtaaaaggaaagatgtataccctaatactgaaaaaggtcaaaggctatgaatatatttctttttaaaatttctttttatttttagaagatttttttttggtttagacagggtctctctgtgttgcccgagctggtcttgaactcctgggcccgggcagttgtc

SEQ ID NO: 585588 - DNA, 4001 bp, Homo sapiens
aacctcacttttttttttttttttttttacacagaatttcgctctgtcgtccaggctggagtgcagtggtgtgatctgggctcactgcaacctccacctcccaggttcaaacaattctcctgcctcagcctcccaagtagctgggattacaggcatgcaccaccacacccaaacttcacctttcacctgaatggatgaaagccttttgtatgccccactacattatggaggcttatgatattttgattacagaatatggatcaataggccgggtgaggtggctcacgcctgtaatcccaacactttgggtggatcacctgaggtcaggagttcgagaccagcctgaccaatacggtgaaaccccgtctctactaaaaattacaaaaattagccgggcgtcgtggcgcgagccagtagtaggaggctgagacaggagaatcgcttgaacctgggaggcggaggttgcagtaagccgagatcgcatcaccacattccagcctgggtgacagagcaagaccccatctcaaaaaaaaaaaaaaaaaaaaaaaaaggaaagaaagaaaaagaaaatagataaatgaggctaagaaacattatgcttttttttttttttttttgagacagagtttcactcttatcgcccaggctggagtccaatggcgcgatcttggctcaccgcaacctccgcctcccaggttcaagcgattctcctgcttcagcctcccaagtagctgggattagaggcatgcaccaccacgcccggctaattttacatttttttagtagagacggggtttctccatgttggtcaggctggtctcgaactcccgaccccaagtgatccgctcgcctcggcctcccaaagtgctgggattacaggcgtgagtcaccgcgcccggctagaaacattatgttcaaagtccgggatgatatggggcacgagtcctaaatcttccaatttacctaagacagagaagagggtataagaaagaggaagcactcctgaccccagtcctttatcctacctgaattctgagctctcccatttccagggggtcacagccaagattaaaagccaaagtggcagggacaagcgccagtccgtcagcgaggggctctcccagcggtccagagccgggtcccagtctatcagagaggtcccagcgaggttctaggacctgcaccctagccaagtgcggctgtgaagtgttcgatgactctctggcctgggccacccacacccattcgccctggaagaggccaaggccacggagacagctccggctcacccctagtgaatctccagtccctcccagaactccctggagtcgccgcactgtgccagaaaccgcaaaggaggacaccacgggcgggggtgggggccgactgctgtccccagactctggacacagtctggcccgcccgcggagctcagtcacagccagccgagtccctgggcccagcagcccttgcaacgccggccgcgtctccagcacccgcggtccgggcactgggagggtctctccgcgcctcaccagcagcggcccgactcgcggtccgagcccaggccccagcgaggtgccaagcagtgcccaacctagcgccgggggccgccgcaccgcccgcgcccgcacccaggccccggagcccagtgccaggagccgcagcagcgcgcggctaaccagtagctgcggcggcccgggaccctgctcttcggtgcccgcgtccggcccctccagggctgccaccagcagcgccggccctgccgggctctcccctgcaggcctcagggccagcaccaggcccagctccgccgccggccacgggcccccgggtggcagcagcactgccaacgggggtgtctcggtcggaaagggctccaggacccgcaagacagccagcgccatggtgacaggacaccaacgaggagggtgaaggagcgcagcttccggagccagagagccagacgactagtgtgcgcgagggccgcttccgcttccgtcaggggaggccagaggaaaaggggaggggggtcgggtgccgcgaacttgctctgagggggttagctgcgcctcggattgatctgcgtcgtgcctcgataggcagtaaccttcatcgctgcggttgcgtagcgtttacccatgcgccatttgaacttgtgcttaagggatttatctttgccttctacggaagtaatgttctcttaactatttttccccgtggcatgaacgtaacagtttattgactgataaatgaacagtcagcatgctcgggatgactgggcccagtactgggagctctaggtgaaatgtttcggaaggagtccgctcctctgcggagctcctgcagcttcccctgtggaactgtgagcactgaggtttgagggttgcaggaaaggttgcaggagggagtagcaggattagaaaactgtctcacacttgcttataggtatatagtggctgctgagtgaattactagatgtgattcatacagccctggagtgcttggtgccaccacacatgttccagcacatctggcacaaaacccatgttccaggacttcttgccctgttcattgttctgtttgttttactcccaccaaacttaagttgaagacaaaacagcttttctttcaccccccccccccaaatccttgcagatcggaaacccattcactttctatcctagagcggggcaggcagcagagcaggcagaaggaaaggagttcaaggcttctgtcagcataacaccaacagtcgacttcctgcgtgtgctgttatttagattccatccttctcttcacctccactgttctgtacaagacactcagctagtggtaggccacatttccttttttatggcaacagggtcctactctgtcacccaggttggagtacagtggcacgatccccattcattgcagcttctaccgtcccaggctcaagtgatctcccacctcagcctcccgagtaactgtagccgggaccacaggcacacgccaccatacccagccaattttttttttgagacggagtttcggtcttgttgcccaggccagagtgcaatggcacgatctcagctcactgcaatctccgcttcccaggttcaaagaatctcctgccccagcctcccaagtagctgagattacaggtgtgtgccaccacacccagctaatgttgtattttcagtagagacggggtttcaccctgttggtcaggctggtctcgaactcctggcttcaagtgagccacctgcttacgcctcccaaagtgctgggattacaggcatgagccactgcgcctggactaattttttattttttgtagagacagagtttctctgtgttgcctaggctggtctcaaactcctggtctgaagagatcctcaggcctcagcctcccaaagtgctgggactacaggcataagccatcatgtcccactgcatttccaattattaacaattattttcacttacaataaatgaattggatggtgccaatctccattttctagaccttacattctctttcagctactgctcagctttctccatctctcctttcttcttgaggcagtcttctattttgtacattatacattcctgaaaatttgaaagacaaatatatgaaaactattagatttgcatattataaggggctgggcgcagtggctcatggctgtaatcccagcactttgggaggccaagtgggtggactgcttgaggccaggagtttgagaccagcctggccaacatggtgaaaccccgtctctactaaaaatacaaaaattagctgggtatggtggtgtgtgcctgtagtcccagctactcgggaggctgaggcaggagaatggcgtgaagccgggagacagagcttgcagtgagccgagactgcgccactgcactccagcctgggtgacagagtgagattccgtctcaaaaaaataaataatagaaaaaaataaataaaatagcatgcaagaatgtactaaccaggaaccatg

SEQ ID NO: 585589 - DNA, 4001 bp, Homo sapiens
tttttttttaaataccaattccctttaaagagtttttgcataagattttaagtagcattacaggccagtcacagtggctcacgcctgtaatcccagcactttgggaggccaaggcaggaagatcgcttgcacccagttccggaccagcctgggcaacatagtgataccctgtctctacaaaaataaaaaatcaaaaattagccaggtgtgatggtacatgcctgtggtcccagctactggtgaggttgagacaggaggatcatatgagcccaggaggtggaggctacggtgagctgtgattgcaccactctactcaacctaggcaacagggtgagaccctgtctctaaagagaaaaagaaaaaagaaaaaaagaaaactactaccattatagactcatgagtcttcagtctaactggtgggccatgtaaatctgaatgtgcaagcactaagagctaataatgaaaataaatcaagtatttctctgagttttagaagtaacatttttttctgctgtaggacaaaacaaaaaaatacaatagaccactgacattatgaaatgagtttttgcatctcgcttcagtgcgtataatagctaggacatgaattaaggcaaaagcgagaatgaacctacgccttttcatctagtccacggactagatggactcttttttttgagacggagttttgctcttcttgcccaggctggagtgcaatggcacgatctcggctcaccgcaacctctgcctcctgggttcaaactattctcttacctcagcctcccgagtagctgggattacaggcatgcgccaccacgcccggctaattttgtattttcagtagagatggggtttctccatgttggtcaggctggtctggaactcccgaactcaagtgatccgcccacctcggcctcccaaagtgctgggattacagacgtgagccaccgcacggcgcttggccttttttctttttaagacggggtctcagtctgtcacccaggctggagtggagtgatgtgatctcagctcactgggctggggcagagtgatgtgatctcagctcattgtagcctcaacatcccgggctcaagcgatcctcccgcctcagcctcctgagcagctttaaccacaggctgagccaatgcgcgcgacgggagacaattaactggagtctgtaacacctacttgcgaatgtgtgcattcctcgttagacaactacaggtaagaactgaacttgatatatttcatggtgtcacccgtgggactccaggcgtccattcaggagcatcgtccttaggaaggccagcccgcaggtcgcagctcagtgctcgaatgcagactgggaattgtgggccaactcgcgagccctgggtcggttctggctcagaccgtcttccccgtactgctgtgccgagcggaccgatccaagggaccgcgcaggctcccccggctctccctacggggacgtgtgcctgggcgtgtgacacgtggcggaggcagcgcggtctcaaggaacaaggacacgggctactaggctacacgtatatgcacttgcacacaactggaagatcgactcctgcttcagaccaactcctcgcactcggcaaagaaaggagaagcgccgaccagcgcctcttctgccccctggcgtggacccgcggaaccgtctacgctcagaggggctttccctcgagcgcgaggaactggagcccggctggcccccgcctccgcctccgccccccggccccagctgcgcggcgccgcctcacccgcgatgccgtagtgctgcgcggtggcgcaggccaggcggcccggcaggtacggggagaactcggcggcgtagccgtggcgtcccggcgtccgcagcatccgcgccgctccaccgcacaccgcactcatcccgcccgccgcccccggccctcgctgccccggccgcggaagccgttccgagtcggaggcacactggcgcggttagagagaccaggcagaccggacggaagtgtgggccccgtgccctgtgtttgagattctgattggtccgcacaggaaagggcgttgactccgacggagaccatttttgttttgggtgaatccaaactgaattgcgcctgctgcaaagatacagatctatcaggggagtgatccagggttaggtattattaataattacgacagcttttgtcgttgcatctcagcctcctctgcggtgctatctggtttttatttcattgagcgtttggaagactggcatcaggaacttttcctgatgattataaagtgagaaaagttacagccgactctgaaaccacgcagcgcgtccaaaattgcgtgctgcgttgcccaaggaaactggaagcaatgagaacttaagtccgtggagtcactgcggtctttaggaataagagcgtgggctggtgggctactttcacactgtaactggaaaagatgaaacaccaactccaaaccaactccccatgcttggcaagtgagaaaaaggagctggccagttctaatgaagctaagcaaaaaagcagcacatcatcatatacaacttttttaaaaagtattactatacatgtatatattgtatggtaataagtgctcagatgctggtgctcattcattcatttattgccaggcatatactatgtggagaatgaccaaatataatttatctgccaaaccaagatacttttgagagtaaagagggtgtaattattaagccaggtcaacaggcacaaaccaagtcgtatgatcatcttaaccatataccaagaacagtactaggcatttgggattcaaaataatgggatatggtccatggcctcaagagattagagaagaagactaaaagagaagtcatgtaattagttaagtgtaatcaaaatactgtagaggctatgataaatttatatggggtatttttaaaaggtgattgtccgtgccagaggtatggaaattgcaggaaaggctgcagaagagagataagtctttatggtgattgcacacagatgagtaggttttctttaggtagacaagaagatggagatctttgtaggagcaggaataacatgagcaacccaggagatttaaaccagcatgatccatagggggtcgtggctgccaggactcagcctggccagatggaagggatacggtgaaaaaaatattgggtggggagactgtagagtgttttactggggctagatcatgaagagtcttatataccatactaagagaattggatttctactgtaaacagtgaaaaacagtggaagttttctaatgtgagaaattaaatgaccaaggttttattttaaaaagtcctgcaacactaatatggaggatagagtttggagatggggaggccagttaaaagacttttgcaggccgggcgcggtggttcacacctgtaatcccagcacactaggaggccgaggcaggcggatcacttgaggatccagaccagtgtggcctctattattttggatttttatcatatgtagtcactggaatgtatgctgcatgagggcagaaatttttgcttgttatgttcgctgttgtatcccaaggacctggtatttaagcattcaggaaatgttgagtgaatgcagcctaatacagtgcctaaatgatcagtgtgtttttcgtaatactacaaaaagtaacctggaaacattctggagtttattgaaatgctaaataggcgttaataaaatatcaaagtaagcaaacatgaagcagctgggaccttggcaaagagttgtatataaagagttatccaatctaagctaaaaatagtgtggtatctctgggagggagaaaggctggttccagctggggtaaactatttacagtgaccttggacatacacacacacacacaaactgagctattacctgctccttacctaaccatacatgattatagcattgtaaaatatttcatcccacctgtgaagctttctaaaatataaacaactaaacatataaaaaataaac

SEQ ID NO: 585590 - DNA, 4001 bp, Homo sapiens
acatatgaactggctgctatgagtgggggtggggaattggctgaaggtagatgccatggaacaggaaggggcacaatgttttctgtccccatgaacagagcaaaaagtgaggtattggtgaaaaaagtttcctcagaacagtttctctccagtaacctctctaccactggtcccttgctgcaaatgtgtataaaacaattttaggacaaggaaatggcagaacaactttatggacaacatataaacttgggaggacttataataccataaagcattacatgctgggattttaagtcagtttaaagctacattcaagcaaattctaggaagacagaggctgaaaagtactaatagagatgccagggctgttggcaaggagggtaaccacatttcatcctggggcctcaggttagagaactgtgtattctttttcaattaaaccgacattcctagcaatatggtatgttgcaaatgcccttccaaaagaatcatgccaaccaagatgagggagagttaagggttgtatatacaggcaagaagtaggtttgaagacatttaggatttcactttcaagaaagaacactgtgccacaaagagattccaagtgcaagagtttgaacctgagggggtaatacaggtggtgtgtgttaaggtggaaggggctgtggggatatgacagaagtgcctggtcaggaaacagagccaggtgtttttacattttattagctacagtatagatcctagagctgcctcattccctcccctcccctcccctccccccaccatggggtcaggccttgccaggagcccctgcctttgctgcctgggcccgctggaactcctgctgcagctgagcaagggtctccctctgttgctctgactgccgctcaagatcccgaagctgggattcgtatcgcttactaaggagagacaagggagacaagcagaaagggagaaattagtaggactcactatggagagtgctaaacgcaagaaagagataggtggaaaacttgagatccaggggagggagaagaaggggggttaaaagggaaggaaagggttggaggaactggaggactaggggccactatggagagctgttctgcaatggttcaacacctctactccaatggttcacttgcatcacagggtgcagcacacggtggtggaataaaaactcacatttcagctgtgatatagtccagcctcttccctactgtggcccgagcctcccccagctcctgtttgactagcaccggacccagaagtttaaagaccacgttggacccatccagcagggccagttcctgatggagggatgggacatatgtgatcagaaccatggctagtacaggtccctcctcgccccacaaatcccagtccctcacctctttcacgatattattttctgttagttgtgcttcaagtttctgcctccccgacatggatttacttaagtctggggatgagaggaaaggcaatttagaaacatcaaatgtgccacctatccccacaatcctagtcaggtggatatggatctgaggaagcagaaaaggatgggggcagcgggtgagtgaacagggaagagtactgagactgaggcggggaagtctctgcacgcgagggcccagatggggcaacaaaccttatctcggtaatggctttgggttgtaagtgcattgggcgagaccataccgaccctgttcccttacccttctgtagctgttgatatttctccacttctccctgtagcttcttctggatcagctccgccatggcggggatgaaagcctactgggtgcgagacaagggcgctgggtctcactctctggaaggtacctgagctcccttttctgatctggcctgcggaaatgatagcactcttgagaggtagccctgaggggcaccgcaacctcccccccgtcccggatatcgactccaccctgtccccaggagatggtgggcgaaacgcaagaccccaagcctctcaaccgaaatcctaacctactcacgttcttccttcagtagtaataaacccggaagtaaacaaggaatgctgggaaaagactgtgccggaagtttctttctgacccttgatgggaagtgtagttctgacatgtttagggagtggagttctgctaaaaagactagactaggacatttttaggcaagatggggaaactaatccagaaaaagaaaccgcaccgctacttagcccctggctccggacctgcctttcttttttaaatcactcttgcataagctgccgctcgcgataaggtgccaaaaactgttccgcccctctaaggagagcgtgccctcactcaagatggcacctagagagcttcatacctggtacgctgctgattggatgaaggacagagggcttccgggagttttcaagccgactgtgtggcagctgagaggagttttgcacgtggatcgccgttcgggtgggcgagatggagacagcccccaagccgggcaaggatgtcccgcccaagaaagacaaacttcagaccaagagaaaggtagaggcctccctgggtgggaaacgaagtttttagctgtggggtcggggggcggggcgtgagtgcggagttcctgatgtgcctgtagaaaccgcggcgatactgggaggaagagaccgttccgaccacagccggagcctctccagggcctcctcgtaacaagaagaatcgggagctccgtcctcagagaccaaaaaatgcttacatcttaaagaagtctcggatctctaagaagcctcaggtcccgaagaaaccccgagaatggaagaacccggagtcccagcgcggcttgtccggggtgagcgtgggacctgatgggtggcgaggcaggccgcctcgttccttgagagtgagagggttggggtcaatccaaggctgtctgctaattgcgtcctcctttcccctagacccaagatccattcccaggccccgcccccgtccctgtggaagtggtccagaagttctgtcgcattgacaaatcccgaaaggtgaggtccagccggagagttgggaagtgctggaggcagggagtgtctgggtgagttggatggaggctgggacaggtagctctcctgtgaccccacttatcctgtggttcttctgccactcctccccaccaacaatgttacagctaccacattctaaagccaaaactcgaagccgacttgaggtggctgaagctgaggaagaggaaacaagtatcaaagctgctcgttctgagctgctgcttgctgaagaacctgggtgagtgagccctaatctggacccccattccctgccttttgggactgtcttttctcgtttttatgttggtatacttgcttcatattgggaagctttactgccatcctaacccttgctttcaggtttctggaaggggaggatggggaagacacagcaaagatatgccaggctgacattgtggaggctgtggacattgcaagtgcagccaaggtgagcctgaggaggtaaaggagccaagggattgattggtggtgcaggacaatagaggaatgggggctagaagaaggcgttactgcagggcactcttttttttcactcttctctttcccagcactttgacttgaatctgcggcagtttggaccctacagactaaactactctcgaactggaaggtaaggttgaattctagtgactcttgaactaagatgtgtttccttaaccacttcagccattcccagtgtatgtttgggttgctgatgaggggagggtccttcgatttgcttgggtgtgagggtaagcacctacagcaacatgtgtctgcccgcctggagagatggggctggcgtggggcagacctcaagttgtctgagtcggtggtcccctgccttaacaccctgcctgcccctcacctccaacagacacctggcttttggagggcgccgaggtcatgtggctgcccttgattgggtaacaaagaagcttatgtgcgagatcaacgtcat

SEQ ID NO: 585591 - DNA, 4001 bp, Homo sapiens
ggctgaaggtagatgccatggaacaggaaggggcacaatgttttctgtccccatgaacagagcaaaaagtgaggtattggtgaaaaaagtttcctcagaacagtttctctccagtaacctctctaccactggtcccttgctgcaaatgtgtataaaacaattttaggacaaggaaatggcagaacaactttatggacaacatataaacttgggaggacttataataccataaagcattacatgctgggattttaagtcagtttaaagctacattcaagcaaattctaggaagacagaggctgaaaagtactaatagagatgccagggctgttggcaaggagggtaaccacatttcatcctggggcctcaggttagagaactgtgtattctttttcaattaaaccgacattcctagcaatatggtatgttgcaaatgcccttccaaaagaatcatgccaaccaagatgagggagagttaagggttgtatatacaggcaagaagtaggtttgaagacatttaggatttcactttcaagaaagaacactgtgccacaaagagattccaagtgcaagagtttgaacctgagggggtaatacaggtggtgtgtgttaaggtggaaggggctgtggggatatgacagaagtgcctggtcaggaaacagagccaggtgtttttacattttattagctacagtatagatcctagagctgcctcattccctcccctcccctcccctccccccaccatggggtcaggccttgccaggagcccctgcctttgctgcctgggcccgctggaactcctgctgcagctgagcaagggtctccctctgttgctctgactgccgctcaagatcccgaagctgggattcgtatcgcttactaaggagagacaagggagacaagcagaaagggagaaattagtaggactcactatggagagtgctaaacgcaagaaagagataggtggaaaacttgagatccaggggagggagaagaaggggggttaaaagggaaggaaagggttggaggaactggaggactaggggccactatggagagctgttctgcaatggttcaacacctctactccaatggttcacttgcatcacagggtgcagcacacggtggtggaataaaaactcacatttcagctgtgatatagtccagcctcttccctactgtggcccgagcctcccccagctcctgtttgactagcaccggacccagaagtttaaagaccacgttggacccatccagcagggccagttcctgatggagggatgggacatatgtgatcagaaccatggctagtacaggtccctcctcgccccacaaatcccagtccctcacctctttcacgatattattttctgttagttgtgcttcaagtttctgcctccccgacatggatttacttaagtctggggatgagaggaaaggcaatttagaaacatcaaatgtgccacctatccccacaatcctagtcaggtggatatggatctgaggaagcagaaaaggatgggggcagcgggtgagtgaacagggaagagtactgagactgaggcggggaagtctctgcacgcgagggcccagatggggcaacaaaccttatctcggtaatggctttgggttgtaagtgcattgggcgagaccataccgaccctgttcccttacccttctgtagctgttgatatttctccacttctccctgtagcttcttctggatcagctccgccatggcggggatgaaagcctactgggtgcgagacaagggcgctgggtctcactctctggaaggtacctgagctcccttttctgatctggcctgcggaaatgatagcactcttgagaggtagccctgaggggcaccgcaacctcccccccgtcccggatatcgactccaccctgtccccaggagatggtgggcgaaacgcaagaccccaagcctctcaaccgaaatcctaacctactcacgttcttccttcagtagtaataaacccggaagtaaacaaggaatgctgggaaaagactgtgccggaagtttctttctgacccttgatgggaagtgtagttctgacatgtttagggagtggagttctgctaaaaagactagactaggacatttttaggcaagatggggaaactaatccagaaaaagaaaccgcaccgctacttagcccctggctccggacctgcctttcttttttaaatcactcttgcataagctgccgctcgcgataaggtgccaaaaactgttccgcccctctaaggagagcgtgccctcactcaagatggcacctagagagcttcatacctggtacgctgctgattggatgaaggacagagggcttccgggagttttcaagccgactgtgtggcagctgagaggagttttgcacgtggatcgccgttcgggtgggcgagatggagacagcccccaagccgggcaaggatgtcccgcccaagaaagacaaacttcagaccaagagaaaggtagaggcctccctgggtgggaaacgaagtttttagctgtggggtcggggggcggggcgtgagtgcggagttcctgatgtgcctgtagaaaccgcggcgatactgggaggaagagaccgttccgaccacagccggagcctctccagggcctcctcgtaacaagaagaatcgggagctccgtcctcagagaccaaaaaatgcttacatcttaaagaagtctcggatctctaagaagcctcaggtcccgaagaaaccccgagaatggaagaacccggagtcccagcgcggcttgtccggggtgagcgtgggacctgatgggtggcgaggcaggccgcctcgttccttgagagtgagagggttggggtcaatccaaggctgtctgctaattgcgtcctcctttcccctagacccaagatccattcccaggccccgcccccgtccctgtggaagtggtccagaagttctgtcgcattgacaaatcccgaaaggtgaggtccagccggagagttgggaagtgctggaggcagggagtgtctgggtgagttggatggaggctgggacaggtagctctcctgtgaccccacttatcctgtggttcttctgccactcctccccaccaacaatgttacagctaccacattctaaagccaaaactcgaagccgacttgaggtggctgaagctgaggaagaggaaacaagtatcaaagctgctcgttctgagctgctgcttgctgaagaacctgggtgagtgagccctaatctggacccccattccctgccttttgggactgtcttttctcgtttttatgttggtatacttgcttcatattgggaagctttactgccatcctaacccttgctttcaggtttctggaaggggaggatggggaagacacagcaaagatatgccaggctgacattgtggaggctgtggacattgcaagtgcagccaaggtgagcctgaggaggtaaaggagccaagggattgattggtggtgcaggacaatagaggaatgggggctagaagaaggcgttactgcagggcactcttttttttcactcttctctttcccagcactttgacttgaatctgcggcagtttggaccctacagactaaactactctcgaactggaaggtaaggttgaattctagtgactcttgaactaagatgtgtttccttaaccacttcagccattcccagtgtatgtttgggttgctgatgaggggagggtccttcgatttgcttgggtgtgagggtaagcacctacagcaacatgtgtctgcccgcctggagagatggggctggcgtggggcagacctcaagttgtctgagtcggtggtcccctgccttaacaccctgcctgcccctcacctccaacagacacctggcttttggagggcgccgaggtcatgtggctgcccttgattgggtaacaaagaagcttatgtgcgagatcaacgtcatggaggcggtgcgggacatccggtcagtggcctcactgt

SEQ ID NO: 585592 - DNA, 4001 bp, Homo sapiens
aataagaaagctcgagtagcttgcacttcagctggggagaggggataatttacccattgaggaggcagatggctgccttcatggacaaataatacagtctcaaaggtcttctatatctgtgtaactctcattgaatattccactttaaatgtaggtgtaacagaatgtttccaaagtctcccattctcaaataccttttgtgatgagattttgccactgttgtcattcaaggggtggagtctctttttccttcccttgaatctgttctggcctatgacttgctttgaccagtggaatacagcagaaatgacattgtaagagagagtgctgctgtagctcttggctcactgccataagactgccatgctgtaaggaagcccaagctagctatacagaggtcatgtggatgagaaccaaaatgcccaagttaaagcccagccaggcctagtgctcaaataattcaccacctgaatgcagctctattagtaactccaggtgagaccagtagaaccgcctagtcaacccgcataatcctgaggaacaataagctgagcttgttttcagccactaagtttagagttttatttttgatgcaacaatacataactgaaaaacagtagacatgcatcaagttcttttattccctcttttcattttttcctttgtgatctccttagtcacactttcaatatatctctgttccaagaagactcaaatctttggcaccagcttgctttttgcactccaaacccacatcttgaaatgccagcagctgtgggcctctactgcactataatttcaacagatctcaaactgaaatcagagtccctcaaagctgcgttcactcggtatttctccatttctactggcatcaccatcatcttccacgcattcagtcttttaaacagcctctatacacaatcagtgagtcaattcttaaaaacgcctcttgcagccattctttccttcttataattttactattattttcattcactgttacaataatgttctgttacggtattcctgcccaactccccgcttctatggtcactggattaatattccctaaagcacagttgtgaccatattcaacatacctcacacacacataaacacacacaaagttttcattaaactcgttgaagtaaattcaaactccccaggatctaatctttactgggttttgctgatttgtttgtcactcaatcaacatttgtggagcatctcattattttccaggcataaagttaactctggaataaaagacttggttcctgctttcaagaaagccatggtcttcccaaatttcttatgtcactgccatgctaagtactcaatttttttccacccactctatacagtcaggaccgcccttctaagggtaaattcccaaggcccagcgtaaatgttctattgtaaaaccttccctggcaacccctaaccctaacatatagacaggaaaagtaagccacacaggttgagatggggtattcccatagaaaactgcacccaaccctcatctccatctcgtattacagatcaccaaccccatccccacccgggttcttgaggacaggagtttatctctgcatagactctacatgcccggcacgtacctggtattcaagaaatactgatgggcttcttcacgaatgcacgtaaagcacctgagatgccagcagccagcaccctcaggcgcgcccctgaatgtatttttctgagattacacccagcatctagcaccgcgccaggcactgaataccggcgtgtctaattgttggttaatggaccaaaagttcaggaacgcgcacaacaaagacgtagctgacctcgtgaaaggctcccgagggagctcagaggcccggtgctcccctgtcgggagcgccggtttccccagagcccgggccgctgggctggcgggtctggcgggcgctgccggcgcctccagcagctgggcgggtacaaaagcttctccctgcgccgcgcccgcagcggagtggcggagtctggcgggttccctgcctctctaggagcacggccgctcgtctctctggtgagccgggaggacccccgctgccacctcctgccccgcccaggtcactctccgccgccggaccccaggcccattcggacggtgcaagcacgccccaaatttatgtacatcatttcgattgaaaaccaacacagtggtaaatgtctgtcttcggggtcatcactggctggtaggagagacagatcaataaaaagaccattatagtaagctgtacaaattattttctttaagtatacataatatatgtacaataaaaaagtcaagttgcaaaaggaccataaaacgaaaagtgtcccctctttagagttaaccattgtattttgttcatatttatctaggacactacctgccacacagtagcacttaatgaacattttgtttagtgaataagtatttatacattttaaaacacttatggtatcataatgtaattttgcaccttagctcttttcggttaagacaacttggagatcttcacagatcagcttattctttaacagctaagtaatactgtatgagtgttccataatttacttaactatcctattgatgcatacttaggttatattttttctttaaaagcaatgctagagggaacaccattcaatacctttacattcttttaagaatatatttctaggataaatgccacatattagaactgttcagccaaaggacacgtgcatttaaaatgctgatatgcaagttccctatttgatttttaagggcacttctgtttaagagtaaaaggagactttagtagaaaaattagtaaaggatatgaacattactacacacaagataagtgacaaattaacatgtgaaaagatgttcaatagtaaaaatataaaaaactctttaaaaaacagacccattatttattcatttacctactgagttttggcaattatgaataaagccgctataaacatctgtgtgcaaacttctgtgtagacactggttttcagctcctttgggtaaacactaaggagggcgattgctgtatcacatggtaagagtatgtttaattttgtacgaaactacctaactgtcatccaaagtggctgtatcattttgcattcccaccagcaatgaatgagagctcctgttgttccacatccataccagaatttgatgtgtcagtgttctggattttggtcattctaatagatgtgtagtggcatctcacagttgttttaatttgcaatttccctgatgggatatggtgtggagcatcttttcatatgcttattttccatctgtatatcttctttaatgaggtgtctgtcaaggtctttggctcatgtttgaatcgggttgtttccttatttctgagttttaagagttctttctgtattttggataacagtcctttaacagatatttcttttgctgtggtatatgcagacaatggaatattattcagtgctaaaaagaaataagctggccagacacggtggctcaagcctgtgatcccagcactttgggaggctgaggcaggtggatcactttgagctcaggagctggagactagcctgggcaacacagtgaaaccccatctctactaaaaatacaaaaaattagccggccgtggtggtgtgcgcctgtggtcccagctactcagaaggctgaggctggagaattgcttaaacccaggaagcaaaggttgtagtgagccaagatcgtaccacagcactccagcctggccaacagagtgagaccttatgtcaaaaaaaaaaaagaaaaaaaaaagaaatgagctatcaaggcatgaaaagatattgagaaaatttaaaagcatattacaaagtgaaagaatcctgtctgaaaagctacatactgtatgatttcaactacaagttgagtatcccttatctgaaatgcttggggccagaagtgtttccaatttcggattttggaatatatacatacattatgaaatatc

SEQ ID NO: 585593 - DNA, 4001 bp, Homo sapiens
ctaattttttgtatctttagcagagacagggtttcactatgttggccaggctggtcttgatctcctgacctcgtgactcgcctgcctaggcctcccaaagtgctggcattacaggtgtgagccaccgcacctggcccaggatatgtagtttttttttttttttttgagacagagtttcgctcttgttgcccaggctggagtgcaatggcttgatctcggctcacctcaacttccacctcccgagttcaagctattcttctgcctcagcctcctgagtagctgggattacaggcaagggccaccatgcccagctaattttgtatttttagtagagatagggtttctctatgttggtcaggctggtctcaaactcccgacctcaaatgatccgcccgccttggcctcctaaagtgctaggattacaggcgtgagccactgcgcccagcccaggaaatgcacatttttaacagaagatttcaggccaggcacggtagctcacgcctgtaatcccagcactttgggaggccgaggcgggtggatcacttgaggtcaggagttcgagaccagactggccaagatggtgaaaacccatctctactaaaattacaaaattagccgggcatggtggcgcatgcctgtaatcctagctactcgggaggctgaggtgggagaatcgcttgaacctgggaggcagaggtttcagtgagccgagatcgcgccattgcactgcagcctgggcaacaagagcgaagttctgtttcaaaaaaaaaaacaaagaagatttcagagatggcaaagttcaccccagagttcctttctacggcagccctcaggcacctggcaccagctggatgtgacagagcatggagcaacggcaacagcactagctgggactcaggacacagagtcctagttctgtcccagctgctaatcgcatggcctaggccccatcactgctcctctcaggacaccaggaccacgggaagttggcctgggtggtctggagcacagatcagctctggagttggaacttataaatcaccgtttctgtcccatcctatgggctcagtcacaccctcggcactctccttcccagacttgcttgctgccattgcttgggagtctctaggggtccactctggccttgctctaggctccagaattctgcttaatccccattccctggggactctgcattctccagaaattctctgctaaaccccttcaccctgagctatgaagactaattaaccacctctaccaaatatgcatattgataggagtttctgagaggagccagctcttggcctcaggaagtactcttgggtagagaaataacaggcaggatggcaggctgggcgccttcctgatggcctgtgagccatgccatctactccagagttttctcctgacccctcaggtgtagagatttacatttactggtgtttctgcttagatgattttggcatctgccagtaaattttcagccttaaagcaacttttagagaggatagtggataagatatcccttatccaaaaaggattgctcccttctgtgagaagaatccacacctgccattcaagggctgcttgggcagtagtcacccttaccacctctgtttcaggtccatctttcctcatcagatgggggaagggatcgtgcttttccctttgataggaagtttcctgaaggcaggggctgtgtctccttccacccatgtgtcctgtctaacatcagcaaagggagacttcccttcccctagcagaagtcccagagtagagacaggcagggtgtcccctggcccagttgccctttgcagggctttaggctcccatccaggctccctgcaccagcagccagatcccagactcacttgaccactgctgcctccaagagctggaggcagaccaagaccaccaccatccacttcatgatgctggtccccaactggccacagaggaagagcagctctgagttctgcagtcgcagtggagtgaagacctgggcactctttcctcttttatacgcccaagattagtctaatcgctgcctccctgccctgggcagccatgacctcaacccagggtgtaccctgtgcttcgtgtatcgtttctgtgtatttttccttcttgagggtggccgcaacagactttcatcttattgactttttggttcaagcatcggaggccaggaggtgcaagcgataagagagaaagttgccgtaagatggagtggtgaagattacgtcttgttcccaaaccagaggcataatgtgtgcatttagggacgagggccagaaaaaggtagaggcagagtgctgggatagataggatctatagccagggtttcgcaacctcagtgctgtcgacattttggaacaaatagttctttgttgtgggccccatcctgtgtactatagaatgtttaacagcattcctggcatctaccgactcgatgccaggagcagtccacccattgtgccaaccaaatatatctccaggcactgctaagtgtcttctggatgggcaaaatcattgagaactgcttgtctctaggttatgtacttgaagctttgactccactcctaactcctagcaccctcaaaccctcaggggaggagataggggtgtcagggggtcaagaggtcagtagctagtagctaggatgctggttacaatgatggtgatggtgagggtggtgctgatggcagtgtcgggagttctggtgctggtggtggggctgggatgacaatggctgaagtcacagctatttgagcagcttcagaggctttcaaggtcaaacaggacatttggagaaatgcttgtcataattcagcaaatgctcaggacacactcacagagtaagccacaccagcttctggttgtgcctcttgtaccgacctagatcagaggcctggagcaggggcatatgaagagggacaggcctgcgccctgctgctgttcctcgttctctcttctgccccgctgcgtccctgcttctgtcttcagttctcctaaagtgcctatgtctcccatgacccactcccaagcccttgtgcagcccccaagtctgatttgttagttcctctatccctcatctcggcaccccctcccccacctcccccaactcccaccccacttcccagctaccagcttcccattgcctgaggtgacctggagctggcccagtgcctgctcacctggcccaggacagctctccattttggagtgagtgggaaaaaaatccccgtgccaatagcctctctgcgacctcgtaccccacactcagggctccaggcagatttgtcaggtcctcaggccccaggcagaaggccaggaccagatctgtaaacactgatatcatccagctggtgggggattttccactctagccactgctacccactgcccagccagagccctggagcttccccaagccttataatgggggaggggagggaggactagaagtcagctgggcctggcacagagagggaggtccctacctgatggtgtctcaagccaacttagcttccattcctccctgtggtccccagaggtacattggactatgaggtgaaagacaagatagggagtgccttccctgggttgaggggagtccccatatttgggaagcaggtaaataaaattataggatcattggaatcttttttttttttttgagatggagtcttgctgtgtcaccaggctggagtgcagtggcgcgatcttgactcaatgcaacctccacctcccgggttcaagcaattctcctgcctcagcctcgcaagtagctggaactacaggtgcgtgccaccacgcccagctaattttcttatatttgtagtagagacaggttttcaccatattggccaggatggtctcaatctcttgacctcgttatccgccagcctcagcctcccaaagtgttgggattacaggcatgagccacgcgcctggcccaggtcattggaatcttgccaaatcctttaatatagcag

SEQ ID NO: 585594 - DNA, 4001 bp, Homo sapiens
ttgtgcattgatatgcacacaaacataattcttaccttgagtttaatttcttttctttttaaaaattccttgggtttaataagtgtctttcatttctcttttttttggtcctatttagtataacatttccccttagcagaactttaatggtacccatgagttctttatatgtaattatttttctcagtttatttgggcatatttattgtttgtttgtcaactttcattccaccctttcccaacaaattaagttttatcttttgggtttcaaattatgaaacaatagcaaagttggactaaaataaaaagattcagtttcttcagctcactttctttaataggcaacttaagaatatgtcctccctagatagcacaatggtgaagttcaaatgagaacttgaacaggcaaatgcgtgaccaaactaaaatgaattgctgtgctgatattaagagttcctgatggcctgctgcttgtccattacataggtcttgatctaggagtagattttaacaaaagtcacatcgagatgtaaaagcattaagctgacttaagggccatggacagaaaacagaaggaagtaacactatattaactacatgttgctgagggcctctactccaggaaggattttaccttccagaagctctagactggcaccgcctccagtgctgacatggctgactttatcttcagtgttccatttggcacagcaagtagcagtgtctccaccccctataacagtgatgcagcccttggaagtggctttcacaatttcatccatgagggctttggttcccttagcaaaggcatcccattcaaatactcctaacggcccattccaaacaattagccttgcttgagccacaacttgagcatgattcttgttgctctcaggaccacagtccaaacccatccagccaggagatatgccagatgctacagtggcttttccaacctgagcgttctcgtcaaacttgtccccagtaacaaaatcaacaggaaaagtaatccttacaccattcttttgtgctttggccatgatatctttaacgatcttggctccctcttcatcaaacagggaagcaccaatctccatgttgttgagtaccttaaggaaggtataagccattccaccaccaataatcatctcattgactttgtccagcatatttttgataagttggatcttgtctgccactttggctccaccaagtatagccagaaagggtctcactgggttttccaaggctttagcaaagtaatctagttccttcttcatcaagaatccggatgctttatggggcagattcactcccaccatggaactatgagcgcggtgtgcagtgccaaaagcatcattgacatagacgtcccctagcttggaaagtgatgctcggaaggcttctattttatctggctcagctttaatcttctttccagagggatcttggcccttcccttcttcctccacatgaaagcgcaggttctccagcaggatgactgaaccaggagctgggttggcacaggctttctccacttctgcgcctacacagtccttcaggaacagaacatccttgcccagcaaggatttgagctcaacagcaacaggtgctaaggaatatttgtcaggcatgggaacaccatcaggccgacctagatgactcataagaactactgccttggctccattgtccaggcagtacttgatgcttgggatggaagccttgatcctctggttgtttgtaatctggttcttcttcatgggaacattgaagtctactctcatgatgactcgcttccctctaacatccagtttgtctaaagtcaacttcttagaaagagacatcttgacaatataaagacataggctgacacctggatcttaatgctgaagaaccaacttgctgttgaggggctgggtcggtggtgacttctaacgcctttgcccttgtcccgcccctttcttctcctcactgtctccagcacaacggccactgttagactggaaagcaaatctagctttgtgattggctcatggtcctgtcaatctcgatctgaactgtgttgctaggtgaagattccaacttcctgggcagagggtcatgtagtggaatagagctgtacctggcttcaggcgagacttgggtaggtgaagaaaccccagaataagaatggttctaaaaaaacaagaatagtcctgaggtgtgcgccgccttctggctctttttgcccccaccccacagctcggttaacagttgcttttattattaaaaacaaaacaaaaagaactccacccccacccccgcaaacctacatacacctcattcatgtcaaatcttaaccattttgatatgtaaaaacctctgcagtgccaaataaaaggaatatttgaaataatgattttcatatgaaaccttgcttattcaagtcaggatagtatagttctgttttttccttgtcttgataaatatttctttgaggatgtggcttgttgttagtcttcatctttagatctattctgggacgtggtgggaatgctgtcatattttcattactttgcttcttccattttcagactaccatgaaagaatgtttggtcacttctgcaggagaatcccataagatcatagcaaagagagtatcagtaacaagtgctgaaagtaatggtgacatttctttcagactacaatgttatgatgaggctccttattttttgtctcctctctgtttgctttcctacctgtacaacttagaaattgagctgaaaaataaatgcatggttttcatgaagatgaaaacatatattagaattgaaagtgagtaagatattctatttttggagaaagcaaatgtatgtggctagttggtttagtaatgaaaattggctttacagtttttttcattctactccataagttgagtgaactaaatatgtaaaatgaaggctttgacagaaatatatttgaggcatctcctattaagatggctaaaataaaaaataaaaacaagtgttgagaaagaagtggacaaattggaatcctcatttattgctgataggaatgtctaatggtgcagccactttaaaaaacagtttatcggttcctcaatgttgaacatcgagtcaacagcatttaaaagcaaacttaaatggtgttaaaatatatagtaacagaaactctcatttgttgctcccaggaatgaaatatgctacagacattttgggaaacagcttggcaatttcttagaaatatgcatagacttaccatacaagtcatcaatcctatttctagatattcatccaaggacatcaaaaacctgtattctctcaaacttctgtaaacaaacgtttagagcagttttattaataattaccaaaattgtatattcttcaagtaataaataaataaactgtgatatatccatgcaatggaatattattttttaaaaaaagaaaagaaacaagctatttacttacacaaaagccctggataaaacttaaatgtgccttactaactgaaagacgccaggcaaaaaaattttgtagttattgtataattccatttgtatgacatttgataaaaggcaaaactatagggatggaaaacatatcagtggttgctacaggttaagagagcgtggtcaactataatggggatacacaggaggatttttagtgtggtaaacttttctatgaggtactggagtggtggatacaacattctatgcacttgtcaaaattcatagaatcgtacgttgtagagagtaaactttaatgaatgcaaataaaaaatatgatccagagtgttagggaatcgtattatataatgtagcctctgacagataagcctaactgtatcgtaatatataggaaattttactacatgtgatgtggaaattttactacaggtgatgtggacaaaaaaaggaaatgacttaagtaactttgcaaaagaggttttcagtttgtaaaactaaagacaaaaacagctgtccataaata

SEQ ID NO: 585595 - DNA, 4001 bp, Homo sapiens
tgacaaagggagactcggtctcaaaaaaaaaaaaaaaaaaaaaaaacaggccaggtgaggtggctcaggcctgtaatcccggcattttgggaggccaaggcgggcggatcacgaggtcaggaattcaagaccagcctgaccaacatggtgagacccttgtctctactaaaaatacaaaaagtagcctggcgtggtggtgcgcgcctgtagtcccagctactcaggaggctgacgcaggagaatcgcttgaacccgcgggtggaggtcgcagtgagccgagatcgcgccactgcactccaggctgggcgacagggtgagactccgtctcaaaacaaacaacaacaaaaaatcggcccttagcccactaatactgttttctctgggatactcccattaagtggaacttggggtttccaacctcagtcagtagttttccttcagtagtccatatactacatttcctgggtcaattaattcccaattagcccagagatgaggagcagtccgccagctgctagcctcataattttgttttctttattgtccttcattgcttcaatgaacagaacttgcaagaaatggtgaaaaatacttgcttttgtccagttggaaaaagctggcattcagtaaactaatttagttcaagacagtgatcagatctctttcctaaggatgaatacatatttgtaaaaactgagcagtcagttatgtgtcatgattattcataagagtgtaaaccagtcctgttaactccaaaaagccattaaaaaaaaaaaggtccagataatatgagttcatcctttcatgcgttttaggccctacaactactttcaatgcctctgcgaatgcctttattgaaagcatatttgccaaatccagcgtccacgcaaaaagttaagagtatccccctactctccattcaatcttcaaatctccttggtgcctctctcccgcctaccctcgaatcaccgcacaagggtgattcccggcactccaccctgaggtccccgcctaggtccacgtaccagagccccggcaggagacccgcggcccgtcccgaccagcccgcccgcggggcgcaggggcctgtaggtgtgtcccgcgcgctccgccgctcggtcagtcgcccgccagaccactagcccctccgtcgggccgagaatctgacctgtcccgctcccaccgagcccttgccgaccggtagtctcccttctcaactccgagcctcggggcccggcttacctcggtcaggaagcccccttcacctacacgcagcggagaagcgcccaagcaacaacgtctgcacccaaacccagtcctcagaaccgcagacgtggccctgcgtggcttccggctcgtcgccacgccccctggccaatcacggcagaggactatccgccagccccgcccccgcctcgccgcaggtcgcgcgcagctggcgcctgaggaactgcggctgcggttccgagcggggtctggggctgttaccattgagtgaccagaaagggtgaggcccccgcggtggcccgggggttggggccgagggtcgcgggccctcagagcactgcggccgcggaggcacagcctccgcctccaaatccgggcctctgggggcggcaggccctgcgttcctgggaagccggggttcctagtggtcttggctaggggcgggggtggggaatcagccccgtcgctgggcctcggacagggcgacctcgcccacagtgagcgccgccggcggcccgcatccccctctccgacgtcgaggtcatctcccaaacctttgaatctgggaagccttctccggctgccgtctccccgggtacccccttcccccagctcactgtaaacatcttttatttaatgacctctgagacaccccctacccttatcctgggtccctcggggcagaggccagtgaatcgtaaacgtccggagccctggaatgcggcccaagcgaaaaggccaccgcggtgttgggggggggcggtccgcgagtccaggaccgaggggtggcgactggcgctggggaactcggagcccatcctgctggcactgcggcctctctcgccgcagcgtctggctccgcccaagcccgagccccgggtgggattggaagccgggccccagcctttcccagaattcaggcttgcagagcgtctgcaggtgtctgcctgccacctgcagcgggacagttccaaacacctgttgaaagtgcagattcccctatctagtgcggggtgcgggaggcgggaacccggagcccgggtacgcagaatatgggtttttacggagtgttttagaggatgttgtgcatactagattttggagtcaggaaataaagaagagtgcaagtgtctggtttgtgcccctagctctcggtgcaaagcgttcctgcagaattgcttccacgtaaagggaccttcgggaaatttcgctggataccggctggcattgacaaacccagcgtccctgagccttgtgaggtttccaggcaggctgattgcgaggcaacatgtctgcttcggtgaaagaaagccttcagcttcagctactggagatggaaatgctgttttctatgtttcctaaccaaggagaagtaaaacttgaagatgtaaatgccctgacgaatataaagaggtatttggaaggcacaagggaggcgctgccaccaaaaatcgaatttgtaattacactccagattgaagagcccaaggtaggtaccctgatttaagtgtttgccaggtgcccagtttttaattgaaacatctagaacatgagctttctgtcaaggaaagatagaaatattccaggtgcatatttccttgtttgaaagatacggaatgctctataaattgtcttcagtaaatatctttaattttatgtaaacatatacacctttttaacaaatatacctggagtttttattgacgctatcttgcagtcttatgccattattattttgttcacccatccagttggactacctttcacatgtatcatgattttcataaatctaaatatctcctgtaacataactgtcttttaaggagtgaatgagtggattttttgatggcaccataacacagaaagcaaatatggatggaaaaatctaaagactaaaaatgaatttacctccatcttctgatccatttatctccagcaacattagcatagcataggtaatacgtggactgggcatttgagaaccactgttgtagctatttcctactcatccttcagttgttattccctcagaggagactttctggttctccagactggattctgtcccgctggttacacacttcaatggaaccctccacttttccatggtaatgcttttcacaattgaaattaaatacttgctatatgtaattatttgtttaatgtgtgtctccttcactaggccctggacttcatgaagggcaaaaatagtgtctggtttattcacttttttatcccagcacaagggcacctggcacacgtagttgttcaataaatattgaaataatgcataaaaggaagcaatcatgtatgtaaagtacctggtacatttaatagtagcaataacatttctcaaaatcatgcagttgctattgataaactagcttatgtgatgttatggtatttaaatctatttgattttcattttaaggtgaaaattgatttgcaagtgaccatgcctcacagctacccctatgtagcattgcagctgtttggacggtcatctgaacttgacagacatcagcagctacttctcaacaaaggtctcacttcttacatagggacttttgatccaggtgagctctgtgtatgtgcagcaatccagtggctacaggacaacagtgcatcttatttcctgaacagaaagcttgtatatgaaccatctacacaagcaaagccagtcaagaacacattcctccgaatgtggatctacagtcaccatatatatcagcaggacctaaggaaaaagattttggatgttgggaaaaggttag

SEQ ID NO: 585596 - DNA, 4001 bp, Homo sapiens
ccgggcacacttaaattggtccactctcaactaaaatgaagattttacacctattcagagactccaatgagctcaaagatcatttcattttacaaaaagggaaactaacctaaattaacatagatagctggtgacggattgaggcctaaagtcagattcttgagtggactgaaactacatatccccaaatatctgagaaatctttgtggttcttttgctatttctcccaaactacagagacatattcttaaaggaaaagcaaaaggcaacagtttcttctccaagactacccagatctttttccatttgctaaaaacaatcaggacacccttctaagatgttgctctaaaactagcaatatcttcttctgaaagaatgccacctttttcctttacttttaaaaataaaacatcggccgggagcggtggctcacgccagtaatcttagcactttgagaggccaaggcaggcggatcacctgaggtcaggagtttgaaaccagcctggccaacatggcgaaaccgcctctctattaaaaatacaaaaaaattagtcgggcgtgttagctggcgcctgtaatcccagctactcgggaggcagaggttgcagtgagccgagatcgcgccactgcactccagcctgggtgacaaagggagactcggtctcaaaaaaaaaaaaaaaaaaaaaaaacaggccaggtgaggtggctcaggcctgtaatcccggcattttgggaggccaaggcgggcggatcacgaggtcaggaattcaagaccagcctgaccaacatggtgagacccttgtctctactaaaaatacaaaaagtagcctggcgtggtggtgcgcgcctgtagtcccagctactcaggaggctgacgcaggagaatcgcttgaacccgcgggtggaggtcgcagtgagccgagatcgcgccactgcactccaggctgggcgacagggtgagactccgtctcaaaacaaacaacaacaaaaaatcggcccttagcccactaatactgttttctctgggatactcccattaagtggaacttggggtttccaacctcagtcagtagttttccttcagtagtccatatactacatttcctgggtcaattaattcccaattagcccagagatgaggagcagtccgccagctgctagcctcataattttgttttctttattgtccttcattgcttcaatgaacagaacttgcaagaaatggtgaaaaatacttgcttttgtccagttggaaaaagctggcattcagtaaactaatttagttcaagacagtgatcagatctctttcctaaggatgaatacatatttgtaaaaactgagcagtcagttatgtgtcatgattattcataagagtgtaaaccagtcctgttaactccaaaaagccattaaaaaaaaaaaggtccagataatatgagttcatcctttcatgcgttttaggccctacaactactttcaatgcctctgcgaatgcctttattgaaagcatatttgccaaatccagcgtccacgcaaaaagttaagagtatccccctactctccattcaatcttcaaatctccttggtgcctctctcccgcctaccctcgaatcaccgcacaagggtgattcccggcactccaccctgaggtccccgcctaggtccacgtaccagagccccggcaggagacccgcggcccgtcccgaccagcccgcccgcggggcgcaggggcctgtaggtgtgtcccgcgcgctccgccgctcggtcagtcgcccgccagaccactagcccctccgtcgggccgagaatctgacctgtcccgctcccaccgagcccttgccgaccggtagtctcccttctcaactccgagcctcggggcccggcttacctcggtcaggaagcccccttcacctacacgcagcggagaagcgcccaagcaacaacgtctgcacccaaacccagtcctcagaaccgcagacgtggccctgcgtggcttccggctcgtcgccacgccccctggccaatcacggcagaggactatccgccagccccgcccccgcctcgccgcaggtcgcgcgcagctggcgcctgaggaactgcggctgcggttccgagcggggtctggggctgttaccattgagtgaccagaaagggtgaggcccccgcggtggcccgggggttggggccgagggtcgcgggccctcagagcactgcggccgcggaggcacagcctccgcctccaaatccgggcctctgggggcggcaggccctgcgttcctgggaagccggggttcctagtggtcttggctaggggcgggggtggggaatcagccccgtcgctgggcctcggacagggcgacctcgcccacagtgagcgccgccggcggcccgcatccccctctccgacgtcgaggtcatctcccaaacctttgaatctgggaagccttctccggctgccgtctccccgggtacccccttcccccagctcactgtaaacatcttttatttaatgacctctgagacaccccctacccttatcctgggtccctcggggcagaggccagtgaatcgtaaacgtccggagccctggaatgcggcccaagcgaaaaggccaccgcggtgttgggggggggcggtccgcgagtccaggaccgaggggtggcgactggcgctggggaactcggagcccatcctgctggcactgcggcctctctcgccgcagcgtctggctccgcccaagcccgagccccgggtgggattggaagccgggccccagcctttcccagaattcaggcttgcagagcgtctgcaggtgtctgcctgccacctgcagcgggacagttccaaacacctgttgaaagtgcagattcccctatctagtgcggggtgcgggaggcgggaacccggagcccgggtacgcagaatatgggtttttacggagtgttttagaggatgttgtgcatactagattttggagtcaggaaataaagaagagtgcaagtgtctggtttgtgcccctagctctcggtgcaaagcgttcctgcagaattgcttccacgtaaagggaccttcgggaaatttcgctggataccggctggcattgacaaacccagcgtccctgagccttgtgaggtttccaggcaggctgattgcgaggcaacatgtctgcttcggtgaaagaaagccttcagcttcagctactggagatggaaatgctgttttctatgtttcctaaccaaggagaagtaaaacttgaagatgtaaatgccctgacgaatataaagaggtatttggaaggcacaagggaggcgctgccaccaaaaatcgaatttgtaattacactccagattgaagagcccaaggtaggtaccctgatttaagtgtttgccaggtgcccagtttttaattgaaacatctagaacatgagctttctgtcaaggaaagatagaaatattccaggtgcatatttccttgtttgaaagatacggaatgctctataaattgtcttcagtaaatatctttaattttatgtaaacatatacacctttttaacaaatatacctggagtttttattgacgctatcttgcagtcttatgccattattattttgttcacccatccagttggactacctttcacatgtatcatgattttcataaatctaaatatctcctgtaacataactgtcttttaaggagtgaatgagtggattttttgatggcaccataacacagaaagcaaatatggatggaaaaatctaaagactaaaaatgaatttacctccatcttctgatccatttatctccagcaacattagcatagcataggtaatacgtggactgggcatttgagaaccactgttgtagctatttcctactcatccttcagttgttattccctcagaggagactttctggttctccagactggattctgtcccgctggttacacacttcaatggaaccctccacttttccatggtaatgcttttcacaattgaaat

SEQ ID NO: 585597 - DNA, 4001 bp, Homo sapiens
catccaagagtctgtgagcagactctacatccagaaaataatccattttgggataatccatccttgatgttccaaacacagagttttgagagaaaacactggaacacctataaagaggaaaaaaaaatccacaatattttagacgtcaagtataaagtgtatatatagatgtactttaaaatgtttgaataagaatatcccattataatattctactacttgattgacatttgcaattctaaagccaccccccagcatagctttcctaccgtgtgagaaaatgccgcatttagccaacattcattaaaagtaatatattctactcaggaaaaacagatgatctgatctaaagagagataacataccagcctttccttgctttatattctctggaacatatactgttaaattcacatgctatcagttttcaaaaggtctatttgataaatagcgtcattaagtgtcagccgttgtgagtgttgatcctcagctcatcctgggactttcggattcccctggagcagggaaaattgcctgggaatccgagcctccactcatagatgccgtgcgtttatgacacacactgacatatttgctgtacaaatgctttgaattccttcctttccggcgattcccttcagcacattttataaagtgctagaggatcgtcacctgcctgtgcctggcaggggctgatttttgagaaacaattgtggtttgtagagcagcaagaatgattgcagcattacagtgatccctatattatcatacactagcctgtcacaaagctaatatacttccccagaaaacattcagcctgttgggttcttttttcaagcctatgtagcctttccctgatactcacacaaatgaattatctctatttctgcagaatatttttttggaaagaattaacaagacaaagtcattaaaaccaagcttggaagtctaatccaattggtttctctttctaacagtatgtattttaatttaagaaaccaagtccggtaagacaaaacttttaaaaatacccaaaggtaccccaatagcaaatatacttactgcaaaaaataaaaatcaaaggctatctgtcagcggtaaaacaagagccgttccagccagagtgtctttgatcttgctaaatattcccggtgaaagtaaacgattttgattgtttgattagaacagtgatgaataatgcatacagtccactggacttcctttatcagataaaatggccagagcacgttaccttagcaacggaaggtgacgccagcctcagcctctgcaccctcccctgcgaagggagaaaattaccagtttcccgtgtaaaactttggcagaaaatcatcaaatccacatgcatacatcatgcagggctattccccagccccctatctcttaggcagagaagtgccatagtcattaaaaaaaaaacaaaacagatttatgtcttcattgtttattttcataatcccaaatcttagtttgatttgcagctacaaaagaatagaatatgaaatgattaaaaatttaatatatagaaaagttgtctagaaatttttgtgggggcaccagttattaccctaatgctggcctaagagtggcagggaatgggggagtttagggaaaggccattttagcttaacatacgttagacattcccctgttataattaatacacagaacagccaccggcatctaggctgaaaataactcttcccttctgcaaatcagtcactggaagaagcttaaaaagctgtctgaaatttcccagattctgaaagacatattatagcatagattttgtgggagatccccactccccccacaacccccatccccggcaaaggaaaattagccaaaaagatatttgaaaggaagagtctggaagttagcggatactcaccggcacttgttgacccctttcaacaggacacggtagagtacaaaacaaagcagtgcgacgcttctgagcccgcaagcacaaatgaacagcttctaattttcccttcaatctcgcttcaagagcactgagcagagggaagtgatggatttgcccatttatactgtgatgaaatgcaacccttaagaagagatctgagtggagctgctctttagaacacattagactgctaatttaagaaaattgaaaggttttgttttactgtcttttatgtgttcttctctgctaccccctcaatttaatttgcatttaaaattattctcatgtctcctcagctctccaaggtgtggagtactttctaatcatgaaggctgctccagtagggtttggtgcaacaccacttttatgctgagctgcaaaacaaggcaggtagtcataattgtgagctgttttctggagcgaaatacagagggcacgtttgatgtcaccccttccctcttgcctggctttcttcctttccttgcttctgattgcctggtcaaatatccagcgcagatcatgccagtctgcctaaatgcatttctctctgtctgaatgtaacaaaataataccaacaacaaaaataaactttggctagtatctcaagttattctggtttaatattcttcctaccaaacctcagtaatgacttttaggcacagtactttgagatcttcatgcagggcatagtgatagccaaatgcaagccctactgtgggttttccacaacctcttgcaccctttgttgaccaagcagaattgctcattagtatggtgtggtgtacagtgggtcagcttgttaagaaaagagcatttacatttgataagcctcggaaggaagaccatcaacaccacccctgtccccccactccctatacacagctcggctggctgcccttgaaacaaacctgaaaatcctctgctgtttgttttgtggggtctccctctcccacccgatcagaacagatcagacaccaagccggtgctgcagacagttaagcctcatgaaaaaggaagctgaaactaccaatcatatgcccttgtaggaaagtcaactatggactctgaattctgaaagctttgctccaacccaaggactgacttctttaaggttacttttctattcagcacccactggagacatgctgaacacttgacatttataagaggagaaagctgtcttctggttccttttacttactgtgaggtgtgggcgacaggttctgaactcgttattgtaattctactgaaattgtaatgactcatagatgagagaaagagagagagagagagtataagtctatgctgctgaccaaacctttaggtgagtgcaaatgaatgtgtgattgaagaaagagatgctaaactggaaatgtgaaaaatagagttgattcccagggggtaggtggtggatttggaagtcagtcatttctggagagttgaccaagaaagagaaatttaaaatactttacaaagtgaacaaataatatgaaagggtcgtaatttaagaaaactcaggagggaaaatttcaacttaaagaaatgtatttggggccgggcacagaggctcatgtctgtaatcccagcactatgggaagtcaaggtgggtggatcacctgaggttaggagttcaagaccagcctggccaacatggtgaaaccccatctctactaaaaatataaaaaattagccaggcatggtgttgggtacctgtaattccagctacttgggaggctgaacaggagaatcgcttgaacctgggaggtggaggttgcagtgagctgagatcatgccattgcactccagcctgggtgacagagcaagactctatctcaaaaaaaaaaaagaaagaaacaaagaaagaaatgtatttgggaaggggatgattattcatttgcaaacagggacttacttttactaaataattatcactgtgttctgtagcatcatatgaccaacttctgtaatagattttcaaaaaatgatctcactctctggggaatatagctatagattacatataggtgtgtgtgtgtgtgttcaaaaattattttta

SEQ ID NO: 585598 - DNA, 4001 bp, Homo sapiens
tcaattcatacaaacttttaatccgcaaaactgaggacctgcaatttaagtataacaccgttccgtgagatatttctctgaattatctttcatgatcaagcataaatttttgtttaaaacactttttacttaagtagattacagtttctcattataatcagtcattttatttggaattatagcaatccgggtttttttgctgtactaagacgtagggagtctcactttaggattttatttgcttcttagacatcatttatataatattccttgatttttattaaggcaaaatttgcttttctaatattcactcgagtaatattttgtgataaaatcactaaattcaggacaatactttctgtatactcttgtattggagtacagatttaattctatcttcgccggtgcacaaatgtaaaaatataacccttccttgaaatgaaaagaagtctcacaccactttaaggtaagacaaaggaaaccaagtcttatttgcacaaaatagtttactaaatttaaaatcctactcaacccctccccgcaaatatctctcaaaaagctgtcaacatgaggtctttgatttcagagctgtagccatgtcattaatggtaaagaaggtatattctgattctgatgtctcttctttgcagaagggtcttctgtggtattaacagaaacctcagcaaagcttgtggtatctcagggagtgaagctgtgctacctaaagaaacccactgggtataaagtggggtggggggttggaatgacagaatgctatctagctagacatcctgaggcagattaaaaaaccttcctctgtaccctgtcatttcctttcagcaagatcctgttgatgtttgcacaatttaaaaagtgtatcaaatatctcaatgagtaacataaacggtcccttcgagtattatttatttttaatcgttgatggaaaaatatcaaaatagtaccttttaaatttatttccttatccaatcacaagtaacaccaccaaacagttttttttttttttatccctacactgtcggggaaatgccagacgtaccttccttccctctttttgtttaagaaaatggaaaaaagaaacttttaaaacagagcattagaactcagacacgttacacacgtctccataaaactaactttagtcctggagaactaagttcatgagatatgtttccctaaatgttatagctgctgtatctactataaacaaaacaagtctcatttgaaacaattacgcatttcggggctagttattaagtattcagcgtctgccaggataaggcgatcagcgcttctactccgaataacaaaccataaatcagttgacaagcttgaaagcattcagtcctagtctgttcggaagccaagcgtaaatacagaaaaacctgttggcatgtttctcttgctctctaagtttcgcgtttttaaaaacactgtaatacgcaaatggcgtttcccgtaagtttctggctccgaaataatttggataaaaaaccacagcgaggcatcgcgcacagaaaaatggagcctgtgcctttaaggtaaaatcggctggatcccaaaaggcattcctctttcacgacaaagagtttggcgagcgctacctctggggtttctccgagggacttggcgggtccgagcggaacccgaccagacgactaaccctgcctgccccggggccccgccgccagccctgcgcccgcgcggcgggagcgcatcgcgtgcgccccggactcaccgctgccgggctgcggggacagcgtggacaccgaggtctggcccatgactggggtcgcagggccaggtccagcgatcaagcggctcctttggtccttcgatcatgggtccgctcccagccagacttccaggcgttcatgtcccggcctgtgccgagcggcccgccgggtcccctcaccttctaccccgcgcgggtctcccagcccggccggccgcagccggcgcggcggatcctgcccagcggatgcctgtcattcctctatgcagattagctggggtcaggggtcacgggggaagaaggggggtgagggcgatagggaggggaggagggggaagcggggggagggcgcaggagcagggggtgggggaagcccccagccggccccgccgcacccgcaccccctcagggtggtagggagttcaggctttcagactactcctctttgacttaaaaggttcaaagtcaaatgatccttacgggctacaagaaaaggaattaaagtatttagtcacggtacttaatttaacaaaatttgtttcttaaaagttatttccttccttacattctatttgcagtattgtggcactctcatgtcttgtgcccatttttttctcgttttaaaaattatcttccttttaacaaatataattttttaaaaacggcactaatggcctcaatcaggcttgacaacaaatctaaatggtaggtctacgtgtgagatcaacaaaatatactttttgctgtctcccacctaaaactctggagtgctgacctctcctttatttcaaaagaattactgtgaaataaagtgattaaaatacacaaaaggggaaaaaaactataacaaacttgaaaggtgaattaaacccttctataatatcctgttaaatctcaatcttcttaaaaatatgaatacaaataaatattcttcatatttacagttaatgattaattagtataagtaatcttcatgctatatatatataatgtgtgtatatatatatacagtatatggaacatctgtatatggtgcattagattggatggtggttactggatgtgttcattttatgaaaattcattgagatgtctgtaatgatgtgtgcactttgctgaaggcatatatttcattaaaatgtaaaaaatatcagaaagtgcaatatatttaggtcatttaccacagctttcattttttaatttatcctagacaatcaactctgaactaacatgaaaatcatttttttctaaaatttttattattaagatcgtgcagagccttgtttgatttttttgaaaggcacttacttgtctgttttgtcatggttaattaagttgccctatgttttttcacacccaaatagcccacccaccactgtgaggaagatcttttccctaaaaaagtgtgatccattgtcttcttccctttgcctaattcactcttaagaaacactgatttttttttttttaatgaaattgaggatttaaccaaaatgtgagttctaattaggacaataaaattaatcctaactacatttccttataaatacaaaaatgtgttttggaaacacatcccacctggggcgctaagcgatgagagtaagcaattataatggctggctcctccagctctttgctttgagttgccgtaagaaaaaaacaaacaaacaaaagtggttaaaggtaagttaagagggagaatgtttcactcttccttttgacagtctttctgataaagggaggtcactgatcagaggaaatatacagtaccttttgcacattcaaaatatgtaactgtaataatttttaaatactgataaaagttaaactttaaggttgctatcatttcttcttttccttgagaaacaatagcatatttctattacttctataaattcttatttcaaagatcaaggaggtgcactatagttccagtttttcaggaattgcttaatacagctatatttaccttattcaagacctttcatgatttgctagttaatataatcttcagcctcatctgggattcctataataccctaaccaggttatgcaattttctctgaaactcttccagttccattacattatccttgaagcatgtcaaccaaaactgcaggaagtgtgcactaagttttctttctaagagtgggacagttcttgttcttggtttctagagcttctgatggaacttggcatttaagtggcctttttatcacagctaacaagttatactaatgaacataga

SEQ ID NO: 585599 - DNA, 4001 bp, Homo sapiens
gcttacctcatcaaaaaattaccatgaaaagtgatcactgacagccaattataagccattataagaaacatgctatttctgaagcattcaaattatgtgatttaaaacccgttattctattcaaaggtatgtatggctatatttgagattacacctaaaatttgaaatgatatagaaattgctactttacaagccactctccacagtgtttaaataatcttaaactcatcaagagcagaggtattttattaattgcatttaataacataactagagattgtgaaaacatcccccaaagctctagttacccaaaaaagaaaaataacccttagcatttttaagcctacataaagtctgccacaggagtttctttcctttttttaaatggcctttaaataaatatatgagtcagtttaaaaaggcatttacttgaattaaagtgatcgttctgccagaatgtcagtataataaattgtgggtggcagaagttttaaatgaggctaaattagagattctaagtttatttatttaatttttactcactctaccactgtaattagagaagcttttggttgatcttcaaattgtgccttgtcatggaataccatacctacctgcttttatgacaagccctatagtacattttttttaatgaccagaatgggggtataatccatatacatgcatccagcttcactcctgctactactacacacacatccttacacttgtttcatttcttccaccaccctaacattttcatccctgatattatactgttccactttatttcaatatcttcaatggcaatgaccaaataatgttagtcacagagttttgttcctggtaagctatttcataaaagaacctaatacacgctgactttaaaatctctgctagcctatgctacctgtgccgaggactgaactagctcaatttcataaacaaatatgtttcaccatcaatgggtggtcttgtagtgtagaatgtgttttaaatgatgtaacctcttagaagagctgaccgtgtctcaaggcatgggaagcatcaccttcaagctgataccagctgcgtaactgaactaatgagcttcaggagacagataatccataacacagctgggagaattctgcttgagtgccgacaacactgaaatggggcatgatctcacagtatatctcctctaaaagttcaatacagcaaagtaaaaagaaaaaagttccacctgataattttatgctaattatttaattgacattaacatacttcaatcatctgtttgtctagttatcaagtaaagatactaaaaataagtacatttttaaaggttcacaattgaccactaatgtctctattctgaaattaaaatatcagaggctatcgaaacattttcgacattgcatcctaacgtgaagatgaaagcatcagaccaaagagctcttatgctgttacactgtgcatattgtaatatttacacagaatttttgctcagctcattaacttaattccatctaccttgtgccatcccttagtaatagttttttcactaactgtatgcattttccacccatcgctctgagcacaaaagaatcaaacaccacacttgcttcagcctaaatagcagtagtcttcacaaaaggtgaatttggaatacaatctgcattcccagttcctaaacttcaaagtaaacactaattgtcttgtggacaatgcatcggggttcacatattacacgcgtctcagtcttgaacatttaagtgcaaaacgagagcaacaaataggcaaaccttccgcagtaaaggatgcgggctgcaaaggaagccagcagctatgaagaattcatgcttgatttacccaccggcgttgtccatgtctcaggagtggcgaggcgagttctgtagcctggcagccgggaagccctggctcttctgactaacgaagcaccctgtccttctgctgattatcagcccttgctggcacactgagcatacttcatgcactgtctgcaggagacaccgccaggaaatttatatctccaaggatgacaaacagccattagctccattacaggctgattaagagagactgagcctatcaagtgggtacttgaatcccctggggtttccacctctgctctaagctaaggagggggaaaaaaatcactgcaatgttgaatgtgttgcacatttcaggaaaaaaagtgcacatgctatgcaaaacacagagctttccaaaagatgccagggcaaacaggagcaggaagaggcactgatcatgaaaaggtaaaaaggaatatttaaaaatacaatacattatcctttccttggggtttgtctaaatatggttcagcctttatcattgacctcactgaatgactgggcaacttttcaatttaaaattttaaagtgttttggttgttgttgggggaggaggcagggagtagcagataaaacattgaaaaataaagactatctttaatatctctgttccaaataaatattaggaagttgagtattgccattccattttagttatgttcatcatgactagttcttctatttctgatcagcatttctgctcacctatcctaacagagaaattcaaatattttcaccgaatgtcactaataattcaagaaagaactgtcaaaagaggttaggggattctacagtccgttatcatctgtggctaaagaaatgtgaagatcaggaaagactgactaacacaggaaggccctacttcacttctttcgtttaatttggctgtgtaaagatgactctcaaagacaccaaaaactgcttacgctgtcaggacacaagggtgaacacagtgctggagaaatcaggtgccaggcctcgtggctgtcatgacattagatgctggggacagcgcaactgttttctcaaatatagtacaaagatttgcaatgacctcataggacctacgatgaaatgaatccacagtatagttaggctctccaggtcttttatacagacagaattttaaaaaaacagttcatagtgttatatccccagagttgccaaatttgaaaggcaatttgtttattaagcatttctttatgccattggaattcctagtgacacaccggtcacaaattatttatagtctagtttcccattgtaacagcttctaggtttaagtatttttgtttttaatgtaacttcaggatttcctatagatatgaggttcttttattgtttaaacaaaacactttgtttacgtcagtgatagttcagaaatgttttcctcaaataaaagctgaatttctcagtgatttttaacctgagatttttaaccctgtcatttcaattctgtcacacaattttaaaggtatatcactctatgaatttaaaaaatcatctttatatatttttaaaaaatttgcttggatcccgtaagactgaaatcactgggtttctatacctcgtctacttgccctgattaagacctgccaactatccagagtgagtgttataagctccaaatctaggacaaactaactatttttaagaaaaaaaagaggagataacagggaaataaaggtaacagagagagaagatacatcatcaaagctgagatgtgggtaaggagtagctaagaagtctcatctattggcagtgcctattgcctaatatgaatatatttatattagctttgtccacagttcaaaatctgactctcagtcatttttattaatactgttagtccttaaatgacaaatggattatgttccaaaagttcattttattggtcgttcgaaacacacttttttttccataaatactgactggcttccaaggccagtccattaagcactccctaactcacaatgcgatttatataaaatctaatctttactcacaagtctaaaatccagaaagttttaaaaatattgttttttgtaagtttcgctccaaaatgcatttagtgtcataacttgaagtgacgtgacgctattaaaaatctttacttattccact

SEQ ID NO: 585600 - DNA, 4001 bp, Homo sapiens
atttaaaccatcttctgcctgcaaaggttataccacccctttccatggctgcttctccctgggctgaaagcggatgaggactaagataaggctaagcagcctggccagagcagtggcttggggactaaggccaggacaggtgatatagagaccatcctggagggaagagcaagctggaccattcaggtgacctgccctctcaccatggcgacacttctcacagctgaccagccggttcccagggaccacagtctcagagcgacagacacaacagaggagttcctctccagggagggcagctgtgagagaacacagtgtcacagggcctgcctttaagtctctttctgcccctctaggccaggtttgttttccatgggatgtgcaatctcaggtctctagagtcttaccagggctaatgtctttccatagaaccagaaactgcgaatcatcctcaaactggaccagacacacctccctagcactgtccacctggaatgggtgagcaaacaggatgaaatgggaaccagaattagataagggaactaggaagaaggtcagaggtagaaggtcttacctttttgatggtacccaagtatagcagcccatcagtccatctggccagcacatcttgaccctcccaaagccgaggcctggggccagaggtgggagcaggagaagctgggtcccaaagtgaggaggcaccagagcggctcagccgggggggctgcgccattgcatcctgggggggcctagccagaaaagaaatggggaggagaaggttatgaatgctgagaaaccttccccattttctttttcttttttttttttttttcctgagatggagttttgctctgtcgcccaggccagagtgcagtggcacaatcttggctcactgcaacctccacctcccgggttcaggcaattctcctgcctcagtctcccaagtaggtgggattacaggcgcatgccaccatgcctggctaatttttgtatttttagtagagatgaggtgttggccatgttggccaaactggtctcgaactcctgacctcatgatccacccacctcagcttcccaaagtgctgggattacaggcgtgagccaccgggcccggccagcctccccattttctttgcctattttgccatcaagaatgaagtatctgtgcccccatctccaaatccctgagacaccttgataggaaaccactgggcacccatcaccagctttttgagtcctcttccaactctagtgactggctctcctctcggtaactaacagccctccccccgaccccaaacctagttgctagtttcccagcttccagagctctcctgggatattatatactggccttgaaattttaggagaaattatggttgtagaagcaaaggctactcagtttagaggtatcataattagggtgtcctgttgcccagagacgtgttttgggaccttttctggagatgttttccagagcagaaacggctgtctccccaggcctgcgcgtctcattaagaacaatcatcctggtgccaggttatgtcaggtcaccctcaaattcggggctccctgcccccgggttagacaacttctctgagtgccccgggaggggggcgtgtcccagtcccggtctctactccccaggacggcaagtccgagaagggacttgtgtcggcccagcccggacccgaggccaaggcggcgaggctctcccgcccgcgccccgcgccgacccccggctccctgccccccaccagcgcctcctgccgcctccttaccggtgacagctggggccgccgggagccgggcaggggcagacgtaggagacctaggcgagtcccccgcgcggagagggcacgtccgggcgtgggggggcgtgcaggcggaggccggggggtccccaggcccagcccctccgtcccggcggctctggggcgtatgacgcagcagccaaagcagcggcagcggcaggaggaggaggcggcgggggggagggagggaggggagggacggaccggttgggggggagggtggtgggaggggaggactgggggaaaggaggagccggaggggggggcgggcaccacctcaccccacctccctcacctccaacaggcctggagggcgccgaagaagaggctggccctccgcggcttggggagcgaagagtcggacccggtgggagagggaatcccctcagccccttcctccgacctgagattcgcccttggggcacgagggaatcccccctcccggcagcccgcctccggcctggtcccccgccccatgccacatccgttagctgccccaccccccatggtcactccaagtcccgccccccggccccagttcacagccccgccctccattcacccttctcgatgcccccaccacgccctcctccctcgcgcgccccgccctccccgtgacgagtcgcgccccacccaccgcccttttgcgcacgcgtgtcccctcctgcgcgcggcacctgggaggactgagcccctccttcaccgggcggcggccgtcggcggttggcgcgagggagtcggcgggcgtgcgcgccgcttcccgtggacgtcccgccccgtgcttccagggctggcgcagacgaagggcgcgaggacccaaggcggtgacgccaccgagagccagccaatgggcagcgagcgggcagagccccagccgttcgaacggaaaggcagggaaagggcgggacgggaggaaagagccaacagtttgggagcgcgcgctagccccgcctctggactctggggtccggtccccatttgccgacacccaccaaaggaacgttcttccctggggctggggtggccggcggaagggtgaaagttacctataactagtgaccaaggagggggcgtggatagctagagggcacacctccctgatgtgacggacggggtagggggtattagcagaggggaagatgatccaggccaaggtccagaaccggtgatagcagaggggagaaaagacgaagccctcagcccccgctcccgcctcccacgtaaacgtttggcagagggtacagatcacagctcccacttttacagatatgaaagtatctgccttcttgggcaaatgctaataaaacctttatttaaaaaaaaaaccaaactattctttatttgatagccctgggacatggtgccctccacccaataaagcaccctccagcaaccctcccacccctcacccgatacatagacatagggacacacacacacacacacacacacacacacacacacacacacacacacagatctggatccgtcttcacttcctgttggcctgagcagtaccaataacacactggttcacctgggggcagggggttagacaggataaaagtttgcagcgtaaccaatacaacatttttcccaagatctcccatcctccaatgctagggctgccctcagaaataccgaaataaggcctccaaaggctggttcaggctggtgccagttatggtttgttctcctctgcacactaggtttggaggaggtgaaaaggcttgagaagagatggaagccccagaagaaaatacaggagcagagaaaggaggctttcatttccagcaataccctgtactagagacctccaacctctcccactgtaaaacacttaaaccgagataaaatagtaataacacccatttaggaactaggactccttagaaaatggatcagttgaagtctggggaaggaaatgtacaagttgaatctgaaaagactactagagttctgtctaaaggacactggcaccaatctgaaggaggctcttttttttgttgttgttgttgagacggagtcttgctctgtcgcccaggctggagtgcagtggcgcgatctcggctcactgcaagctccacctcccgggttcaagccattctgcctcagactcccaaagtagctgagactacaggcgcccgccaccacgcccggtgaattttttgtatttttagtagagac

SEQ ID NO: 585601 - DNA, 4001 bp, Homo sapiens
agctgagtaggttattctctgtgagcatctccttatccgaaaatttgagactataatagtgccccattacatggctaattcaatgattaaacgagctactatattaaaagtacttagaacaaggactggcgagttatctgataaatattagttaaaatgatgattatgatgataataaagtctcaaatgtctctagctcctaggaattaactggttcttttccaaatagtaaaatatatattctttttcagtccttataaaataagcatttcattaaagagctttgcatagtctaaatctactctctgaaaatttgcataagtatctgcatacaactgcaacactgcatattcaatactttcaacataactcattttaaacattccagtattttttctattttactggtgagcattttaaggatttttatatccttaaacttaaaaacattttcctttagctaaaaagttgagacactcaaaaatatacaaaaataaagttaaaaatgcaaagtgctcaaaaaagctgagactacaatttcatcaagtgttttaaattactactacaaattctaggcaaaggcattattatataaagtgagcatctgggcagcgggcctttttcttgagggaggtagtaacagcaatattgttcccaatacatgacggaataaggtaagaatttccgtgtaaccgcaatactgatacagaggcccatgttttcaaagactcccaaacatactaaatcagagatgtgccttccagagttacaggtggtttccaactacagatcagatgaatttctatgcatcacatccttcctagggctcaggggtcaagaatgcactcagggggcactggctcagtgccctccaggtgccgggccagacgtcaaatgctggaagtgcaaggatgtgcattcagagtcttacaatctagttacttccattgacgacagcctttgaggaaccttcaaaatgagtctcacagcacggtggacgtgcgcaacgggaaaagctcccaagcaggcgcagcccggctaggctgctacaggacggcttcccctgccaacgcgcacacggcacaccgcgcaccgcacgaaggctggctggctctgcagcattccagttcccaccgccttctaatttcaatccaatttcaagcttccaggcttttaaaacatcattcctcccttccaactttctgtcacaaactgctagcctaactttagaaccaaaacgttttgatgcgtgacactactgctcatctccattttctccacaagcaccaatttcttttcacctcctcaagcagtaaaaagttttaacagacttccgctgaaaacatccggacgcttgcgtattaacttagttattacagtaagttcactgagtgtgttgattttccatatcgttcgccactcggtttttgcagtaagcgttcaaacacttcggcaaactatgcgcggaatgaacgctgagcgaacgcgcgcttctgcaggcccctccgaggccaactctctcggccccgggcgcgttccgtcccacggctggcctaggaggaggcgttttggggacaagcttgtcaagcagggccggctgccaacttcggggaagccgcgccgcgtcccccgcccgcccgcacttgttgctcgctagaggccgcgggctcacctcggggccccgcctcgccgaccacccccggtctcaggcgcggcgcccggcctgggcccacgcccccgagacgctgggcggccgccggtgggactgggcccacgccccggcacccaggcccgggacggggtcagggtcgggtcgcaccggccgcttcctcaccttcggggactgcgctccgggggtggctgggtcgctgtcgcacggccgcggggacagcgcagccccgggcccggccgccgccgccatcagcccgagcgccccgcgccgccgccgccgccgtcgcctccgccttgtcccggccgccgccgccgctgccgccgccgccgccgccgccgccgcgcgggccccccgccgccccggccccgccccctccgcccgcccgcccgggggccggcccctgccgccgcgcgccccgcggcccgccagcgccgccgccaccgccatggccgtcgccagcgcgccgcccgcgcgggagggcgccaaaggctgggagggcgcggggctgcgggccggaatggaggaggcccagcggcggcggcgcttctcacgtcagcccaacccgcccggccgcggccaccgcctcagcaccgttgccccccacagctccgccgctggcctcagcgccgccgcgactcccttcagccccgccactcgctcgcctcagccccgccgctcgctcgcctcagccccgcggccgcctcagccccgccgctcgcctcagccccgccgctcgcctcagccccgccgctcccctcagccccgcggccgcctcagccccgccgccgcctggctccccacggcccggcgttgtactcggccgcggctccccccagcccccggcgcgccccacctcccgcccgccctccggcccgccccggcccggcacgtcgccacttggcgcgctcgcagccgccccctccccgcggcccccggcccggcccctccgcgcgtcaccctcgttccctccctctctccgcgcccccgccgcgcccctccccgcccctcccgggggtccccgccccgccccctctctgccgggggtcgccctgcccggagcagtcgcgcggagactgcgcggcctccgcctctacgcgctcgcggtcgccgctcctctcccgcctttgttctcgggtcgcccctctcgctggtggcgctccgagagagcagcggagccacctgcccaggccacgcttccccgagcatccgcagctgcacccgggggctgtcggcgcccgccccggagcgtgcgggaggcacagcgggaagaagtcgctgagattcggccctcgtggctttgcgtgcccgcgtggttgatgcctccgccgagaacgcggtcggccgggagccggggaggagcgtggacgccggcctggcaggtacccccgcgagaacgtgggagccggtgtatttcagctgcatttattactgatctcgggctgcaccagggcacttgtaggaccgcactaaaaacagcggaaagtgaggagccaagcctgggtccggggcggcccgccgtacagctggcctcacggattccactgcctgcgcctgcagatgacttgttctggagagtagagaatgttctcggatttaaagtacaatccggtttcctttccattcattatagttgcctacactcaacaaacaaaagttgggaaagataaagggattattctagcgcgtcacattgacaaacaccgacgttaacacgctcagtccagcctgactcacttgcctcaggtcagagaggtcaccactgacgacgccgggccctcaagccgatcctaatccagcttggttctctcagcctcagccagaccatccgttcttgcctctgtcccaccacgtgcaggtgtaagcttccgccgcacttcttgtctgaatctgccaagaagaaactgcatctttcagctaaattcttttcactgatcagggtagagtttagcggttttttttttaagaaaaaaaacaaaaacaaaaaaaaactcttaagctatttggtactcctctccctccgggattctgtctctagattgtgaaagctgtcagagaatggagtcagggaaagccgtgatgggaaagttctcactaataattgcctgatataaagaattagcacaaaagactgccaaaaccacaaccttgcacaaaggccacaaaactacacaaaaaaatgcttcaaggacatttgcgcagcaactgcctgtccaaccttggactggccatcccctttgttactgatctttgtagccaaggataattgtttcaaaacaacttacgtaatcctcctcgtttttccttttaaaccccttatcttcctttacct

SEQ ID NO: 585602 - DNA, 4001 bp, Homo sapiens
aagttgtaatctttttacataaaagtagcccgtttcgggactgattgtgtggctcaatcagaggaatcatcactcctaaaagtctgccactaaactctgctactatcaccagaaaatgaagtatgtattgtaaaataataataacagtgataatgacgatgatgaaggaaagaatcattatggtaatatatagccagtaaacagatgaatgaagagaaaaattagtggggaaaaggtctaagtgataactaaactttaaaattactatttaaaataacaataatctttacacaacacctttttgtgctgtggaagggagctataaattcaaaaacataagtatgctacaatagaaaagtttctggtgctttgactcaacatgtcgctctaacacaaacatacatctttttctacaaatattttcacagttccaaacacttcattcaggaatcgaaaaatgaataatggaggcgtagttttgttaggcctttaacaatcattttgtcaaagggaagacaagttcgaccccaaaatagtaactaaatacaacaacgtactgtttaagtactccctacagagtttactgcattggtttttaaatttagcttaaaataagatagtaaagttagtatttagagaagcctcaataatcgattattctttttaaattaaatatcgctacatgtaatgcagattaggactagaatattaaagcagtgttgccacttaacattaatccatgaacatattctacgcgtgactactggaaagcactaataaccaccccaatctagtctctaggaattggcatttaaaagcccaaagatggaaaaaggtcacctaacccggcaacacatcctgagggaaaggagggacacaggactccgtgcgcgatatcaacattctcttcctttctactctccgcaccgcccccgccccccgtgtcaggtgatcagttatttagcaccattaacacgtacgtatcgacaagtggttcattaaattacatgtattatcggaaggcaagagtctaggcttctcatttcaaactaagcaaaaggagtccacagtttgagtcccgggcacaaaagcgcgcggtaactggaggataaatggaagagcaactctcatctccaaaaagcagcagcagggagcagcctagcagccagggccagtcccagtttcccgaaaccaaggcccaaagctccatgctggggctccctgagaaggaagaggccccaacggccggatccgggggcctgcgagacgggccttccaggcagcgcccgccgtgcctcgggcctgcgcgcccgcgcctcagcggcggcggggcgccctcgcagcagacggctgggtaccagtggtcgggagagaggccgtggtcccgaccctccgcctggcgaccgcgtcgctgcgactccctccccagcccgcggtccaaatggtccacaggcgccagcggcgcggcccaggtaggccgaggacgttgcgcaagaggcccgagaggcgatctctcggctgcgcgggagaaaagcgcggagagtccgccgcgggaggggcggagaggcccgcggaggcgctgtgcgtgtggaaggggatgggggaggggaggattgcccgtctccctggccgcggccacagccgcaactcacccagctccgccagacgagcgctaccactggcagcaagaggaagatggtggacgctgccgccgccgaagaggaggaggagggggcccggtgggtgccgcggagagggggtacgcgcaggacgtcggcgtcgctgccacagcctcttttcctcctgggaccaaatggctgctgctgacgacactattcttggcttccgcgccgccctcctaatcctcgttgcagccgccgccgccctgagcccgaaggtcgcttgccgcgtggggacggtgcgacggcgcgagaccccgcagccatcggcgtgcggcggcggcgcgggagctggagaggggccgtgtcacgtgaccccactgtttaccgttccgggggccgcggcctgcgtcgctgccgcgcctgcgcgctttagggcctcgagcgccgcgcctccgtggggccccgggctgcagcgcttcccggcgttgccgcgcccctccctgtcttcggaggacgcggcaccgcctgcgggcttctagctcacacctccgcgccgccgggaggggcgaatcagaggagcgctttttctcgaccgtagtaagcactaaggcttcacagttaatataatattgatgcgcagctccccaaccccaggtactttttattaattgactgtgagttcaagaatggtagaataggatggagtagatgagccctctgcccaaatatctgtgctggctcggcacagcagccttaccattaactacctccgttaccctcaccctacatggctgatctacctcaggactcaaattgctacctccaagaaacattcttggtatccagtaagcagtcttcagaatgtggtcccaggtttccctgaggggtcgccaagacctttcagtagagcctccattcctttgccaggagcatgtgtctaaggccaaattttcttcccacccttcaaccaaaacagcatatagcagctgattcaatgcagaaacagataagagaatccagccatcttctattaagccagacattgaggaaatctgcagaaattttagatatcacccttttattaatttggaaaatatgcttttcataaatacattatttgtggtaacaaatattgtgtagaggtccagagacaaaaaaagtttgagacccactggtctgcttccacagacacttgagctaacccctatctcagcccttaataagcgctgtgaagtaattgttgcttgtcagtcactccaaccaaaaggagctacttagggacagggtttgtggcttttatctacagggactattacagtattcagccagtacctgctgagcaccttactgtgtggtctgcactgttctaaaacctttacagtacttgttgatttaagctttagaccaaccgcagcccacattgtaagattagtgcagggtggaagaataagtcacaggcatgtggtgaagatctgttctttcctctctctagtcttctgatattttaagcactcttaatagcaaatgctcttctacaaaggaagtttgggttgtcctgattccactggattcttaagagtttcaccccctgtcttgactaatcaatccctcaagactttgttttacaatctttttgtaatgtgtttttgagaaaggaaaatagaaatgagtaatttttttttttaattctcacttgggatgtctgggatgaattataaaaacaagcctaatgttattcttactcttctggtggatctcagtgtgacgttttaaaagggcgttcagaaaaagtaaaattattgttataaacaaaatccaaccccgaaggaattcaacagagtagaacttgatgacggagaccactagctggaaaatcccttagaagggctgaggaaaacttaccttctcagagaagttttaataaatttaagataaaacaaaatggagattaaaagaaaatgtaagaatcataagactgtcacatttacaaagcaaagatttctgatccttaaaaagtcaacaagcttgccataggcatgatgttttgattctgttattttgaaccagccaagtgcccagattcacatttgtccactaatggtctttgctttttgcttccagatgtaaacacgaactgtttatcttatacccaattcatagaaaggttagtagaagaaagaaccagcataataatactggcaacagctataactgcacacaggacttattggaagatcagattgtatcagtaacattgaaaactccaaattaacttgggaaaattaaatttggtaggaaaacaagacagagtaattgataatgactaaaactgacagtgtatttgtatttaactaaaaaattatcaaagaaggaaaagtg

SEQ ID NO: 585603 - DNA, 4001 bp, Homo sapiens
ggattttatgagaaatttaaatggatcttaagaaggcaaaatgtatcaaaaaagcaaacaccatcccaccatgttaaggaagataaacatcatctatttcagtaactgaaacacagaattgtatgtataattttcattcaccagtttttccaagtaggccttatactatgaaaaaaatctaagctcttgattttgcaatactccaaattgccacttgctgcctcccaacttttataagtaatacattacataagtcaaagactgtcaactttcctagtggattccaatactcaataaaatttaaattttaataacatagtttgaaatgattaaagacaaattcctttcgatttttctatcttgaaatgtgcatctgaccaaaccaattttttacctacatttacatagaccacttctcagaggtgacttttctgattatgcaacatataagtataccataagatcaacatgataaagttatctgaagtctatcccaacaagagagaatgcataattcacgtgtatgcaaaagcagtaaaataaactatatttttctattcttcaataaatgaacctataaaaaatgtaaataagaggcaaactttggtcccatcactggctcatttttatcattttgacaaattaccgagtacagctatctgaaaaagcttaaaatctaaagttgtaatctttttacataaaagtagcccgtttcgggactgattgtgtggctcaatcagaggaatcatcactcctaaaagtctgccactaaactctgctactatcaccagaaaatgaagtatgtattgtaaaataataataacagtgataatgacgatgatgaaggaaagaatcattatggtaatatatagccagtaaacagatgaatgaagagaaaaattagtggggaaaaggtctaagtgataactaaactttaaaattactatttaaaataacaataatctttacacaacacctttttgtgctgtggaagggagctataaattcaaaaacataagtatgctacaatagaaaagtttctggtgctttgactcaacatgtcgctctaacacaaacatacatctttttctacaaatattttcacagttccaaacacttcattcaggaatcgaaaaatgaataatggaggcgtagttttgttaggcctttaacaatcattttgtcaaagggaagacaagttcgaccccaaaatagtaactaaatacaacaacgtactgtttaagtactccctacagagtttactgcattggtttttaaatttagcttaaaataagatagtaaagttagtatttagagaagcctcaataatcgattattctttttaaattaaatatcgctacatgtaatgcagattaggactagaatattaaagcagtgttgccacttaacattaatccatgaacatattctacgcgtgactactggaaagcactaataaccaccccaatctagtctctaggaattggcatttaaaagcccaaagatggaaaaaggtcacctaacccggcaacacatcctgagggaaaggagggacacaggactccgtgcgcgatatcaacattctcttcctttctactctccgcaccgcccccgccccccgtgtcaggtgatcagttatttagcaccattaacacgtacgtatcgacaagtggttcattaaattacatgtattatcggaaggcaagagtctaggcttctcatttcaaactaagcaaaaggagtccacagtttgagtcccgggcacaaaagcgcgcggtaactggaggataaatggaagagcaactctcatctccaaaaagcagcagcagggagcagcctagcagccagggccagtcccagtttcccgaaaccaaggcccaaagctccatgctggggctccctgagaaggaagaggccccaacggccggatccgggggcctgcgagacgggccttccaggcagcgcccgccgtgcctcgggcctgcgcgcccgcgcctcagcggcggcggggcgccctcgcagcagacggctgggtaccagtggtcgggagagaggccgtggtcccgaccctccgcctggcgaccgcgtcgctgcgactccctccccagcccgcggtccaaatggtccacaggcgccagcggcgcggcccaggtaggccgaggacgttgcgcaagaggcccgagaggcgatctctcggctgcgcgggagaaaagcgcggagagtccgccgcgggaggggcggagaggcccgcggaggcgctgtgcgtgtggaaggggatgggggaggggaggattgcccgtctccctggccgcggccacagccgcaactcacccagctccgccagacgagcgctaccactggcagcaagaggaagatggtggacgctgccgccgccgaagaggaggaggagggggcccggtgggtgccgcggagagggggtacgcgcaggacgtcggcgtcgctgccacagcctcttttcctcctgggaccaaatggctgctgctgacgacactattcttggcttccgcgccgccctcctaatcctcgttgcagccgccgccgccctgagcccgaaggtcgcttgccgcgtggggacggtgcgacggcgcgagaccccgcagccatcggcgtgcggcggcggcgcgggagctggagaggggccgtgtcacgtgaccccactgtttaccgttccgggggccgcggcctgcgtcgctgccgcgcctgcgcgctttagggcctcgagcgccgcgcctccgtggggccccgggctgcagcgcttcccggcgttgccgcgcccctccctgtcttcggaggacgcggcaccgcctgcgggcttctagctcacacctccgcgccgccgggaggggcgaatcagaggagcgctttttctcgaccgtagtaagcactaaggcttcacagttaatataatattgatgcgcagctccccaaccccaggtactttttattaattgactgtgagttcaagaatggtagaataggatggagtagatgagccctctgcccaaatatctgtgctggctcggcacagcagccttaccattaactacctccgttaccctcaccctacatggctgatctacctcaggactcaaattgctacctccaagaaacattcttggtatccagtaagcagtcttcagaatgtggtcccaggtttccctgaggggtcgccaagacctttcagtagagcctccattcctttgccaggagcatgtgtctaaggccaaattttcttcccacccttcaaccaaaacagcatatagcagctgattcaatgcagaaacagataagagaatccagccatcttctattaagccagacattgaggaaatctgcagaaattttagatatcacccttttattaatttggaaaatatgcttttcataaatacattatttgtggtaacaaatattgtgtagaggtccagagacaaaaaaagtttgagacccactggtctgcttccacagacacttgagctaacccctatctcagcccttaataagcgctgtgaagtaattgttgcttgtcagtcactccaaccaaaaggagctacttagggacagggtttgtggcttttatctacagggactattacagtattcagccagtacctgctgagcaccttactgtgtggtctgcactgttctaaaacctttacagtacttgttgatttaagctttagaccaaccgcagcccacattgtaagattagtgcagggtggaagaataagtcacaggcatgtggtgaagatctgttctttcctctctctagtcttctgatattttaagcactcttaatagcaaatgctcttctacaaaggaagtttgggttgtcctgattccactggattcttaagagtttcaccccctgtcttgactaatcaatccctcaagactttgttttacaatctttttgtaatgtgtttttgagaaaggaaaatagaaatgagtaatttttttttttaattctcacttgggat

SEQ ID NO: 585604 - DNA, 4001 bp, Homo sapiens
taggaatacaggtattactataggggtggaattttataagtaaaatagtctaacaagatgacacatgtgtcagttccacatccaatataaccacccttgaaggtaactggagttccagcaacaaccatgttaatattaaataaatgttcttcctgaatttggactaaactaggaaacagtcagcatacaaccaaacactgtcaaaaatgcttaaaaataaagataattagagctactatactgacacaagcaccaaagtaaaaaacttgaacaatgcatacataaaacaaaattttaaaagctttaaaacatttagaatacaacaacagaacaatgtaaacctaagtaataacacaacataatataaataattcagagatacactattagcaagcaattcaaaagacctcagttttaagttgttaaaatgaagcttcctagtagccagtgttgaggtcctcaggcagagtaacctggcaaacttaagggccaacagcagaccacctattcccaactttaagtattgccgtattaaatttaaaatatacatagaaaatgttttaaaaaatgaaaaatatgctgaacaaactgtacaggagaaaaagtctagtcaatgaaaaacaaaccaacatcacataaacctgagaactatttactctagggaatggtgagggaaaaccttactgttccatgggaggctgattttacctttacctataattttactcacagaatagctattagtaattgccacaacgtttacagtaatattttctctgctttataaaagaaaaactgttttttatacattaacatgacaaagtaatttcttattaaggatagtttagccttacagaaaattactatcttcagtctttcagttacttcaactacagacccttttctgtccaacagaaatataagacacatatgtaattttgaattttcaagtagtcacttttaaaaaggcaaaaaaaacaaaacaagtgacataaattttaaccacaaatatccaaaatatcacctcagcacataagcaacataaaaaaattgaagaaatattttttaactttttttcatactgagtcttcaaaatctaatgtgcattttatagcacatctcaattaggaccagactcattgcaagcgaccagactcattgcaaatgacatgtggctagtgtttactgtccagggcagcagaggtatagagttctttctctggttttaagatacatgtacaaaataccaaaggaggtgaaatgggagcaaacaatgtaaatatttcaggggctgggaggtatgctgagaaaggtcaattcagccatcccccgactccagcaggcctaaggtgaccacatgtctcaatttgccgggcaatccctatttactaaagagtcccaatttacacctgttgtcatgatgtaattattaaagtactctctgtaattctagtaagtgtcccatactggataataaattatatggtcaccctacctatatccataatatccttgaggataactccacactccttggaagaaaatttagtttaaattttaattctgatgcctggaaaagaagctctaaattcaaaggaaataaccctaaatttactaccctcctcattaaaaaaaaaaaaaagaaaaaaagaaaaaagaaaaagctgctgaaaatttttttattttaaattgcagactaaaaaaaaaaaaaaaaaaaaaagtaagaattacctgttgaacaaggcatctggaaattgggatcattgctatccaaaacaggcaaacagaactggttacttgcagatcctagcataggatccttatcgctgagcatgttcttcagcgagtcctctaagacattttgacttgcactaaaatcctcacagacttcattctccaggttggatcctagaaatagggcatcatctaagtgttcagtaggaattaaatgattaaatgtatcaactatatccatgaagacttctgtgtgtctttcagccctatagaaagacaaaaaaaataccataagaaataaagctatcaattgaaaatcacctaataccaaattattttaatagttttgagtctaagaacacacttaaggtatttctgaattgttgtttaaaaaaaaaatcctcacttgtttttagaatatacatttggaaatgtagaacgaatctttactaaataatgtttcttcatcatgcatgtagtatatcattttaccagaaatcctactaaatgtttactcagttcattatttttaggaaaaaaaaactatgtatatagtccattaacttgacacatacaaaagaattacatggcttaaagcataaaaactattgtttttaaccacaaccttttcacaaattaagcatcagacactgcttttacaataagtccacataaaagagctaaaatcaaatattttaaatttttatcccatacctattaaaaccataaagtaggcttgttttatttacaaagtattaaaattatttaaagaaaggtaatatatatatagacaaagggcttttattgtgggggaagaggtggaaaatgaaaaagaaactattaacccaacaaatcaaaacttaaaagactacacacacacacaaagatgtgcacaaacacaccttttttcaaggcccccttataggataaaaacaagataaatgacacaaagacaatctacatcatgtatttagatttattttagttatgtgtggtctatacaagtatcaagttagtctcccatttgaattgtacctacattgctcagcaaagtcatttcaaagctctacaggagcctcaattatgaaaagttaaaacaattaagttaaatcagtttgagagaaaactgaatcaacatattttagggggtggaaagtcaaccgaaaaaagttaatattaatttaacaaaaagtcccagtgattaacctataacatcctgggctccttaattccaagatttttgagattagctccaaatttaacaaaatttcctcaaactagtcttgaattctctccccctataaaaatgagggaagaatttcagatacatgctaacattcactagttatatatgtcatactgtacaaaacatttaaccaacatttatataatttaagccccaataataaacagggtctattaacatcctcgcattatttaaaaaaatgcacttgaataatttaaatgtcttccccaaagtcacaaaacagagccaaaattctagcctgggtttcaagctccacagcccatacccattagtaagtgttaccctttcacactgagctaagggctgggatgatctgactcattaagggctctttaaaaacaattttcctgccaggcccagtggctcatgcctgtattcctagcacttcgggaagtgggcagatcactagagcccaggagttggagaccagcctaggcaacaaggcgaaaccccgtctctacaaaaaaaaatacaaaaattagccaggtgtggtgacgtgtgcctgtagacccagtcactcgggcggctgagttgggaggatcacttaagcccgggaagtggaggttgcagcgaaatcaacccactgcactccagcctggcaaaagagccagaacctgtgcccaaaaaaaaaaaaaaaatccaacaaattagtgactgcctggggccacgaatagggaaaggatgaactgcaaaagggcaggtgcatacctgagagatgacggaaatgtcctaaatcttggttgtgataatggtttcacgaatctgttcatttttaatgaatgcatttattatacctcaattttttttaaaaaaaaagcaaattcctctctcacaaaagttaatgtccttctaaatagaagtttcagtatctcttctcattttttttccatttatttacactgaaatgttaataaagcactgaaagaaaatgctaactactttacagatttgctgcttattttacatgcattctctcaactgacagaaaattgtagctagc

SEQ ID NO: 585605 - DNA, 4001 bp, Homo sapiens
gtcattagagaagttctgatgaagtaacattagtaatcataactatctcaaaacagttacaaaagcctcataaaatcaacacactacataaatttcaaaggcttggtgggtccggtgcgactgctttaactgccccacacacatattcacacaacgaacctgtatcagtttaggagaaagtgttacagaaaatatagctcctttaaagtaacttccaatcacaatactgaagtgataaatccacttctgaaaagcaatttttaaagattcctaaaatactcattttgacaacccacaaaattaaggtttttaagctattaaacaaaatatgtcccaatataaacacaactttcataggccaagttccatcccacagtaaatatgtggacaaaaatcaaaactcttcagtgtactccaataataatttttaattaaacgagaggcataccataagaattaaaaaaagcctactaaacttctggttttagggaattacaggctttacacttctgcaaagatgtgttttagtaaatgcaagacgaagcactgaccaactatcatcacacatcagaatccttccaacaaaaaacccaggactgaatttaaggaaaacaaaataaacgacagagggggaaaaaataatgtcttgccacggtaccgcagcggctggatagcctgcttgtgaaatgctaatgccacttcggagcagttagtcaccagctattgtgtagggcaggagaaagccgagccggccgcgcgtgcagagcgagcaagcgaacgagcgagcgcgctctccctcttcgcgccgctcccgccgccgccgactctcgcgcgcccccgcgcccgcacggacgcgcgcgccggcccctcctcctccggccttgcactgcacaacactcatgacgtatctttatttctagcacattaacaaaatatcacaaataaattgtccgcagcccctgcggccccgaagtacgagtacccccggccactggcccccgcagaccccgcgccggcctcccaaccctccccatggcctttggagctttcacgttctagggccaagtttttgtctctgtaaaaaattgcgggaaattcaatttttattcgactcagggaaaagtttctttgctctgcgacgtgaatgtctcaccagattctggtaggtcctgggatgctccttcccggtccagtcggtgcgccggggcagcagctgcggggagaggacaccccgtgagcccggcccccggcccctacccgcccgctcccctcccccgcccgccccgcgccccggcggggaccccgagccccgcgccccgcgccctgccggcggcggcagcggcggcgcagcggcccagaggcggccgcgcggcggcgggacgcgccgggccgccgccgcccttacctccttctcggccacctcgcggatcagcacctgcaacaacaaagcggggagagctgagccccgcgccccgggccgcggccccgccgccgccgcctccctcccccacgcccgcgagcggcgagcgccggcccggcccgcgccgcgcgccgccgtacctgagccgcctgctgacagggtccatcttccaggaaccgggcgatgaggaagtagagctctgcgcgggagagagggacggggagacacacaggctgagcggtcgggcggcggggggcgggggaccgcgggcggaatcgcccggtgccagcggccccggcagccccccgacttacccgatcgcagctccgagaggcctttcctctcacaagacatgtttatgggtcacttcagggccgccgacgggacaccccgccgccgaggggaagcggggacggtgccgccgcctgccctatagctgtcagtgtgtgttcacgagccgagcttcggctccaccattcaagcaacggcggcggaggcggaggaggaggaggaggaaacaacaactctcaggcagcgactacggccgtggccgcctccgccgcggatccctccgccgcagaaaggagtccgccgccttcgcggcccagggctcggccccggctctggcccgcgcccccgccccccggcgctaaaaaaggagtgcctccgacccctcgtccccagcgctccgcacgcggcacagtgagacccccacccgctcctccccgcagggcgtgcgatttatttatttatttccagtcggagaagatgtcggagcccaagccgccggttggctggaaggcgctttctctgtggaggccgatagtggcagggagggggccggggacggttccgcggagggatctgacgcacacggagccgcagcacaggctctattcagcggcgctggctggagctgagatggaagttagtttctatgtagcagaaatatgaaacaaatgaagcaaaactgcccagagaggggaaatgccccaaggatgggtctcactcacgcgcgtacacagacacacacgcagagagcactctcacgctgggcaagctcgggatcgcgctacccttcccgagttgaatgatagtgtttggtttctgtctcttgccatgtgcatgtgtataaatgctgcggattggcatctgtgtaagtcttgtcctgcgttatttctgcagcctatgcaagtgttgtgtaatttattggagtgctgtatattgcaatagaggtttgggctgctttttgttaagcacttgcgttttgcaaacccgttatttgctgaagccacctctgcatatttcttttattactgccattgcctttggcgtacgttttttaaatgttttttattgttaaacgggcaaagcgaactcttgatttgtacttcagatactctttttccttattacaaaaaggctagtgatggctaattaggtatttggaattaaagaaccttaaagcttttttaagtgtttacgagaagggagaatgtaaacctgagggaaaggaaaggacgctaatattcatgtctaactgatctggaggtaatttagtgacagatcgataacctgcctaaggatattgaaagagtatactacagtttagccaaggtgaatagtgattaaataatttaaataatctgtgtatcttgcagttgacttcgtcatgctaattaatggcttctaatttgagatgtaaaccattcctgtttacagttaatcacgggaagacttcttgaaaactgacgaaaaggagaaaaaaaaatctttcgtaaattagtatgtaattaccgattttatatgctaaatcatacatctgtgttttgctgatgaggataagggccttgtttttaaaaaaacgaatatgggtgaaattaatggaaacaatagaaaaagccatttgttagaaaacaaggacaccaaatgatatttatctccagatgatttaagcactttccaaaaagacttgagagttcaatattttttaaggattgcattttaaagggaatttggatagtcgttcttttgttaacatttaacaaaagattctccttaaaaatgttagataataaactgcattttatgggtctggtttaaaaaggttatttgtggggaaaggaccaacaagctgtattgtggttttctagattgtttcctcaagccttgtaacctcctagctccttacattcctagtgggaaatacttgctgcaaatgccttgggctgcactgtaagcccaagtgtgctgcaccagtgtgatgccctatactaaaacatccagaaatcatcatacatatgaggaagaagaaataaagcctcaaaccctttggaataataggatataaaattgccttttgtaactgaatcttaaaaatggaaggttaccatgacttgtcctattgcaacctggttatcagaataacttattttttttaagatagctattctcaaatactgaacatatttgcatctttaaagacactttattctattcaattataggtaaagtagcctatttctaggtggttaggcttgaaaagatagactgaaaagataggaaattttgtatgcctttt

SEQ ID NO: 585606 - DNA, 4001 bp, Homo sapiens
agctagagtaggcaaatttatagagacagaaaatagaatggtgattgccgggggctggaggaaggagagaatggggagttagtgtttagtggtgtagaggtttggtttgggaagaggaacaagttctgttgatggacggtggtgatggtgacaatgctgtgaaagtccatacttaatgccactgaactggacacataaacatgggtaagatggtaaattttatgttctatattttaccacagtaacaaccaccaccacaaaaacaggaattcttacattggccaggagtacggtgacaaaggaaaaatcgtgtctggagggagcctttacaacccaggccacttgagccaccatgagaaaaaaaaaaaatatccaactttagctcacaatcagaaagtatcaaatgcatcaggaactgagtcaccatgagcaacagacagacagcatacatcacaataggagaatttctgaccctgaaacttgagataatagaacaatctgaaaaagacttcaaataactgtatttacaatgaatatgcaaataaatgggtagctgaaaaggggagaaggaagacttagggggtagaggggaacaagatgtggaaaagaatcggaagaattcaggaaaatgggttagtctggggagaaagggacgctatttgagaaaaatccaagtggaggaaagaagactgaccagattagactacagcccagacccctgggcagctgtcccagggtgttcaggtggcaaagctgtgagatggatctctttcctccatagacgggagaactcagtgagttcctgacaacttaggcttgagatagaaataaggggacttagtgaccgggcgcggtggctcaagcctgtaatcctagcactttaggaggccaaggtgggcggatcacctgaggtcaggaattggaaaccagcctggccaacatgacgaaaccccatcttcacaaaaaatacaaaaattagccaggtgtggtggtgtgtgcctgtaggcccagttacttggcaggctgaggcaggagaatcacttgaacccgggaggcggaggttgcagagatcacgccactgcattccagcctgggcgacagagcaagactccagtgagaagaaagaaagagaggaagagagagagagagaagagaggagagagagaaaaagaaaataaggctgggtgcggtggctcacacctgtaatcccagtactttgggggtggatcacgaggtcaagagattgagaccatcctggccaaccaacatggtgaaaccctgtctctactaaaaatccaaaaattagctgggcgtagtggcacacgcctgtagtcccagctacttgggaggctgaggcagaataatcgcttgaacccaggaggcggaggttgcagtgagccgagatcgcgccactgcactccagcccgggtgacagagtgagactctgtttcaaaaacaaaaacaaaaacaaaaaaggaaagaaagaaagggaagggagggtgggaagggagagaaggaagggaaggaaggggagagagagagagcgagagagaaagggagacagtaaggaaaggagggaggaaggagggagggaggaaggagggaaggagggagggaggaaggagggaaggaggaaggaaggaaaaaaaaaaagaaagaaacacagagctgggcgtggtggctcaggcttgtaatcccagcactttggaaggtggaggtgggcgattgcttgagcccagaactttgagaccagcctaggcaacaaagtgagaccctttctctatttctaaaaacttttaaaacattaaaatgaataaaataaaataaaaacagacttcccaaggaattaaagtgctgacctggcctgggaagtgctggactcaggaatggaaggacacagttctcagatgccccccgggtggaaccaggcactggcactacaggttgccctggtgtggtcatctctgtggcctctgcctccagtcatgccccttcaatagcaaggaaaacagctccgtagatgcaggacaatgggcagcattcattcactcaacaaaggcttacagagcctctcattgtgccaggcgctgagctgggtgaacaacagcaggaaaccaaccagcaaccacaggcagtgttgtggatgagagtgtggggcttaccggctgggtggcctggggcaggtgatttctctgctcactggcctgtttccacatctgtacactggggcttagaacagaacctacctcctaggatggttgtgagcattaaatgagttagtacatgggtagggcctgtgatcatccctggaacatagtaagtgctcattgagttagccagtattcacatacagcaggtccttgaataacgtcatttcattccatgtctttttgtcatgacattggtaagagaaaaattcgattcctgcaggggccactgtctgcgtggtgtttgcattctccccacgtctgcgtgggttttctcccatgtcccaaagctgtgcacgctaggctcattggtgagtctgcatggtcccagcacgagtgagtgtgggtgtgtgagcaccatgtcctgtccagggtaggttcccacctggcatcctgagctgccaggatgggctccagccacccacgaccctgaactggaataattgggtaaataattatcttgtttttctttctttcttctttctttctctttctttcttttttctttctctctctctctctctctctttctttctttctttcgagagagtgtctcgctctgtcacccaggctggagtgcagtggcacaatctcagctcactgcaaccgccacctcctgggttcaagtgattcttgtgcctcagcctcctgagtagctggattacaggtgcccaccaccacagtcagctaacttttgtatttttagtagagatgaggtttcaccaagatggccaggccggtctcgaactcctgacctcaggtgatccacccacctgggccttgcaaagtgctgggattacaggcgtaagccagtgcacctggcctaattatcttgtttttcttaatttttcttaaatgtatgtatagcttacattcatttcagtgtttaatattagaagtgttttgatctttagaagtttggtgatgtttttgtcaccagaaatatgtcacaggaattctattcatttatatcaattagcctatggtaaaattggttttgtttcccttaaagttgcagtttccaagagtctatcagcaacttaagtgagaacttactgtatttgttattatatatcttccacctgttatatataacaggtggaaaagtttgcatagcctgaggctatagcaaagaaaaaaaatacagcaacctgacttggcttttaccctggggaggactgccttggcctgggagagctcctaggtagaaagggaggacacacccctctctgagggacaggggcactggttgagtgttgccaggatgtgggctggggaggcctcctgggaagggcatttggttggaagcagagacacctggcttgcctgagagggttgggtgagatgggaatgaagactgggaggctgaccagagccagccagcgcatgtggggacccaggtgtgcagacagagtccactctgcgtgtgcacacttatacgtggttcacagagcttctcccatttgagtgacctcacccactcctcacaggatagctctccaaggtgagtctcactgtcaccccgcataaggagactgatgctcagaaaggtaagtgatttccccagtataggtcggggagggtctggaatagtgacaaagtggtgggaccagagccagggacctgccactaggaaaagagggcagttaaggcaagcacatggaggagagagaggaatggaagaggtgaagttaggggagggtgagagggagaaagagaaggcagcatcagagtagacggtgtgttttatccataaacccagacttggggaaaatagattttcttctgtattat

SEQ ID NO: 585607 - DNA, 4001 bp, Homo sapiens
ctccaaggcgcacctctgtctgagaagcagctcccagcctgtgtggcccccagtctcagccagcaagactgtagggcatcagggatctacaggtggggaaactgaagtccaacaatgagtcacaggcctcaatcagggagctgttggcagagctgcatctgtgacgcctggtttgttgtccacctttcctcgatgtgcaggctggcacagctgtgaacggcagtgctgggtgtgtgcagagctcttcctagatctttcttacgtgtcatcctgtctgacgcccagggcagggatcgccagccccatgtttccatctggaaacagaggcctttgaagggaaaggggtccacccagagttacttcagccagatcacattaggctgaggttagaacttaggtttggggccccaggctcactgttatgttccccaaggtgcatctgttctctcaggcaccagctccaggggtccctgaacactgcccagcaacctccccagtcacctgagggtggctggaggggacaagctagttcagccctcagggagggcaggaagtgggtgaatttctcactttatctcctttaattctgcatatagacagcccgcctctcaccctaccataaatagctcttcctgacagaagtaaccaaccctaaatctggcttctgtctcctgtgtgcatgtacatgtaatgtttactacatctgcgtgtttcaccaggacataaatagtatttttacatgttttcagacttcatgtaaagagatcctactgtgtattttttagagattttatttcctcccccattcagtatgatatctgtgagattcaatccacactggtatatacgtagctctaattctgaccgccttttacagatgagacacgggatcggcaaggttacaggacttgcctcgaatcataggtcttgtaggtgaccgagacagaatttggactgtgtgatccagagccctctctgcttctggatcctgctgtcacccacctccttagcacctgcctcctactccacgtgcccacgcccatcctgctgccctgcttcctcttgtcctctccttggcaggcatgtgaaagaccgttttcacaaaggtgttaagaacttcccgggttcccccactgagggcacatgcatttgaggaagtgctggggaaagctcattggagtgggaagccagggctttgggtctggctctaccagctgtgtgaccccaacaaatccctctgagcctcactttccttatctgtattatgaggctgcttataggggcctgtgaattttattaggcgggtgcaaaagtaattgtggtttttgccatttaaagtaatgtaataccatgtcagggactcggggactctgtcactgaccagaaaaaggagaggaattctgaaatagcttcagcatgaggagcagggtaagagagcctggtgacagaccctggccagcaccccttccatcccagccagcaagggccgtggccacacttaccatgtgcagcatgtctgaggccgtcggggatacctgggcccggtagaggttgtgcagctccaccatcaaacgtttctcctcatctgtgagggctccaacggggcctgtggtggccaccagcagtagcagtagcggcagcagaagcatcaggaaactgcaggagccgtgcatggtggccagccgtctctccttctcccgtccaggggtctggcagctggatttaaagtccttcccacacaagcaccaccctggctggggtggggcagtgggggccgtgtttgaggcccagcccgactcacacaatgtctcagggagggctgggcgctttgggtcccgaccagcatcaagtgcactccccttggagtccttggcaaaaacctcctttctcttggtaacgggggctcaggccaaaagctgtgtgagttcctaagttgtggacagatccttcaggggcaaaatcacagtaacctctgcagagctgtgactggttgcacccaggtcacacccactgtgtgttgaagatagataagagaaaggaaaccacagaccctacccacagaggagtgggcaagatgaggaagctataggcttttgaaaggacagaggaagaccagatgtatttgataaaaggctgagccaacctaaatcagaatcctggttctgccccttgctatctgtgttttggcagctttctcaagtgaatcagtgacaataatagtacctatctcacaggactagagggaagattcaatgacatataatgtatgtaaagcacctagtatggtgtctggcacatagtaggccctcagtaacagtagacaacccactcatgtggcctgggccttagcaggctaccagccccctgtggaggcaacattcttgcctgcggggggagaggccaaggtcttccccactctagctgtattcaggaataaggcctttcactatggcaaaattttggcttccaggtatcctctctgaatgcatgtgcttgacatgctcatttggaagtgggatgctgggacccctgtgctctaactatgtagaaatataatgtgtctgtttcttaaatcaagagagagcagaaaagcagaaggttgaatgagctgatgcaccaggagctctgaggggaaggtattggaagggaaatagccttagcagtcaggtgctggcattataatgaccttgaccttgcaggggccatgaccggttcatgaagcaggaagctggaaccagtactcttgaggacagctgggatccttgaagcctgcttcttcaatgaatagggacctagaaaaagtctacccacaggctttggaagatgacaagaaaacctgtccctgcctgagtctccaagtaaaaataaaaacaaaaccaagatggattacacacacatacacacacacacacacttattagaattaataaagtcagcaaagttgcaggatacaaaattaacacatagaaattagttgtttctatacactaataatgaaaaatccaaaaaggaaattaagaaaacaatttcatttataaaagcaatgaaaaagaataaaaagaataaaattcttaccaataaactttttttttttttttgagatggagtctcgctctgtcacccaggctggagtgcagtggcatgatcttggctcactgcaacctctgcctcctgggttcaagtgattctcctgcctcagcctcccaagtagctgggactacttgcccaccatgctgcccaccatagctgctaccatgcccggcaaatttttgtatttttagtagagatggggtttcaccatgttggccaaatggtcttgatctcttgacctcgtgatccgcccgcctcggtctcccaaagtgctgggattacaggtgtgagccactgcgcctggcccttagcaataaacttaaccaaggaagcaaaagacttgtacgctgaaaatcacaagtgttgacaaacaaagtgaaagaagacacaaataaatggaaagtcatcctatattcatggattagaagacttgatattgctaaggtgtcaatgttgcctgaagcaatctacagattcaatgcaatccctattgaaatgcaaatcataatatttttatagaaacagaaaaatccatcctaaaatttatatggaatctcaaaggaccccaaatagtcaaaacaatcttgaaaaagaacaaaattggaagtcttacagtttctgattttaatatgtaaccacaaatctacaataattaaaatagtgtggtattagtataaagacagacatttagactaatggaatagaatagcccagaaataaactcttacacatatggtcaaatgattttagacaagggtaccaagaccgttcaacgagggaaaggcaagtcttttaaagaagacttagaaaactggaatgtccacatgcgaaataatgaagttgaatctttaccgtaagtatattaaaaaattaactccaaaatggattaaatacctaaacataaaagctaa

SEQ ID NO: 585608 - DNA, 4001 bp, Homo sapiens
ctccattccttcttttctgaaagaacccgctccaagcccctccctaggataggttttcatcctctctgcggagacacccaactaattttcaaaccagcgacagatcttatttcacaacattcattcctgactctctctccccttaacactaaagaaaaaaaaaagccaccagtaataatatagttcctattccttaaccttccctagatcagaaaggagttaagaactgcagctctaaaactaccatacagaaaactaactcccttataaaataaaacaaaaattacaaaaccggcatcaatttccacctcttcccccgcccccatccttttactggcggggaaactgggtcagactttagaaaaatctgggctaccgccggttgcccacaacctcttattcatcgggaaagcctggaactaactgaattccacttgaagaataaaatcatgccagaaacattacaggttcagctggctgaaaatccccggctttactacgctgggaggctctcctgcgtcccaccccggctagcatcgagccaggcggcccaatgacctttacaaaaggctggcgcgggagactggccgaggcctccggactgggccgggccgggccgagtcacctgggcagctccctcccgggcctggctcaccatcgaagtccgtgtagacggtgtccttgagcagcgcccccgacccgaagtcgatgagcttgagctcgccgcgattgaggtcgataaggatgttttcgtccttgatgtcgcggtggagcaccccgcagttgtggcagtgccgcacggcctccagcacctgccagaagaagctgcgggccagctcctcttgcagggctcccctttccgtgatgaagtcgaagagatcttgcaccggctcgggcctctccaggatcaggacgaaactgtcgggcctctcgaaccagtccaggagcctaatgacgccggagaaacccgagctcaccttcttcagcaggaccacttccatgggcactcgagtgccattaggctgcaggggcgagggggccgcgttagggcgggagtcgggggcgcccctcaccccacccactcatcctgggggtcgctcctgcagggcactcaccagctctccccagtcggaaatccggtccttctccacgtgtttgatggccacctggaagcccagggtctccgtcaggttccctcgtccgggctaaagcacgcccgtgcgccccccgcccggcgcgccctccccaccgcggggcgcccactcaccggcaagttgtcggagacgcggatgcctgagtagaccgagccgaagccgccgctgcccagtagcgggcccacctggtactgcgactccaggggctccttctccttgcctaggaaagggggaagcacggggactcagtgccggcccgcgagccgccagctccccacccaggagatcccgccgccgccccgcatccccgggccggaggcggggggtgctctcaccgggcgccagcttggtggcgtgcaggtcgttgcagggcgcggcgcgcaggtgggcaagcgagttgattttggacaagagcatcccaacctccaggatgtcggcgcagggacggtgcccagaggagctgccgcaggagccggagccggggctgtgccgaaggctatgcctggggctgtggctgtggctgtggctgcgggtggcgttgcggctgtggctgcggctggcgcggaaggccgagggcgagtcggaggacaactgagggcgctgccgggactggcggcgggagggcgcgccagcggggtcgggcagcgctgagaacggcggggtgagcggctcgtggggctcgtgcggcagcgccgcggggcaggaggctagtggttgctgctgctgctgctgctgctgctgctgccggtcccgccgccgccgctgccaccgactcctctcgggcctcctcagccaccgcggccgctgcagcagacgcccggctcgccccgcagccaggagtaaaggggaggagcgcgccggcggggagggcgcgcggggagggcgcggcgggcggggacggggcggggcctctccgggaggccaaggcggggagcagggctgccgggccggccgagggaggagagggggtggggaagcggcgggactgggcgactcccctcggcccccgccccgcgcgctctgtggccgcgccccggccccgcccctgccagcgctactccagccaaccagaggccgattgatctgcataactcggcgcgccccgcccccgccccgcccagctctcgcggtcagaatggtctctacgccgccacgacgtggcgggaaggaaaaggcgccaaaatggagggggaggggcgcggggcgtgaggggaggcgggagctgggtgtagggccgcgagggaggaaggatggggaggggcgtatcgattcaaacccaaacaataacaaagccatcaaaggccgcccgaggccggctctgcggctctccgtttcgctgagggttttgggtcaagggctcgagccggagcataacaagttgcgcggagacgacgggcgttagtgtgtcaggcggggaggccggcgcgccgggtgtcggactgtgtgtggggatgccgacgagggtggtctttctgtgtgactcagacccgagacctccaagtcggctggggcgggctgacgtcgcgctgtaggctgggggcggattctgggggtttgtgtgttggggggcgcgtcgggggcgaaggatccgcaggacatgagtcacggagggagtggaggagtcaggcctggaacagaactggaggcgggagccccgctcctgcgggaaagggatgcagccctcagtcgttccggccggctaaaagctcagccacgggattcccattttagaaatgcaaaagcaccagcgaatcctgatttctgggaagggatgtgtgtcaaagggccgggtaaagaggaaatcacgaagcaaatgttagtgttgtgatgccagatgctgcctcagccccttctgtgagggcggaaaattcctcatctaaaacgagggtgggagggtgcgcttgatttaaccagttttcacgttgtagtcaccttttcatcagcctgttattaccaggcaggcaataccagcaattattggccaaccccaagtcttgtctcaaaggaaaccccccaccctctgcctcccttggaaataacccggaacactgaccaattccacttgcatcctttgtccttttaaacttcatgtagagttgataacgacgtgtgaaatgagtaaattaaaatactatataatccataaattgaattgtcagtggcctaagtaattgaaagctaactacattctattttaattttttgaagtgcctgccatttaaaggaaaaatcaggatccctatagctgtcattagtgaatttaaatgtttcctttgaaagttttctacagtgcttgctttataaaagtgcccagatcctccacaacttttatgaatttatcctacaaaatattacatattttccttttgtttgtgtactgtggccgaactcattcattttttatgactaggagaaaacccaagggaacaagaattactccctttttgcagataggaaaatgaaacataaataggatggcacagggtcatacagcagctaagagaggagatgaaatgacccaaattcacctcctgagtattcaaagctttccgcttatcagggtctaaaactgtccttggcaccgaacaagacatcattaaacatatgtgattcccacttccatcccttctaccctccctttcctttctcaaaccctcaaatgtagtcaaacagaactattcccacttgttcccactcgcctagcactttacagaccctttgcctttgcggaagcaatcaacctgtcctgggagagccctctctacctctccacttttattcaaagcctttccactctttaggaaacaattgtagttctaccacagattgatgaacaaactcagagca

SEQ ID NO: 585609 - DNA, 4001 bp, Homo sapiens
ccgtgctgtagagcctagaccagataatgtggcacacataggcctcttcttccagacggcacgttccttgaagagacccaggaaccagtcttctatttccacagccttcctagtgtgaaagtgtgaaggtcccacacagcgctcagtacattggagtggatgaagacatatttgaataccctaaatctgggtttacctaatctgagatgaacagctttcactctcatgcctgctctaaggaaagtgctgagctgctctccagcacctcatggcagagggcatcgacaaaatcctcttaaaaatagtgcctctgaaattttctgaaagtttgaaaattacagaattaaacacccacatgtactactaaatacacgtttaatatatatttaattatgtttatgtttattacatataaatatataaatatatttaatatatatatacatacctacatacacacacacacatacacacacacaaagtgtgtgtgtatgtgtgtgtgtgtggcagggtctcattctgtcatttgggctggagtgcagtggcatgatgtcagttcactgcaacctccatctcccaggttcaagtgattcttatgcctcagcctcctgagtagctgggattacaggtgtgcgccaccacacccggctaatttttgaattttttgtagagacaggttttcaccatgatagccagactggtcttgaactcctggcctcaagtgatctccctgcctcagcctcccaaagtgctgggattacaggcatgaaccaccacacctggccatttaatttatatttttaagaaaacactgagattagcagaagtagttacatcatttctgaaaatataaaagctacaatatactccccccctcaaaaaaaaaatctgcaaaaactttgcaataaactcaccttacgggcatgttctgattgagacagctggaaatctataatcatttctatttaattcaacactgcaaacatttattgtatgcccactacgtgctaagcactatactaaaagttgggaaaacaaacaatctatgtacctgcccccgagtcattaccagatagggtaagtgtggaggctacttggatttaagaaaggaattctagtattttcaagtggattcagcaagtgttccttttcgttgcaaaattcccaaacttttacgtctatttgaaatagaattcaacttataaatatacaactttcagaatacatctaccacatagggaaaagtacccaagcgtatttgctgcttagtccaaaagcatgagatctgacttgcttgttacacagacaaaatatactcagcacaggagagtctattttcaatctggctacgtgattttaacatttcttcttaatgcctactcccaagctcagaacaatagaaataaacattcgcacactggttttcttaaaaccctacatttggaactgcatctttttcatgtcaattataaatgtaattttttattagtctatccactaattcttcctaaaaataaactcagactctctttatttctcataactaaaatttttcaaccacagaggagagctgtgtgcatttatttagtcatgtttttgttctcctctctctctctcctctctctgctctcactccctcttcccttcttcctcccttccctctcagcttctcctttgggacatcgagggacaaagttgcaaggcactactatagatctcccatttcttccttttgttcaccagaacgttaacaagagatacaacacctagaaaacagagagcagagacttttctggatcaaacagtaccttttttttctgtttctgtctccttgtgactcaagggagaaatgatcctttctttctaagtgatcttatttctctctgtcaagaatccgtggacatgttatctggttagagctcagcctgcagccaccacgcaggtaactcactcacgttagactataactcacctaactcgtttgtgtcccagccaaatgtgtaccagagtaaaagttcagacctgaccatgggtaagtttaatgattaacataagccactcaggctttttcctcagggcttgttagtaatgaccaaaggaaaagtgtcttacatttttctccacttactgcatgtgccccagataagaattttaagtaaaagtccacccagtgagacaaacaggcattcaacattgaaagaatttgccagcaaatcagcgattgaacagagggctcaagagaaaggaccactagagggcagatccccattcatgaacagtctctcactcttcatcccgaagagtgactcgtaaataccaggttatgggctgttattcatatacccactgtaggggtatgggtctaaagaagtacagaagggaagtaacttggtccaagtcttgctgagaaagggttgattgattctcttcatttttctactcctcatcctccctcttgaccttgcttttttaaccaagaggaggtccttgacttgtactcatcaccctccagtcgtacccagaccatgggcctcagtcatcggttgaactggtgggcctaggaaggtcaacaacaccttcttacttggtccatgtctgacttctctgttcctgtcccactgcccattctgattcacatcccccaattcctgatcatgtttgtctacgtctggcgatacctgaccagaagacgtccttatcttctatcctctccctttcctttgagggagaagtcattttggtaaaatttgatagccctgagtctccaccttcaaggaccagcagtagacctggagaagcatctccagcaaaaccagattaaagccatggaaatacgaccacaactctgatgacagtagtaaaactatcctctagaaagtgtggaagtttacatcaactctgctgtatatcacagtttggcaacccgtgacaagctgaaaaatttttgtagccctgaagctagtggtgtagagagagggtgcttggccagattggggcaggtagggggtcagtcaccccaccaccctgcctgcctgctgaacctctctcagtttccactctggatctcttccatgcaggtcaacaagcatcatttgaaccacatttgtgtgcctggcatgtgggtaatgggaaggagggggaagactagtttgggggtaaaggagatttcaacattattagtaacttttatttttataaaaatgatatgaatcacttagataattcaaagttatatttttaaagagtatgacacagtttctgccttcaaactgcttaccatctggcagaggagacagaaatataatcagattattttattatattgtagagtctcctgataagtttcctaagacttatgttttatttcttgttatttcaacaagaggtttccataaattagccccacatctatccttggctaaaaggcctataataaatatttataagtatttttggcagcctagctatcaaggccgcatcctaaaatcaccccaattttcttatgaggagacagccacctctctactatggactaaaagaatcctaatgacacccaggactttggtttctgtgctctgtgttataggtatttcgtggtggacaatcaagctctattgtaaaagaaataaaggacaatgaatcatttcttgccttgaggcctaaaaggaaatgttgtagaactctagagaaagtggctataccacatgaagctttggggagcctccagtattcctgtcattgggatatgtccatggaatataagccccttacactccaaagcctctttcacatagaaattctaaagccttgagctcaagtctctgaaaatgcttctcaggaggcaggctgagcaccatttctctgctattccaaggagggtagccatgcccaccacagacattgacaacactctacaagaagtaattcctatgagtgcttataaaattctcagcacaaaaattgttactcaggcctatgatgcaaactcagggaggtcagga

SEQ ID NO: 585610 - DNA, 4001 bp, Homo sapiens
caggtgatctgcccgcctcagccacctaaagtgctaagataatgggtgtgagccaccatgctcagctagatagaatgttttttactaacgtacttacttagactaatttgaattttggcattgtaagttatacgtgtgctacaggaagtcacctggagaaatgggtgctcctactaatagctggtatatattgagaaaactatgctttgagctgtgtttgggttgaaatttgaaaaagtcatcatttcaattttctttcatagttggcaaagagaaaaatgagactggtgtcgaagactcttctaacgaataaaatagtctatatatactgtcgtgtccaattaatgttgtatatataataacttaagtgagcaaattccactccacatagcctacaggttaaataaaagtaaattttttttaatgtatttcaaggccaagtgttacattccagaaagattaatatgacttttgtatttaactctgaatatctcaggtgaaaaaactctattgaatagtgcaagaacttatgaatatctcagaaaccctcttaaatggagcaagagacaagaatctgtgcaaatttaaattttaagagacccattctccatttggctaataaacatattctttacgaccttaaagttactcacatataagtgttttttgtctccttctctggtactttgaaaagtttaaggacttgagatactaggattctcttctcccataaataacgtattaagtttagcataattaaaaatattgttaggtttgtaatttccatttccactattctttttttttgagacggagtctcgctctgcagcccaggctggagtgcagtggcccaatctcggctcactgcaacctctgcctcccgggttcaagcagttctcctgcctcgcctcccgagtagctgggattacatgcgcgtgccaccatgcccggctaattttttgtatttttagtagagatggggtttcaccatgctggccaggctggtcttgaactcctggccttgtgacccgcctgcctcagcctcccaaagttctgggattacaagcatttccacaattctttaaaccttatggatgctctattataatactttgctttaagagtggtctacaaaaccacagataaggcaaagaagaataaagcaagattgtcccttagtggttacaataactaggagtagggattctgacattcttccagattcttaggtgtttaccccacctcgacccatgcaatttttgtagattttacaacactttcttattattagttatgggaatgactatttcaagtttgagctgtttcccagaatattttcaagaacaaataactctaaaaaaataactggaacttttataggaatgcattccctgcagatgtgcatcatcacctaatatgcaagggttccacatgcctcaacagctcatgacattcgaaatcaatgtttgagtttgataatgtcttatctaactaattaaaaataattttaacgtgcaaatttcttgtaacatcttaatagcataagaaattaaaatataagtcaatagcaaacagaaatgatacagagaaactgaagcacacagatgaatataaatatcccaataaaacttgttccgggcagcgggctgcaggaatacgttgcaaacgcaagagcaaaacaggatgcaaacgtgggaaaaatgggaaataagtggagttaggacggacaaagactgagaaagaggaagcaatcccctaaaaagcagagaggttcctcagatgaaggagggcaaaacgtcaaccaccacctcagctctgttctctactaatgcccaaatgcaagtgcatggtaggtaaaggtgggttttgctcacaccgttttcttaatttggcaaactacggtcagatccacattagccgttaagtttccagccagcagtccttgagaaattctccaggaaagaagacagccgtgtcgtctagtgacgcgcatgcgcagtctcagcgctgcgcgctccgtgttttatcctacccaggcctggaaggaagtgacgcgaggctgaggggcgggttgcgctgtgcgtccggaagtgtctcgcagatagtaaataatctcggaaaggcgagaaagaagctgtctccatcttgtctgtatccgctgctcttgtgacgttgtggagatggggagcgtcctggggctgtgctccatggcgagctgggtaaggtgctttttgcggcctctggggtgctagtgtgagagaccaaagagaaggcgatccgagccggggctgggtgagcccggcgggaatgtggtgccccacccaacagggagtgccctctctgtccccgttttcttcccgtctcctctcgtcactcagactcagcttcagagctttgggtcttgcgaagaactgatcactggccgtaaggtttagtggcgatgggaagatgactcaaattgaggaagagaactagaatagggcccctcccccacccctgcttcgtgaacgctgtctcccattctttgaggtcccttttcgtggttttgtttgtatctgcgcaggccatctctacaaaggtctttgcccctttccttcggtggggtacccactctgttgtcatctctttcctggcgacctcagactgccgcactgtcgttcctggattcatgtcgccctctttgttcagtggcgcagattatgattaaaaagtgcctgtcgtcatttggaaccgcctggcagtaatgctaatgtagtaatattgtttttgaaacaaatagtcatagctctgccgtaactgtttgaagtgtcaatttcagatttcaacttaaaattgaaatttcagatgacacacgcatgccttgtgcctaatgacaattttgtctttaggcacaaaacatgcgtgtgtcatctgaaatttcatgcttaattagctgtacattgcattttcattaaagagttgttagagtaaaactattttcagtatagtggcaagactttggtccgtgtggcacaaatttcagtttatttaagataatctctgccccctccaaaatagtaggcaaaacattggcagtgcagttaataaagatatttgtaattttaggcgaggtatttggactcaaatcacttttctttagtctggaatttgttaattctgtttctaacaattgcttttctgacttcccaaatgattccgttatatatactcttaaaggttttgatatgtcttgaactaaaaatgttgaattttaatcaaataataatgtggggattgttactccagccagtctgttcttttgattatatggtatttcttcttgcacggaagcctggaatattttatctcaagatattagagagtttaattattgacttttatacaaaagaggcatatttagtgtgataaacagttttgaaaactgataattgattatcatataagattgttttcatcggttttttattggaagatgttatgcaattcaatttgtaatgtcgtatcttgtccagttatgaagtgggcgtgctgtagttttttgtatataatagagatttaaaagatgagatacatgttttcccttttacaaaatagatcgccacctttattgattagaagaatgtccgtgataaaattgaccctgccttttagtttctgtgttaatagcgaagtacattaaaaaggtagaagcagtgaggcagttttttagagatgggggtctaagtgtattggccgggctgaagtgcaggggatggtcgtagtgaactgcagcctggaactgctgggcttaagtgtaacctcagcctcccaggtagctggtactacaggcaggtgctaccgtgctcagtttggaatttattttattgtttgcagtttcagtaatctttttcccttttcttccttgtgcctctgtctctattcattaattgtttgattttactgcaggccaatagtcattgaaggggaccatctcttccacattcttaacagttaatgtgctc

SEQ ID NO: 585611 - DNA, 4001 bp, Homo sapiens
aaatcagtacagaaaaatataacaactgatgactgggaataaggcttacctctgtttttgaaagttgaggatagaacaccaaaatgtaggtttacattcttaaaatctgcaatcgcataataatattgaccgatatttatggtcctacttagccttggttaagaaccctgtacatagcagaccttcaataaatgcccattattaatacaaacaatattctagaggtaaatagcaacttgtgtgagtttacctttagcatgtaagatatggagtcacagttaaaggactggaagaaatggcaggaaggacaactctcatctccactcaaaatcctatttgttcccatatttttgtgttcaggaaatggagggttggcagcaaggaaaatacactttgcatctatcctgtactatgcactttacacaaacatgatcttattccaacagaatgctctgaattatctacattgtctttatgaggaaatcagctaacctcctaagaagaatccaaaccctggtctgactccaaaccctaaattcttcacacttcatcttattgacagagcagaacataaagatagggcttaagaaagactagacgaggcaatggaaactatcaggttggcttcaagcactaacattatctggcctaaaataaaatagaggtgcatatcttgctgaccataattggagacggggaaaggcagccagtgaaagagggaactgttgattgttaggatgcccccaccctgccttttttgtttgttcgttttgagacagagtctctctctgttgctcaggctggagtgtaatggcgcgatctccgctaactgcaacctccgcctctcaggttcaagccattctcctgcctcagccttccgagtagttgggactacagtgcgtcaccatgcccagctaatttttgtacttttagtagagacagggtttcaccatgttggccaggctggtctggaactcctgacctcaaatgatccgcccgcctcgacctcccaaagtgctgggattacaggcgggagccactgcgcctggccaggaagccccttaactccaatttttttttttttttcaaataatcccttcaagttacattaaagaaaatgcattgagtttaatagagagaataaagtacatgtttcggagtcaaattccccccacctcatcccgccccaccaggtttgaatgataaaacatcagaaaacctgctctagaggttcttcataaaaatctctctcacagctgtagattggcacctgcaatcctgtcggagcaatttatgtctttcctcttggtcgccagaacacatgcaagagaggagaacagcccaacacacaccattattccacataagcaaatcacaagagcttgggtggagatgctagtcacctggaaaaacaatccaggaagccctttcaccttgcttgatgatgactaatcaaatgttcacccaggaatgtgctcctttcactcagccaagagatcactctagtcatgtatcaacctcattattttctttttagtacattttaaacattttaagtaatagactgagaaagctcagctatccagggaccagttttctggaactttccaatcctagaattcttcctgactagccaaacaaaaccaaactccaaacctattagcagaattagcccctgcacaggcagcaatacatgagtacaattgaaaagggtcctggacccaaagatcaggatgaccccactctgttatggatgtgtcaattcaaagaggttaataacaatagaccacaggcaattttctgaagaatgaacaaaaatctgttgagaaaagaccacctcaattaaatcttagtgggggatggggaaccgggggaagagccaaatcatgctaccaaggagcattttgtggccgcaatatttcattctatgttttaaagaaaaagagattattacctacaacttcttcaagaaaccaagttctagagcctgtgcggataattagcttcaatctttgtggacacagcacctacatctgcctacatgtgggatgactctgagtcatccagagcaaagttaaactactgtttagttaggccataggccccagttgttcaatcaaacattaatctaggtggtgtggtaaaggaattttgtagatatatgtaacatctataatcagttgatttaagtaaaggagattatcatcaataatctgggtgggtttgactcaatcatcaaaagaacagatgagtgctttccctgatgaagaaaacatgcagcttaagtttcctccaaggaattcccagcttgcagattgccctaaagattttggacttgcccagccagcctccataatcacataaatcaattcttttcaataaatctctctctctccacacacacacacacacacacacacacacacacacacacacaaaccaacatatatgcacacaacatatatatataggtatgtatatacatacatgtacattctccataaattgcacctaaagttatgtcagagcaatttctgtttttctggtggagccctgactgacccatacagatttctgccctaagagtggttccataagaatagaatttttaaggataagctttatgaattggtttggttctgttattcttggaatatgttctctaatgtgattaaatttaaaggtattaaagacaattctcagttgtgaagagggtactggtagtctatggcatgatgtggcaatggagaaacacaaatatcaccactgagtactcataatcaaatatttgtaaaaggcaaggttttaggtgaccatatatttcatgccttagagcattttagccaaactaaagagtatgatgaaattggcaggttgctgccaactgtactatggaaaatggaaagaaaaagataaactcagggcttgaaatttcctgttcaagctctgtataaataacctgaatacttctgtgtctgcccaaaagcaaatccttatctcctataaccacagggctaagatttcaaaaccagactctcacactgtgtgttgctgaattacaacacaaaatgaatttctcctgttaaagtaggaggattgattgagaacaaatgggatcttgaaaattagaatggggacatatgggaaatcccactcaaacttgtgacatcaaatctctaaattctgatgagtttatttgccaatagaaaaatcttttcacccctgtctgaggttaactctgcgttgcctaaagaaccagtaatggctgctcctgaggtaggtgtcttgcaagaccctgttgattctcctcagaacttatccctgacacccctctttgcttctagacttataacaagactcaagtaccagcaggccctaaagattaaggtacaaagtgtagtccacaaggaagtgtgctacataccaaacgaattgcatgagttttccaatttatacaatctggggaatacgtaaatgaatattaagtatgtgggataattgtggaaggaacataaacttgaatcacataaatcatttcctatcaagtgcattcctagagggattatagggattagtgccaccatcaaggacttgaaggatgcaggggtaatgattcccaccacatcttgtttcactcgtctatttggcttgtgtagggccttccaccatagtaaaattcccataaagttgaattaggatgaatttattgatatcatcccactaagcagagattctggattcagtattttagctcaaagggttagaaaaggctctaacagtttggttcgttggctgaaacatggactacaaggcggtctacattaaatgaaatcaaatgccagaattaactgccttgctacactgaagaggaagttatccaaaggctagagagggagatcgaaatagtagaataaatttatcatgtaagacctgctcacataccccaggagagtccttaggacacacatttcatcatgatggtgagaaataaatttgtgagg

SEQ ID NO: 585612 - DNA, 4001 bp, Homo sapiens
aagttgtaaaaaaatgctgtaatgcaaactgcgtaagaatttaaataattgtaagaactgtgaggaaaattaaattgatctatcattgatctaaacaatatgtttgcaatcgactaaaaaggaggaaaaactctttaacaaaaatgaaatttgacacattttaaaatattctgcataatgtggtccattagtctttgatattttattgaagaaagttgtggtaaagataagattgagaagtccattactaaaaacgttttccaaaagatttcctttccaaagctatactttccttcaaaatcgaatcttttgaacttccaaaacacctttttagcaaatgatctcttgagatagtgtcactaggggggcattgaccagcacccggcacactaacaggaaacaaggtttataaactgctgatttaaccaaacttgatccataacctaccccattttccgtgagcattatggtcatcagttctcattttaataatccaaatgctgagctttctaaatataaaatcccaggaggattttttttgaatgtgtggcaatgtcagtaagaaggaaggcatcttgtgaagagataaagtggacagatgaattttgaaatctatctgtacacgaagagaaatgcaatactcgcaatatttctaattcaatacctttcagtatgcaaaccactgataaaagagtttttttaaaattttttttctagatgaacgtttaagtggtcattcgcctcaaatctccactttccagtcctgcacagactccagctaataacactaccacctgcagggtgttttgttgtttgtttgttgtttgttttagtgcttcccacatgcctagttcacgcatgcacttttctaaaggacccgagttccgttggctgcgttccccggggagctctacgaagaccggtctgacctggccctctcagctcccttggaagggacctgctgcaaggcagggtcatttggctccgaaatgcaccttcaggaatttccccaaggggctagcatcagcaccaaccggaacacaggccctccgctccctcagcccgcgaccacctggcactcgtgtccctccctgcggcctgccggggtcctaggagcagggaaaatccaatagctacgggcgacccttgagtttactcggtctacccacctccatattttatccaaagaatggacggaggccagtgaggtgaggtgacttggctaaagccacacagccggacgctggccgagcgggttagtactcgggtctctgctaaccccgcggccgctcgtgactacccggggcttggtaagcaccgcccaggggaaagacttggcattgctggcgcgagagccgaaggactcagcgacttgtgacaggaggtcatcaatggccacctgcagggcagagtgggcaaaaggcaggtgacagacctcccacgtcacgcctgttggcgtgagcgtccttttcactctctaagtaccctgacttgtgagttaaacgatggatcgggtcgcccaagcgaaagaggcatctgcttcgaactccccccatatttgtgccagcagggcagaaaataggaaagttgcacttaccacatcttccctgggtcagtctcccccgacttcccaagtcccactcctccctcctcgcatagggacacccactcacgcgcccgctccaccaggtacgtaccagccgcgcgcagctgcctgccctgccggtgccctggcgctcgcgctcgcccagcgctctgcggcccggagctgcgactcgggctctagctcgctgccgcctctacagtccaccgggatgcggccgcgtctgagctactgggctggggcgcagccaggcggtggcagctactcgggggcggagggagcggccgccgcgtcccgcccccaggctacgagcgcggctccccaggcggtgtcccgctctccgtgcaaaccgggccaccgcatcactccccggggcacgtgccacggtagcttttttctgctggcagcctggggcgagctcttttatcctacttgtgcgttaaccaccaactaattatcggtgatcgtcacacaacccgcgtcctccccgcccgccactcccagttcccttgggcgatgatgaggttctgctaagatttctgtgacgtgactgcgggaatttcaattcccttcctgctttccgacgtcgcatcgtgttttctgtccctccggttgtacgcgccctgagcagggtttgtgctccaggtgtcattaaggttgccctttgatctaatgttggctgtttggagaaggtaggaaggtacacaggcttatctacgccccgaatctgggtcttcgagtttgttaacagattattttaacagattaggaagcaatatgcaatggaaacaactttttgtgcaataaaagcagaaaataatgtatatcaagtttcactttcaggttctcactaagaaaaataaagtcgttactactaaggtctcactgtgctttttaaaagccatattacatggacgacgatactgctgataaaattaatttatctgcttcctgagaaagtggtttctcactgaagtcttaaaatctcctctggtctcctgaaactcttaattagtactcaaagtcttctcttatctctagtctttactaatttgctcattcatactatgctctgacttgccacccaaagcctatgacacctgccaatgaccacttccaaattccctttttaggcaaaagcctaaatatggaaatacgaaaatataatcagactaatattttattcagtgtgtgctaatggtagtacaatcaagttctttaaattattcaatattcatacctccacaatatagtaataattttctctattttcagatagtaaactgaggttcagcaaggttagatactttgaacaaggctaaatagctgagaagattccaaatcagttttgaacttaggtctttctgccttcaggattgattgacttccttaaattatactctgctaataaagctgtgatttttctgaattgtgatgtaggcacattttgttttgtattaggttagtgcaaaagtaattgcaaaaaagtactggcaaaaactgcagtagcttctgcacccgcctaataaaaatatagttacttgtgtggttacacaagcattaatcaaagagactgagagttatttatatcattagtgtaactttaaaacttattatctggcatactgctaaggcctgttattattatattatataataacatatatttttattatctagggcaaattattctaaggtttatttattttagaggtactatgacagagagtgatactaaaatgtttgaacttatgaattatggtatcatgattggatttttatgatcctgcaagtgtatttcctatacttgaaaattttgctttgtaaaatctgtattttgggatcaatgtgagaaaaccactagacctcactgctaagcttttaacctacatatgaaatcatcagaaccactggaatgtatggcccatgaaggccatatcctcaacacctagaatagtaccttcacaaagtaggtactctacaggccgttttgaaatgaataagtattaactttgtttccacacttaagaccaaataatgacttataagaacactatttatagaatgcttttgtctatttagatttaagatttttgatggcctctcatttctactaggaaagtaaggagaagatgcggaaaggtttgcagtagctgcttttgcaaatgttagacacgacctgaccataagtgcaaggaggagtttttgagtccaagaattggtggtagcagtaattccacacaatcatgtgaattgtgaatttgtgtcaaatatatgcctttaaatgcagaaagtttaatccaactttgggattgtgccaagtgatgtgatgaaaagacaaggagcaagcttggatactatttttaagacaaggttttaaggttaacaagaataaata

SEQ ID NO: 585613 - DNA, 4001 bp, Homo sapiens
tctgcctgggtgatggaggctcaccagtgcctcgtgaccagaaggccatctgcttcttcttgatcaggccagtgcttaatgctcagatctctgaattcaatgtaagctcaaggtttcgtgctgagcctcttgggattgccaacacctcaggggatacattttccagctcctacccatataccagtctcccagctcagcattctcatttggatcaaaagtaatttgtgcaagcctgatttgttaacacatcccaaatctgaatccgtgtgccttttaaaggtggcaagctgccatttatgagccatacgcacctctccttcctcatcaccactgcagtaatcccaagaaccacaggcatgaataaaagcccgaacttttcgtttttggtgacagaaatttctcttacaagctccaggagatgatgaggaagacagtgttctctgttttctgattttgcttaattttttaaaaatgagcctctcccttgacttggtgacacagctgtgatcttatctggccggcagggggatgctccaggtaggacaaagagtgctttgttttgttcttacagcagccacgcataactgggctccaaaaacgcaatactcctcaaagggagagtgagagagagggagagagggagaagggtgtgtgagagagagagcggagggagagagagagaggaggcagagtgagaggtgtgtagtggtgtgtgtgtgtgtgagagagagagagagagagagagagagagagagagagagagagagagagagagagagagagagagagagagagagacggagagagagattgtccctgtaggagatctacagataagaaaactccggggcgggcgcggtggctcatgcctgtaatcccagcattttgggaggcggaggcgggcgaatcacgaggtcaggagatcgagaccattgtggcgaacacagcgaaaccccgtctctactaaaaattcaaaaaaattagccgagcgtgatacggcacgccagcagtcccagctactcgggaagttgaggcaggagaattgcttgaacccgggagacagaggttgcagtgagtcgagatcgcgcctctgcactccagcctggcgacaaaatgagactccgcctcaaaagaaagaaagaaggaacgaaagaaagagagagagagagaaaaaaaagaaaagaaaactccatgtgttccctgcctgtcctgattctccccccagctctgagctcttagggttgcttcctttcgggaaaaggtttggaagaactggtgtctaataccgtcatcctctccctctccccgcaaggatcctagcgctgtttccgagggctgcagggactgtgagcccaggaccggccagcagagcgggtgcgactcagcgagcccaccccggccggtcgccgctccggggtcccgacctccagcgcggcgaccgtgcccttcctcccactcccgcctcgcccccggggcccctcctcactcaggcgcggcgcggagctgctcgcgggaactggggtccctgggcgcgttccaccgcgcaccaacgcgacccaagcgctccaaacccgactgcttctcgccgacagcactgcgagcctccgaccagccgctgtccccctggctgcgggccgagcagctctggcaggcggcgggcgggtgggctgcgcgcgggctgtgtcctgggtccgcctagcgcggccttgtggccccgaccctctcctcccctggtgatgctggaggaggtaccggggaggagcgtgtgtggccccggcctctcactagcagcggcggctcccgacgctagcctgctcgagcgcacccagcaccctccccaagaccatggcccgcacctggacccgcggttaacttagcccgccgcggagagagccaggcaatgcctgggtggtgtcgtgctcaccagctcctttccgcagacctgatgccgatcagatttactccctgctgaattcaccccccagtcaggccggttttccttgtttcaccgtgttctctgaatacactgaattactccgagcatctatagttggcaatgccctgcgcattttccgcactccgatacactttacactgaacaccaattcggaagttgtgtggaccgtgctccagattggaaggcctgccactgtgctggtgtcatttctccctggaaatgacaatgaaggacaatcaggaatagcacttaggtctgaggagaaatggagctagaaggagccgtttcatagctcagtgtaacacagagttatttggggtttaactgaaacgccttccttcatcttccaatgttttctcttcaatccactttctaataaattaaaaacacactcatttaaaacttcagctagaaacttagggaaagtagtttgaaatttatgtgtggtgttattaaaattttatatttttaaatcgtgttttggtttttggtgaggtgccagaactggagatgaaattttgcttattttgattttgagtattctgcagtaagatggcctgaattttagcttgtttctcccacttatgagtggtgtgaccttggggaagttcatcatctctgcttctcggtctcctcatccataaaatcaagaaaatcaaaatcagtcagtcagaggcagtttgtgagcacgaaatgcaaatacatgtgaaatgcttgggacagagcttggcctatgggaaacattcattcaatatgtgttatctaatattgatagcttaatgaagcagtgactcatttaaacctaacaatagattttatttttaatttaaatggaactctatccgcctaatgacattgtcttgtacttcctggactaaccccctgtaaaacaaatggcccacaaatatcaatctaaaaggatacattatgccctaccaaagacatctctaacgtcttcttttgaccttaagacaaaggtgaagacaaagttgaagttgaagacctaatcccacactaaaaaggtggtaagctttgagaacagctcctgaaaacaagtatgcaacattttattcacttctctcattgccagcaacatgtcatctcccattgtcattaggtcatattctctgagcagccccacagcagttggcatttggcaggttagtgccctgagaagatgcccagtgaagagtgcccagatttagcaaataaaaatgcagaacatctggtgaaatttgaatgtcagataaacaataaatagttttttagtataaatatgccccatgcaatatttgggacatatactaaaaagttatttgttgtttatctgaaattcagatttaactgggcttcctgtattatatctggcaacccagtaagtaaaattaataaagaatattcctcacattccaagaggataagtcaacacagacatacagattataaggtgtgtctgatatgggttgttttagttttttatgagttggttctttgttattctgtttcctacatttaattcctcctctcatttcccattgacataacagtacctatttcctctttaatatgaatgaaactgatgtctcacctcttcccttcaatcaagatattaaattgtaataatgtgctcaatttctttttcttttcttttctttctttcttttttttttcttttctggagatatggtctcactctgtcactcaggctgaagtgcagtggcatgatcacagctcactgccgcctttacctcccaggctcaagcaatcctcctacctcagcttcccaagtagctaggatcacagacacatatcaccacacctggctaaattttttatttttattttttgtagagacagtgtctcactatgttgcccaggttggtcttgaactcctaggctcaagcgatcttcctgcctcagcctctcaaagtgccagggttacaggtgtgagccactgtgccttgccatgcgctcaacgtttttttttaaatttgaatagtgtttactgaggtgagggccagctgtatgtcaggtaccatttcaa

SEQ ID NO: 585614 - DNA, 4001 bp, Homo sapiens
actcctaatgctgcaactccttcagtcttgctggctgtacagtaggcagtcacagactatggtgccagccttgggtatgaagggcccagttcaatgaagaaagacattgagacatcaccacatggccagcagcagcttctggtgcacaaatatctggggaggggaaagcactttcagtgcccaagtgcaaggagctgaagtaggcctgctggaaaatgccaaggtggtgcgctgtctcaccactttctgcagggccagcagaattcctctgtgagggaatctgcctgggtgatggaggctcaccagtgcctcgtgaccagaaggccatctgcttcttcttgatcaggccagtgcttaatgctcagatctctgaattcaatgtaagctcaaggtttcgtgctgagcctcttgggattgccaacacctcaggggatacattttccagctcctacccatataccagtctcccagctcagcattctcatttggatcaaaagtaatttgtgcaagcctgatttgttaacacatcccaaatctgaatccgtgtgccttttaaaggtggcaagctgccatttatgagccatacgcacctctccttcctcatcaccactgcagtaatcccaagaaccacaggcatgaataaaagcccgaacttttcgtttttggtgacagaaatttctcttacaagctccaggagatgatgaggaagacagtgttctctgttttctgattttgcttaattttttaaaaatgagcctctcccttgacttggtgacacagctgtgatcttatctggccggcagggggatgctccaggtaggacaaagagtgctttgttttgttcttacagcagccacgcataactgggctccaaaaacgcaatactcctcaaagggagagtgagagagagggagagagggagaagggtgtgtgagagagagagcggagggagagagagagaggaggcagagtgagaggtgtgtagtggtgtgtgtgtgtgtgagagagagagagagagagagagagagagagagagagagagagagagagagagagagagagagagagagagagagacggagagagagattgtccctgtaggagatctacagataagaaaactccggggcgggcgcggtggctcatgcctgtaatcccagcattttgggaggcggaggcgggcgaatcacgaggtcaggagatcgagaccattgtggcgaacacagcgaaaccccgtctctactaaaaattcaaaaaaattagccgagcgtgatacggcacgccagcagtcccagctactcgggaagttgaggcaggagaattgcttgaacccgggagacagaggttgcagtgagtcgagatcgcgcctctgcactccagcctggcgacaaaatgagactccgcctcaaaagaaagaaagaaggaacgaaagaaagagagagagagagaaaaaaaagaaaagaaaactccatgtgttccctgcctgtcctgattctccccccagctctgagctcttagggttgcttcctttcgggaaaaggtttggaagaactggtgtctaataccgtcatcctctccctctccccgcaaggatcctagcgctgtttccgagggctgcagggactgtgagcccaggaccggccagcagagcgggtgcgactcagcgagcccaccccggccggtcgccgctccggggtcccgacctccagcgcggcgaccgtgcccttcctcccactcccgcctcgcccccggggcccctcctcactcaggcgcggcgcggagctgctcgcgggaactggggtccctgggcgcgttccaccgcgcaccaacgcgacccaagcgctccaaacccgactgcttctcgccgacagcactgcgagcctccgaccagccgctgtccccctggctgcgggccgagcagctctggcaggcggcgggcgggtgggctgcgcgcgggctgtgtcctgggtccgcctagcgcggccttgtggccccgaccctctcctcccctggtgatgctggaggaggtaccggggaggagcgtgtgtggccccggcctctcactagcagcggcggctcccgacgctagcctgctcgagcgcacccagcaccctccccaagaccatggcccgcacctggacccgcggttaacttagcccgccgcggagagagccaggcaatgcctgggtggtgtcgtgctcaccagctcctttccgcagacctgatgccgatcagatttactccctgctgaattcaccccccagtcaggccggttttccttgtttcaccgtgttctctgaatacactgaattactccgagcatctatagttggcaatgccctgcgcattttccgcactccgatacactttacactgaacaccaattcggaagttgtgtggaccgtgctccagattggaaggcctgccactgtgctggtgtcatttctccctggaaatgacaatgaaggacaatcaggaatagcacttaggtctgaggagaaatggagctagaaggagccgtttcatagctcagtgtaacacagagttatttggggtttaactgaaacgccttccttcatcttccaatgttttctcttcaatccactttctaataaattaaaaacacactcatttaaaacttcagctagaaacttagggaaagtagtttgaaatttatgtgtggtgttattaaaattttatatttttaaatcgtgttttggtttttggtgaggtgccagaactggagatgaaattttgcttattttgattttgagtattctgcagtaagatggcctgaattttagcttgtttctcccacttatgagtggtgtgaccttggggaagttcatcatctctgcttctcggtctcctcatccataaaatcaagaaaatcaaaatcagtcagtcagaggcagtttgtgagcacgaaatgcaaatacatgtgaaatgcttgggacagagcttggcctatgggaaacattcattcaatatgtgttatctaatattgatagcttaatgaagcagtgactcatttaaacctaacaatagattttatttttaatttaaatggaactctatccgcctaatgacattgtcttgtacttcctggactaaccccctgtaaaacaaatggcccacaaatatcaatctaaaaggatacattatgccctaccaaagacatctctaacgtcttcttttgaccttaagacaaaggtgaagacaaagttgaagttgaagacctaatcccacactaaaaaggtggtaagctttgagaacagctcctgaaaacaagtatgcaacattttattcacttctctcattgccagcaacatgtcatctcccattgtcattaggtcatattctctgagcagccccacagcagttggcatttggcaggttagtgccctgagaagatgcccagtgaagagtgcccagatttagcaaataaaaatgcagaacatctggtgaaatttgaatgtcagataaacaataaatagttttttagtataaatatgccccatgcaatatttgggacatatactaaaaagttatttgttgtttatctgaaattcagatttaactgggcttcctgtattatatctggcaacccagtaagtaaaattaataaagaatattcctcacattccaagaggataagtcaacacagacatacagattataaggtgtgtctgatatgggttgttttagttttttatgagttggttctttgttattctgtttcctacatttaattcctcctctcatttcccattgacataacagtacctatttcctctttaatatgaatgaaactgatgtctcacctcttcccttcaatcaagatattaaattgtaataatgtgctcaatttctttttcttttcttttctttctttcttttttttttcttttctggagatatggtctcactctgtcactcaggctgaagtgcagtggcatgatcacagctcactgccgcctttacctcccaggctcaagcaa

SEQ ID NO: 585615 - DNA, 4001 bp, Homo sapiens
ccaaacctagggagctgcccctctctctgggccacgcagcactttgttcattttctaccttagttatcatcgtagccgggttatattgcagcctgttttcacattagtctccccaacttaacagagagggctagggcaaaaaaacagcatttattcatctttatattccaagaatgcccggtacatgaagatccccaacacatgtctgttgaatgatggaacagaaattcacatttagcagaaaaacatgcagccttcagacagaccggggttaccatagggcaggacacattggcgattactggctcttaatttgcttgcaggaaaataatctaaagcctttggttcttgagaagaggaagcagaaatggtgcctttttcaaaccatcctccaccggctggagctggctcacttttcatcctgctgacaattttctgagttacagtttacaccaacgttgtcacagagttgatcacctgaaaaccagccctcctttccttcccgtggcaagggtatcctgccacactcctctcactcagcccaaagatcacttgcagaaccaaagaatgaatttatttgttgcaacctgcaccggaactttgtagtattccaatttctcccctttccacacacttccatacaccctatttcacctctattacaagttctctggggccactttacagatgataaaactgggctgaaaatgtgtttaaggtcacatgagtggaacccagttcttctccttcctgatgcctaactaggcgtccccagccatatccccggggcagcttttacaaaaagtctcacgccagggctttatcccctcacgtgattcaggacatctggggtgggcccaataggtgtgttctgaaaagctctcctggtgcttctgggaggcgcctcgggttaggcagcgacgcacaaaacataaaccctgtcatatcattatttattccgtgaatacatcggagttctgttctttcggtggccacacagatgctcaatgccacgacccttgaataactgccatagttgtcacttcacttggctttttcaataaaatgaacaggtcccgcgctcctagacccatgaacactcgggaagccccaggggtatctctgtcctcgacacagcaggggccctacaaacccaacacggctgtgcacccgccaaagtgcccacgcccaccgtggcggggcgtgtcctgcccgcccccatcaggggagtcctgctctcgaaattatcccgcgcgccgccggtaatccggggtgacgccacggcccaggtctcttttctcccggagtctgcggggacctccccgccgcaactcggtcactttgttcccattaactcagtctctgggagacgggctaagctggcacttgagattctcccgttggggtggttcagcaatgatcaccccgccgtctgcgcagacagccccgcccccagcctcggagagcacaggacccgggaggcggcgacctgcctccgcgcggggacagtggccggcggggcgggcgctaggtggcggctgttcagctcccacgtcacccggcccgccctccgcccagcgcagaagcgaagagctgcagacgacggagaaaagggaagcgcgccccaagccgcacaaaggtggccgccggtgtcccaagcaccgaccgccatccccggcaggacgcaggcaggagcctcggccaggctacctcgcctggcccgcggactccgcgcggcacgtgggcacctgcggcacgggttggagcccccgccccacgcgcccaccttaacgccgcgcccccggctccccgccccgctgccagccagttctctcgctcgcccctgcctcacctgcctttcctacctacccgccgccaagtttcccccgcttggaaagttctggagtccggagcccgtggcccactgggtcagctccggccggcgggtccgggcggccgctgggcgtgcggcgcagctccgactcggcggcgcggaaaaggggaaggggaggaaggggcgggagcctcggcggggcgatccccctccgaccccagccggcccgcggtagccgccttgggaacttctgcgctatgattatccgcccccgcgttggggactttgcctctcttccgcgagactcttgtcatcgccgcccgcggttaagagttggggctccgggtcgggctgcctcagttcagatcttgctcctccacttaggagtgtgtgatctgaggtaacctactctacccctctgcaaaaggagggaaattaataataataataacaataattcctatccaggggcgaatccacgtgttgtggggcttgaaactgaaacaactgtgagtagaggtggcgaatcttcaagggaagtataaaatgagattctgggattagcaagcatctgtgcgcgtgagggggcccgaagcttaagcttcattagcttcacgtctcaaactgcctctgcaatgttcttcatgagattaattaagtgcgagaattaaatgaggtgagccgcgaacggggcctagcatagtgcggggcgcactcagcaggtgttgtttatagggatcatttccctgtaactggccaggtggacttgggagaggaggaaataatgctgattgtcagttatgtgccaggtgttagaatacgtgttaaactcaattcatatgccaacgcgtgcgtaagcaatatgccagttttatagctcagaacaccgaggctcagggagtcacgtaacttgttcatggtttcaccgaaaacccaattctgccacgttgcaaagacccgctttttccacagttccatctcacaaatatgaatatgtaactatgttaccataacttgttgtttgggcaagagaagaaattcccccatgagtgaattgttaatgaattttcagtgcaaaatttccccagctcatgcaacagcaaagaagacttgccctgcatatgaaatacctggaaaatcaacaaatttactgaaatgtgttcaggttacacatttgcttgctctgttaggactatgtgtttagtttttatattggttattaatactactgcacttcagatgaatgagtttataatctatccccaaagggcgtataaacgaagacaacaacataaggaaaggaactttcctgttcaaggcacttcattctttttctcattgaatttcaaaatctctatgctgtagttgtaataccctcaattaactaatgaaaactcaaaagtagattaagttgtctaagttcacacagatagtcaggatttgaacccacctgatttgcctggattctaaatcttagctcttttttctgcactttgggggagaagagaagaaactattttaaatgcatgaagtcaggctgggcgcggtagctcacgcctgtaatcccagtactttgggaggctgaggctggcaagtttgagaccagcctggccaatatggtgaaaccccttctctactaaaaatacaaaaaaatgagctgggcatgctggtgggcacctgtaattccagctactcgggaggctgacgcaggagaattgcttgaacctgggaggcagaggttgcaatgagccgagatagggccattgcactccagcctgggcaacaagagtgagactccatctcacaaaaaataaataaaataaaataaaataaaataaaatacatgaagtcatttatgttttgcaaagtggaagaaaagagtatatcaaaagtaagtcgttattttaagtttctattgcaggagaactaaacagaaagcttagatccacaacttagttatttagggtgaggaagggagagtgcctgctacagtgccaggcacataataggacattcgttgcatgaatgaatgaattcataaaagaattagtgaaattcttttgggtcgttggtagtgcctcttaagtcacagcctttcaatatgtagttcttataaaatgccagtatcgtgaagagattttcccccctctacttttgttctccctct

SEQ ID NO: 585616 - DNA, 4001 bp, Homo sapiens
ttccagcatctctgagcccctgaccctctcctccccactaggagatgaccattagcttgactttttttctttactacttttaatgcctatacatgcatccctaaacaacagctttgctccaccaggttctgaattttacatagaagatatcacacagcattctccggcaactttttttttttttggttcaacactgaaaggcatttgtgttgaaacacaaaaatacttcattggccactgtacagtgtgccctttttatgagtggtgtataatttatctttctccttcaggtaggcatgaaggcggcatccagttttctgccattacagtcaaccttcttgtacacgtctgcttgtggacatgtattaaaatttatctagggcagtggctttcaaacttttttgtccatgactcatactaaggaatgacgttttacatcatgacacacatttgtgtatgtatgaaactgaggagggggagagagattcataaagcgaacacccctatgacctgagagacactgatgttctattctccgtctgtgttttacaaattctgatcatccatttaaatgactttacgacccactaaaatggacttcaaattctgaaaaacattgttcttaaggatgaatacccaggcgtgcaactgctggatcaggaaacacggacatcggacgtcgtcaacttttccagatccttaactgttaaatgttcttatctaagcgcatataaatttaccactatttaacttcagagcgaaaagcgtgaaacatcagagaacattttatcttttccctcggtcattaaacagtattaatcacttaccatgtgctaagtaagcaatctctgagcccagcgagaccggtgggttaatacgcggaggggctgcgggggaggacttaggggaccaggacctcagtgaggccccagaaagcacccgggaggggcctccgatcctgcctgggagggaggggttagaggaggattcctggaagaaggaggacctaagctgggtgtttctatttttgatttttattggtttcctaaaacatgaaagtaacacatttgatgagaaaaaatattcaaaattacaggagtatattcagtaaaaggtagaaatccccattccgccctgaaagttggatgcggagactaacagaagtcgcattatcagctgtcccgatctaggaaatttttaggaccccacgtttttaaatacttttaagagtatgtctgatacagtctgtaatactaaagcatcaaaataatcatattttccataagagacgaaagtgcaaacagttactgtctagtcccattattacttggaacagactttttcttcttttccttgttctgtttttttcctggcccgttggcgaggttagagcgccaggttgtaagaatcgggtctgtggacctcataccagataggcgcgaacgcctctggcagcggcgtccagggggtccggcggcactcgcggtggggctgcctgggttgcgggtgacgatctgcggggtcccgcacccggccccgcggagcccggacccgcacgtaggcggcgcggcaaaggcacaccctcctcgcggccgcgaacccagcgccgtcctcgcagcgcggcaatgcacggccaccgctgcccccagcccgcccgccgcagccgcgagcacccaaacacctaccctgcggggcgacgacccccggagctcaggcgaggccgctcgggcgtgccacctccgcggccatgacggcgacccggggaagcgccccgcgcgccaaggccccgcgctgctgagctgtgagcacggctgccccgtccgtccgtccgtccagcacccgcccggagagtgaggccagagcacgccccagccgtgtctaaatcaaggctcggggcggtaccgacgggctgaatgacaaatggcagatgccgtgggctttgccgcccgcggcagccaagaggatggctgcgccgaggaggccgcgcgcaggcggggctcgggagccggaacggcgcggccgcgaggagggcgctggggcccctggcgggggcgtcacgtggcaggaggaggccccgccggggagctgggggtcggcggccgaggcggggggagctgagcggcacccacacgtcctgcgggccgggtcaccggtgggggcaaagccaaggtcgcccaggtacagcgctggcgcaggtagacccgagccggcctggggtctgcagcggggcctgctagccgaagtctccgccaggatgggccgccagagcccaatcacacatgagaaacgcgacagatgctgggacgctgcaataggccaaactaacttacctcctgtgccagcagcgcccaagtgcagctgcccaaacgtgagcactgaccgtgagccaggcactgtcctaagcactttgcaggtaaatacgtgtaatcctcacagcaacactgggagaaatacccgtctcacagctgaagaaacgaagacgcagaaagggtagacagaagtaattttctaattacggtatcacactacgtctgcttcatataatttcaaatttttcatgttactggaatttaagaaaaataaactgaagggaatctctattgctttcttccctaaaagacgtgctttttaaaaggcctataagcattacgtaaaaagattaagagaggtgtaaggagctcactacatgttcgggtttagaaagtctcatagctctgaaagatgaggttaattagcatcatacacctccacctacctttagggggtaaccctgcctctcaatttccattagttctgttactttcggcttcctagcaatgagaacatttgcaattgctctgcaactttatttttccagatgttgtcttaattctatctttaaatgaatttgatattcactgtaacttatctatccctgaatttttatttttatttagttcttgatggacttccttcattttcaagtcatattcctaaggagggtttatagagtgctgccatgtttgagaagatctggtgtttttctctatacataaataaaaagtgagttgggtaaatattttcaattcacaccttccttcaaaacctaacagaacaagatggcaattgctttatttatttttttattatactttaagttttgggatacatgtgcagaacgggcaggtttgttacataggtatacacatgccatggtggtttgctgcactcatcaacccgtcatctacattaggcatttctcctaatgctatccctaccccactagccccccactccccaacaggccccagtgtgtgatgttcccctccctgagtccatgtgttctcattgttcaactcccacttatgaatgagaacatgcggtgtttagttttctgttcctgtgttagtttgctgagaatgatggtttccagcttcatccatgtccctacaaaggacatgaactcatccttttttatggctgcatagtattccatggtgtatatgtgccacattttcttaatccagtctatcaccaatggccatttgggttgattccaagtctttgctattgtgaatagtgcttcaataaacatacgtgtgcatgtgtctttacagtagaatgatttataattctttgggtatatacccagtaatgagattgctgggtcaaatggtatttctggttctagatccttgaggaattgccacactgtcttccacgatggttgaaccaatttacactcccaccaacagcgtaaaagcgttcctatttctccacatcctctccagcatctgttgtttcctgactttttaatgattatcattctaactggcatgagatgttacctgataagcaacttcagcaaagtctcaggatacaaaatcaatgtgcaaaaatcacaagcattcctataccccaatagtagacaaataagagagccaacacatgagtgaactctgattcacaatggcgacaaagagaataaaatacctaggaatacaacttacaagagatgtgaa

SEQ ID NO: 585617 - DNA, 4001 bp, Homo sapiens
caaacctagggagctgcccctctctctgggccacgcagcactttgttcattttctaccttagttatcatcgtagccgggttatattgcagcctgttttcacattagtctccccaacttaacagagagggctagggcaaaaaaacagcatttattcatctttatattccaagaatgcccggtacatgaagatccccaacacatgtctgttgaatgatggaacagaaattcacatttagcagaaaaacatgcagccttcagacagaccggggttaccatagggcaggacacattggcgattactggctcttaatttgcttgcaggaaaataatctaaagcctttggttcttgagaagaggaagcagaaatggtgcctttttcaaaccatcctccaccggctggagctggctcacttttcatcctgctgacaattttctgagttacagtttacaccaacgttgtcacagagttgatcacctgaaaaccagccctcctttccttcccgtggcaagggtatcctgccacactcctctcactcagcccaaagatcacttgcagaaccaaagaatgaatttatttgttgcaacctgcaccggaactttgtagtattccaatttctcccctttccacacacttccatacaccctatttcacctctattacaagttctctggggccactttacagatgataaaactgggctgaaaatgtgtttaaggtcacatgagtggaacccagttcttctccttcctgatgcctaactaggcgtccccagccatatccccggggcagcttttacaaaaagtctcacgccagggctttatcccctcacgtgattcaggacatctggggtgggcccaataggtgtgttctgaaaagctctcctggtgcttctgggaggcgcctcgggttaggcagcgacgcacaaaacataaaccctgtcatatcattatttattccgtgaatacatcggagttctgttctttcggtggccacacagatgctcaatgccacgacccttgaataactgccatagttgtcacttcacttggctttttcaataaaatgaacaggtcccgcgctcctagacccatgaacactcgggaagccccaggggtatctctgtcctcgacacagcaggggccctacaaacccaacacggctgtgcacccgccaaagtgcccacgcccaccgtggcggggcgtgtcctgcccgcccccatcaggggagtcctgctctcgaaattatcccgcgcgccgccggtaatccggggtgacgccacggcccaggtctcttttctcccggagtctgcggggacctccccgccgcaactcggtcactttgttcccattaactcagtctctgggagacgggctaagctggcacttgagattctcccgttggggtggttcagcaatgatcaccccgccgtctgcgcagacagccccgcccccagcctcggagagcacaggacccgggaggcggcgacctgcctccgcgcggggacagtggccggcggggcgggcgctaggtggcggctgttcagctcccacgtcacccggcccgccctccgcccagcgcagaagcgaagagctgcagacgacggagaaaagggaagcgcgccccaagccgcacaaaggtggccgccggtgtcccaagcaccgaccgccatccccggcaggacgcaggcaggagcctcggccaggctacctcgcctggcccgcggactccgcgcggcacgtgggcacctgcggcacgggttggagcccccgccccacgcgcccaccttaacgccgcgcccccggctccccgccccgctgccagccagttctctcgctcgcccctgcctcacctgcctttcctacctacccgccgccaagtttcccccgcttggaaagttctggagtccggagcccgtggcccactgggtcagctccggccggcgggtccgggcggccgctgggcgtgcggcgcagctccgactcggcggcgcggaaaaggggaaggggaggaaggggcgggagcctcggcggggcgatccccctccgaccccagccggcccgcggtagccgccttgggaacttctgcgctatgattatccgcccccgcgttggggactttgcctctcttccgcgagactcttgtcatcgccgcccgcggttaagagttggggctccgggtcgggctgcctcagttcagatcttgctcctccacttaggagtgtgtgatctgaggtaacctactctacccctctgcaaaaggagggaaattaataataataataacaataattcctatccaggggcgaatccacgtgttgtggggcttgaaactgaaacaactgtgagtagaggtggcgaatcttcaagggaagtataaaatgagattctgggattagcaagcatctgtgcgcgtgagggggcccgaagcttaagcttcattagcttcacgtctcaaactgcctctgcaatgttcttcatgagattaattaagtgcgagaattaaatgaggtgagccgcgaacggggcctagcatagtgcggggcgcactcagcaggtgttgtttatagggatcatttccctgtaactggccaggtggacttgggagaggaggaaataatgctgattgtcagttatgtgccaggtgttagaatacgtgttaaactcaattcatatgccaacgcgtgcgtaagcaatatgccagttttatagctcagaacaccgaggctcagggagtcacgtaacttgttcatggtttcaccgaaaacccaattctgccacgttgcaaagacccgctttttccacagttccatctcacaaatatgaatatgtaactatgttaccataacttgttgtttgggcaagagaagaaattcccccatgagtgaattgttaatgaattttcagtgcaaaatttccccagctcatgcaacagcaaagaagacttgccctgcatatgaaatacctggaaaatcaacaaatttactgaaatgtgttcaggttacacatttgcttgctctgttaggactatgtgtttagtttttatattggttattaatactactgcacttcagatgaatgagtttataatctatccccaaagggcgtataaacgaagacaacaacataaggaaaggaactttcctgttcaaggcacttcattctttttctcattgaatttcaaaatctctatgctgtagttgtaataccctcaattaactaatgaaaactcaaaagtagattaagttgtctaagttcacacagatagtcaggatttgaacccacctgatttgcctggattctaaatcttagctcttttttctgcactttgggggagaagagaagaaactattttaaatgcatgaagtcaggctgggcgcggtagctcacgcctgtaatcccagtactttgggaggctgaggctggcaagtttgagaccagcctggccaatatggtgaaaccccttctctactaaaaatacaaaaaaatgagctgggcatgctggtgggcacctgtaattccagctactcgggaggctgacgcaggagaattgcttgaacctgggaggcagaggttgcaatgagccgagatagggccattgcactccagcctgggcaacaagagtgagactccatctcacaaaaaataaataaaataaaataaaataaaataaaatacatgaagtcatttatgttttgcaaagtggaagaaaagagtatatcaaaagtaagtcgttattttaagtttctattgcaggagaactaaacagaaagcttagatccacaacttagttatttagggtgaggaagggagagtgcctgctacagtgccaggcacataataggacattcgttgcatgaatgaatgaattcataaaagaattagtgaaattcttttgggtcgttggtagtgcctcttaagtcacagcctttcaatatgtagttcttataaaatgccagtatcgtgaagagattttcccccctctacttttgttctccctctt

SEQ ID NO: 585618 - DNA, 4001 bp, Homo sapiens
tgagcccctgaccctctcctccccactaggagatgaccattagcttgactttttttctttactacttttaatgcctatacatgcatccctaaacaacagctttgctccaccaggttctgaattttacatagaagatatcacacagcattctccggcaactttttttttttttggttcaacactgaaaggcatttgtgttgaaacacaaaaatacttcattggccactgtacagtgtgccctttttatgagtggtgtataatttatctttctccttcaggtaggcatgaaggcggcatccagttttctgccattacagtcaaccttcttgtacacgtctgcttgtggacatgtattaaaatttatctagggcagtggctttcaaacttttttgtccatgactcatactaaggaatgacgttttacatcatgacacacatttgtgtatgtatgaaactgaggagggggagagagattcataaagcgaacacccctatgacctgagagacactgatgttctattctccgtctgtgttttacaaattctgatcatccatttaaatgactttacgacccactaaaatggacttcaaattctgaaaaacattgttcttaaggatgaatacccaggcgtgcaactgctggatcaggaaacacggacatcggacgtcgtcaacttttccagatccttaactgttaaatgttcttatctaagcgcatataaatttaccactatttaacttcagagcgaaaagcgtgaaacatcagagaacattttatcttttccctcggtcattaaacagtattaatcacttaccatgtgctaagtaagcaatctctgagcccagcgagaccggtgggttaatacgcggaggggctgcgggggaggacttaggggaccaggacctcagtgaggccccagaaagcacccgggaggggcctccgatcctgcctgggagggaggggttagaggaggattcctggaagaaggaggacctaagctgggtgtttctatttttgatttttattggtttcctaaaacatgaaagtaacacatttgatgagaaaaaatattcaaaattacaggagtatattcagtaaaaggtagaaatccccattccgccctgaaagttggatgcggagactaacagaagtcgcattatcagctgtcccgatctaggaaatttttaggaccccacgtttttaaatacttttaagagtatgtctgatacagtctgtaatactaaagcatcaaaataatcatattttccataagagacgaaagtgcaaacagttactgtctagtcccattattacttggaacagactttttcttcttttccttgttctgtttttttcctggcccgttggcgaggttagagcgccaggttgtaagaatcgggtctgtggacctcataccagataggcgcgaacgcctctggcagcggcgtccagggggtccggcggcactcgcggtggggctgcctgggttgcgggtgacgatctgcggggtcccgcacccggccccgcggagcccggacccgcacgtaggcggcgcggcaaaggcacaccctcctcgcggccgcgaacccagcgccgtcctcgcagcgcggcaatgcacggccaccgctgcccccagcccgcccgccgcagccgcgagcacccaaacacctaccctgcggggcgacgacccccggagctcaggcgaggccgctcgggcgtgccacctccgcggccatgacggcgacccggggaagcgccccgcgcgccaaggccccgcgctgctgagctgtgagcacggctgccccgtccgtccgtccgtccagcacccgcccggagagtgaggccagagcacgccccagccgtgtctaaatcaaggctcggggcggtaccgacgggctgaatgacaaatggcagatgccgtgggctttgccgcccgcggcagccaagaggatggctgcgccgaggaggccgcgcgcaggcggggctcgggagccggaacggcgcggccgcgaggagggcgctggggcccctggcgggggcgtcacgtggcaggaggaggccccgccggggagctgggggtcggcggccgaggcggggggagctgagcggcacccacacgtcctgcgggccgggtcaccggtgggggcaaagccaaggtcgcccaggtacagcgctggcgcaggtagacccgagccggcctggggtctgcagcggggcctgctagccgaagtctccgccaggatgggccgccagagcccaatcacacatgagaaacgcgacagatgctgggacgctgcaataggccaaactaacttacctcctgtgccagcagcgcccaagtgcagctgcccaaacgtgagcactgaccgtgagccaggcactgtcctaagcactttgcaggtaaatacgtgtaatcctcacagcaacactgggagaaatacccgtctcacagctgaagaaacgaagacgcagaaagggtagacagaagtaattttctaattacggtatcacactacgtctgcttcatataatttcaaatttttcatgttactggaatttaagaaaaataaactgaagggaatctctattgctttcttccctaaaagacgtgctttttaaaaggcctataagcattacgtaaaaagattaagagaggtgtaaggagctcactacatgttcgggtttagaaagtctcatagctctgaaagatgaggttaattagcatcatacacctccacctacctttagggggtaaccctgcctctcaatttccattagttctgttactttcggcttcctagcaatgagaacatttgcaattgctctgcaactttatttttccagatgttgtcttaattctatctttaaatgaatttgatattcactgtaacttatctatccctgaatttttatttttatttagttcttgatggacttccttcattttcaagtcatattcctaaggagggtttatagagtgctgccatgtttgagaagatctggtgtttttctctatacataaataaaaagtgagttgggtaaatattttcaattcacaccttccttcaaaacctaacagaacaagatggcaattgctttatttatttttttattatactttaagttttgggatacatgtgcagaacgggcaggtttgttacataggtatacacatgccatggtggtttgctgcactcatcaacccgtcatctacattaggcatttctcctaatgctatccctaccccactagccccccactccccaacaggccccagtgtgtgatgttcccctccctgagtccatgtgttctcattgttcaactcccacttatgaatgagaacatgcggtgtttagttttctgttcctgtgttagtttgctgagaatgatggtttccagcttcatccatgtccctacaaaggacatgaactcatccttttttatggctgcatagtattccatggtgtatatgtgccacattttcttaatccagtctatcaccaatggccatttgggttgattccaagtctttgctattgtgaatagtgcttcaataaacatacgtgtgcatgtgtctttacagtagaatgatttataattctttgggtatatacccagtaatgagattgctgggtcaaatggtatttctggttctagatccttgaggaattgccacactgtcttccacgatggttgaaccaatttacactcccaccaacagcgtaaaagcgttcctatttctccacatcctctccagcatctgttgtttcctgactttttaatgattatcattctaactggcatgagatgttacctgataagcaacttcagcaaagtctcaggatacaaaatcaatgtgcaaaaatcacaagcattcctataccccaatagtagacaaataagagagccaacacatgagtgaactctgattcacaatggcgacaaagagaataaaatacctaggaatacaacttacaagagatgtgaaggacctcttcaa

SEQ ID NO: 585619 - DNA, 4001 bp, Homo sapiens
agagtaggggaagcaggaaaatgccaccaaggacgagcagaatcggggcagttatctggcatctgattgccaggtaactgtttctcactttgctttgccctttagcagaggacttggggggctgctacacaaggatggggaaggtcgtgcagccattgctgttgactgtggactgctactgatgacctatttgaggatgaagccagggaggtgggagcactctgaagaaaaaagtttctttagtcaggtggtttggtggcttagaattgggacctcaaatgagacaaaaagtcaagtcaggaattgggaagccagactcaaaatgctgagagagtcaaacatcaacccgttacttttctctctgtcttaaatattgtagaccaaattacagggggtaggggtttgggagggggatgaggaatgagcaggaggccgtagaagctatctggttcgtgtgcactgctttataagggaggcagccaagacgaccagaggcaagtatcttgcccagggtcccacagggcaaaattaaagttcgaaaattttctgatctcctgaaatgatgggcttggaaatgtttttaacagcaatttaatcaaaatccaaaatctctacattttttagaagtatgctgtctacagaatctgagaatccagaagatgccggttttaacacctggttgttattgtaccgcattacaggacctacccaagcccggaattctgttagatgacaaactggaccctagagttaacattctagtctttcccccggtctaaatacaaaacacaatatagttctgtatccaatctgttcaaaactcctaaaccaactctcagtctgagatggtcctcgcggggtgatacctgccccaaacacccacactcggtgatttcgaaaatacgtgcagtagcctcggccacctgcgggtggtacaaagggcgccttgaggaccagagctggatgaaacgccggcttacaaaccccgctccgccagcacattcaagtcaaggatccagctcattgtttccgaggagcggaatgaattgaccagccgagcgccgttctcccagttagagcgttcccaagcttccggcttcggaacggggctcaccgcgaggacacaaaaggggcgagctcgggcatcactgcggttccccgccgcccgccgaggccagaacgctcgcagagtcgcggccgcccaggtgttaccgtttaccccgtgacggaagagccacaggctcttgactccccaccccctgaaaagcgcatctgcagaacgggggcgcccccaagccctgagcgccgcagcagctcggccgccgcccccaccgcgcgtccccgggtcctcgggctcccggcttcgctgctggggagctgacccagctgactggctgtggggtcccgttctggggctgtcctgctgagtcgggggtggggaagcggtggctacaactcccgggtgctcgcagaaactcctctgcgcgctgatgttgcagccgctggggcgaggggcgggagcaccgggaacttgggggcgcggaaccccaagcggggcggcggcgggcagcatccccgacccgactccgacccccgagacgcggcgccccccagcgccctccgtccccaccgcgcggtgcccccggcgccctctgtccccaccgctcggcgccccccaaggccctccgtccccactgcggaggggcgcgcagggggccggcggggcccgggtaccacgctccgcccggccccacctgcggatgtggggctcccgccggaggtccccgggtcccccctcccatccctggaaaagtccccagggcgtccgggcccgaccggcgcttacccggggagggacggcttcgcatgcccgggcggcgctcgcaggtcgggcggggagggtgcgggctgcgctgcgccggctcgggctgccggagcgccctgcagccgccgtcgggctcgggctcgggctcaggctcgggctccgacttcctcttcctcgggctcggccccactgctcggccgcgccccggcccgcccctccccgcgcccagacgccagcttcggcggccggagcagtggatcgctcgtcccgcctcccctctgccctgagggtgaaaaaggtggagaggaggggggcgaagagaaagagaaattaggcacttggccttgtctctggagccttgccaaagagaacagtcaaattacagcttcggggggaataaagttttttttttttttaattctgctactgttttcgcagacacatcactttttttcattttcctagctcttcaggtttagctttcctttggacgtaataatttcctatgtgagtcctttaaaataatacccaaaatcatggttttagtgaacattctagttttacatagaagctttgccggtaatcaagtgaaaagagggggaagcccggtgttcttcaggcgtcattaccctaatcacctcggttaaagcaccaaacgacctttgcctagagaaagtaaaagtggaaacggaggtaaagaataaccggtgacagccagagagatgtttaaaggcaccggctctgcagtaaagttatgactccaatcaaaggtgcctgcagcgacagttaaaggcatgtgaagtcatttcttaacactaatctcccgccaaagtcggacgtatcagggtcgcctgtggacccccttaggtttggtggtggatttgattgcactcttagttgttaacagaccttcagccttaccacttgctagctgtgtggccttgagagaacgctttaacctctctgtgttctgtctgtttcctcatctgtaaaatggagatgatgatgatgatgatgatgatagtgcctacctcatagagttgctgtatgtgatttaaataagagaatgtgcgtgaagggcttaggagactgtctggcacatgctctacagcctgaataaatgttagctattcttgttgatttttgccttttatctgcttttatgcatatacatgattatggaaattatcataaagactgggaacaaaacaaggtttgtgcagtaaggctacacagcatcacagttctctaccacgtggagtttatgttctgttttataatttgagtctccacaactgacttgtattacctaaaactatgggactgggttatgcttggaatacatttaccacggtagatttgcaatgggactaaaacagacatttgccatcttcaaagcattgtttcagttggccttgcgataaccttgtgaggttgacaggacaggtgctagtcgcctttcacagacaggaaactgagcttaattaagaccctgcccagcttctggagctcacacaaaatcatgcctgttaccccatctctctatgttgtgatttgtgttagaagtgtgcagtatgtttgtgaaatagtaccacattaatggtttccatcaaccctgtgaggtaggtgccagcctttatttgacactcaaagcatctaggattcaaagaagctcattgatgagtgtgtctgtggctgagagataagggtttccgacaacttggaaaggaagggaggagaattggggattcctgttctctgctgtctcctcttttattgattgattgattgagacgggatctcgctctgttacccaggctggagtgcggtggcaccaatcatagctcattgtagcctggaactcctgggctcaagaaatcctctggcctcagcctcctgggttgctggaactacaggtatgcaccaccatgccgggcttacttaccattttttttttgtagagaccggggtcacgctatgttacccaggctggcctcgaacttctggcctcaggcaatcctccagcctctgcctcccaaaacactgggattacaggagtgagccaccatgcctggcctcagttatgcatttcttagcacaagtgcttcgaatgaagctgtggatgaagcactatgatctgatgaaaagactggatcagctgcagatgctgctgctc

SEQ ID NO: 585620 - DNA, 4001 bp, Homo sapiens
aggatttgatagggcttatttgctggcaaggaaacatcaaacaaatcttttagtggaaaaatacatttatattataggcaaaatgcagatgtatattgctactgatgcaaatgtattttattaatggtgtgagaatttcttcctcactgtggtgtgtgaatgtgtatgcatatttgcatgtgtaaaagacttaatttgtgaaatggaagatgtttctccacttcccactaagcatggctgtaaaagaaacttttccctctccccgggcattgcagcacactggaaagatgatacatccacagaaaacctggctttccaaaagagcttatgagagaatgtgcccaccaggtgggttaaaacatatgttaatcctgtggcagagaagtttgatctagcctttgggtgtagcccactgaataagttcatagtgatctatgtcctagtttccatgcattgaaatataatattcataccccccaacatacaccaatttcttacaaaaatttctttaattttctcctgctctgtattttctttgatagctccttgaatggcttccactaaattcaaatgtatttgactctaaagtgcaacttgtaaaattttatctggtaatttatagattgaatttcaagcgtacattatttacatgaagaactactagcaaatcgtatgattccgtttgtatgaaatgttcaaaatggcaaagatataaatacagaaagtagattagtggttgccagaagctgcagattgggggtaacagctaaggagagtggagtgcgtttttgggggtatgaatagttttaaaatttattctgatggtggctgcacaactctcaatatcttgaaatccattggattgtatgcctaaatgggtgaattctatatgttaattatatctcaataaagcttttttttttttaaagaaaaagaagtactaggacatgtttagaatattctttcaaaggcttaaacaaagctgaaaagtgagaagagccctagattccttctgggaaacctggcttaaatccagttttctttatttcccagatctgagaatttggtcactgagcaaataacatgatattcctaagtctgatttctttgtttataaaatgaggatgaatatgctaccctacctataccacgagctaaataagctagtatttgtaaaggatacacactcacactcacattcacacacaggtatgtatgtatgtgtaaaaatgtagggacctaacccaagcaactgagtatttgttgatcactatctgcacacagcatctggcaaatggatgcgtgtgatttttccggggataagaggcaaacgtatactgatggaaagccttcctcaggccataacaaagggagaaatgctgagtccccgaccctgccgccaccatgaactggtgagagaacggaatatattcaaagagatatttcactgttttaacttgcaagtgaggggagcatgacaccgtaacagagatgatataaattagtcaaactgagaaccaggcaaagagcttagccgtcctttgcataattagctacattggctctttttcaattagactggccattatgtgggtgcactcatttagatttgaaaaatcacccattattttctctgcccattcattccagcaccctgacaatcttcacaggaaacttaaacttatttcttgaagaattcctcaatcttatacaagattttcaactggaagtttcatgaatcaaaaattaaatgaattgcacataaagccatggcatatgtatttttactacattgtgggagaaaaaataattcttataatttaaaaaaactatgtcttacctgatttcagaaataaaagaagtagaagaaccacttccttatgttccattttgggactggccagcagtgcccagaaagtgggtcccaatcccaggatgttgttgacttacatgagagtaaacgcatccacaaaccagatagtcaaattaagttaatgattctctcagagacccatgccactggctcagcagggttcaaacattaccttgaataaagagtccttacaacatgtttgagggtggaatctgcaatagatgctgggaagtggtgaaagcaatctcccccctcggctgctccacgctgccgtcatgtctccttattccttccctcacccttgtactttatctctcgcaattagtcttatttcctcccctcttctcttattccctttcttttggagaaaatgaaatcataaaagtatctcacatttgctggaaccttccatgacgagaccctctgccaagcgctgcacgtccatagcctccctcaagcttcccaacaggcagggctgttctcattcctgctgtacgagggatggggctgaggccttccccaaggttgtgtctctacccaggggtgcagctgatagacaaaaccccttcaggtcttagatgacaaacttaagttaggtgtaaacgttaatatctctacatcctacaccaaatgacatagaaattacgacataagtgaaagtatcttattatcttcaaaatttatttattcccagtgaactcacatgttttctgtaattataaattatgttataagacatcaatctttcccccaaatgaacgtatgccatattattatattctcattctcatgaaataaagcaagactggtagcattaagtggaaagcgtctatctcaattttaaatgttgaatctgtacttttccctggcttaagtctagagcaaccaggtagtatatatgctgtaaaacttctattttagtgttcaaagatatttaggaataaatcaattgacctctctattttagatgtgaaataaggaccagaaagcattgttcctctttccaggcagtgaaattcctgcctattcattaactggcaaaagagtagaggtgggagcccaatggtcttgggtggaatgtcctgcggaattccctgggattgaggaaccatgcagaaccctcaagaagaagccacactgggcaacaagagggtggccccatgtgagggacagggggaccgaatcgcttttcctgatttcctattttagcctcactctcttctctcctcaaattcttaccactccctttatcctctctgactcacctcatggcccagttcattaaaggggacagaaggtggaggcagattgagaaaccagcagtgggcagacattttatttttaatgtgaaatgtctcttagggggctcatgttgatgtgcttgagaaagtactctgggaaaaaaaaatactctactaatatataatgcttccagcatgtatttatttccacttaaaatattattgtagcagttcctcttggataaggcaccttgggaatgatgttatcagaaattctacatccacataattttcttttcctgttgttttggttttgacttgggtggtgttggtatagcttttgcccacctttcccctggtagttgttggatgcattaaattctacaaatgtgattttataaattagttgccctcctaatggcctcctggctgtacattcttccctaccttcataatccatcagcatcgtgaaagcacagagggacgttgagcagagctctgtgctggcgccaccgcactctgtagcctgtaagagagcagcaaagaggaatgtgttgctcaggtatagacgggggtgggtgcatagagacttccgctgcggcatggcccttcatgtccagggtaggcatgaagcaatggactattccaggttgtgcataggaaaccacacagcactcttggagggatttttgctctaaagacaactaattcaaaataaggcgctttctacctgaaagaacagcatgaactaagaaaagagatatatagagagatctctgtgtactatgatcaggttgcacatattctgggatttatgtattcttattagttcaattccttatttattgaccacttactgtttacaatattgtattagattcttttag

SEQ ID NO: 585621 - DNA, 4001 bp, Homo sapiens
tcttaatctcactaattaaagatatgattatatacccaaatgtgatcattttcctttatgcctactaaaatacaaataaaatggatttgatatttgagttttaggaaatgatagtgctgtcacgccttttagtaaagcaagtactctggctctttcatgcgtttttaaaacttaatgcttcttaatttaaacatctttcatattttttccatttgatttcatctaacactttttttagcacttactttgaaaccacatgtcttcataaacaaagataatacttaacttgcaccttaaggtatagatgaactagttgggacacaatgtatggtactaccacattatatttgaaattttagcagtctctgtaactgtaatttctgttaactgagacatactagtgagctaagggtaagtttaatataatttctgctctatccagaagtatgtgtactttttagagtaatatgtgatatagcaaaattctgatacaataaaataactcgtgaacacccaatttgaagtgtgagaatgtaatttgatagatatttgaataaaaatgcacaaataacataagacacctacactgaatgacttttatgtactatcaaaggaaaaatatgagtatagagatatggagacacaattaggatacctcagtggtagacaaaaattatgtttttttatgtcttaaggaaagctgcttacagagttacaaagttcttatttgtagtgagcaatagaattaacatttgtcataggaattgagaattttagagataaattttattttaacatatatatgaaatatgaaaatcaaaataaataaaatatatgtaattttctgtatgccctgacagagatctaagaatgaggaaacgtttcatttactaaattgaggattgtaacataaagaatagggtagaattcaaacagaagtcataaaattgattgtggcatctccattcctggcatttattttattttttcctttctttctaaatccgagagaggaaatggagtaccactggaggataataacttgacaaaactataggcattaataggcagaaatccatttaatcaaatttgtgtgaaaataagatagttaagaatattcgtgtgtcaaaataactttttaaagtatcaaattattctctaacgtcagattttttgtgtttgtgaacattgttttaaaatttctaaacttctttatgatacaatattgaatttaatatcagtaactcaatttattaatagcatggaatttttttagaaatgtttgttaaaagttgactggactttagaggggaaacatcctcaagggcactttaaaagtagcttgtattatatattctgaaactccatttcattattcactgtatgaaattatgataatattggaataggcatgctgataatgtgcatgttgtagtcaaatgactattcatattagttcagatgtaaatagctcagttctgcactgtttctcagcagagcaataaataacaaaattaagtcattgtttttgcatggagaaattaaccactactaccaaatatggtaacataattggaagattttttaattggcagaaattcacatttgaaaagcaaaataaaagtgaaagataaatttaaatgacaaaccagtaaccaggatcaaagatgaatatgacctttttcatttcaaagttgtctcatttttcctgtcactaaatggataagcatttataaatttaagcactttgtcatgtcattttattgcctaagattgaactgatattcataaaattaactcattttaaaagttcagattatagaaattataggaattaagaattatagaaagtaagaattaccaaagtcagcgaaatctgtttcttaccttggcagctgtgatcatcacagtatagagtattgtgttgtatgaagtcttacgggtgtttagctggggagttttctgactctgtcacccagtttatgggaacagttgcagtaggtggaggagaaaaagtgttctagggaggtcttatgatgtcacataggaattctgaagtttcgattggttagccacagtctcagtcttatcacaaccaaactttagaacttcttactttaggtatggaaaagtcattaacactttgtgcttcatcttttgtttttaatttaaaacagtatatggtagataaatgaaaaaaataagtaaacttgaggtggtggaaagcttttgttaaagattcatgcatcttcaggcttagagataattgaatattaatggtgaagatgttgaagagctaaaatagttactgcaggaattttaattatgagaaaaataaacacaggtataagcaaaacaactttcattgaattcttgctgctgttgctttaatacgtgtcttcataatgttagcttttagtgaaagtgaaatatttttacacaataaaattttatacctgttttcttattttgttcttgttcttgtgtgtatgggagaaggagtatgagaaaatcaggctaattgctttttgttttaaaaaattatttttatcttacagttaaagaactaataaatgtatttaattcatttgtgttttcttcaattagcagtttaacaatatatttgtgaatagtaatacttatatttaaactgatacatacaacacccccaaaatagcaatatgctactttaagtatttaagattttttaaaaacaattgcattaaattattacacaatcttaccaaatttttaataaactgatgcagtattaagggcaactttatggcaaaaaagaaataattacagattccaaatcagttacatctcagttaatgaggctttataggtttgatgtgttgaaatttaagttttgtaatgtttttgaaaggatgtgcctcatttaatctagcagttgctttcctgaaaattactataaaaatgagatgctagtaagtgagatgatattttgaacttcctagaacagtttatcttacagtagaactggggaaataatttttttgtaaagccgggcatcattctcctcttctctgtttatctaatttgttgtcttagatgttagatttacttaagtcaccacactcgaaaatattaattcttaaatctcttctttaattttagaggaggtacttgtaatttttaattttttaaatgcttatgacagagtgaacttagcccacttcactttcttatgggtaactaaaatgtgtagcagcagctgcttacatgcccttaaatggaaatgatcttggcttcttccaaagaaagaaaatccatctctagagcaaatcatttgatatttaaagagtcagcttaaaactaactgaaaaataatattttagcaaagatatcctgtgaacattgccaagggaaaatttacaacttaaaagtaaaacccaagttaaggaaattgcagaataatgtttgatacttttctcagtgctacaaccatttttctttcaatccttacataatgaggatctctcagtactatcagttaccaatgatgattgataatacaaaaccgagaagcctaacgaggtttacagtaatttgtcagagataaccagctgctaaagaatagacaggattcaaatccagatctgtctgtttataattcctaatctgttggcatgctgtgggaaaaaattataatttgaatatagctttcattagagtagcatatagtaactgagaaatttttaagatgtaaatagatgcattcttgagcactgttaatagttttagaaagtctgctttaagtttgtctaccagttacacattcatttgaaatttaggtgatagatcattgttctgagaacttctcattctaagaaaatagaattagtaatacttagttggataaaccaagaagctgccgtagacagaataaaatatgccctagttaccacatgtttataagtttacttaaaaagtatacataggcatatacacaccttagaaggatactaacaactgtg

SEQ ID NO: 585622 - DNA, 4001 bp, Homo sapiens
cgagataggaccactgcactcggcctgggcgacagaatgagactgtctcaaaaaaaaaaaaaaaaaaaaaagagtgtacatttctcaaagtttagcttttttttggcggttctacagtgctcaaactctgacatgaagccgccgctctttttttttttaagaggaggcctcgctctgttgcccaggatggagtgcagtggcgcgatgtcggctcactgcaacctctgcctcctgggttcaagcgattctcctgcctcagcctcccgagtagctgggattacaggcgtgagccaccacgcccagctaatttttttttttttaatatattttagtagagacagaggtttcaccatgttggccaggcgggtctcgaactccagacctcaactgatctgcccaccgctcttcattcttgacccttaactcattaaatacgatatgtctctcgctgactactcagaacctttaaaaacgtggttgaagcgaaatctctccagtgtttgtgacatggcaaagcatgcttcccccaacccaaacaaaaacctaacaaatgcaaaaacgagcctccagagacagaaaaaagaaggcagctaaagtgaaaaagccacaaaagatgtagtgttaggataaaagaggaaggttactgacactgggggaaatgaactaaagagtatgaaaataaaacatttgttttccccttaactgaatgacgattgaatcttagctcatagtgtagaatataccatctggaaaagcagagtaaaacaggattaaacttgccctacgacaaacataaacgacatttccctgtttaaagagtcgaggtatttcttaaaatcataaaacaaaaaaattaagacttaaggatgaactcatctatgtataatgctcattcacttcccctttatttgtatacttctaggggtctggtggttctagcgactgaaaattcctatccaaataccaatgacttgaatcacattttctaggactgccacaaacaaaagatttatttggagacgaataaaaaggggccgtaggattacctacaagaagttatttcctcctgagattgatggcacaaccttgtcagcaaattgctgttgcctctctcagttaccaaaaataacccgtaacaaacaccaggcttgggtgtaagttctttcctaagggaacaactcagcagagctgtttataactagagaggaggaaacaataatctgcaagatgtcgccaggtcggcaacgcgaactgactttgactgggggttcagctctgctcctgcgccgaggcgaggaccgcaggtttagcgcggtcccacacacacctgccccgggcgggagggcaccgaggcgcgcgggacgcacgagagtcccgcccttcccgggtcgcccccgacccgggcagtcggatagggtcccgcacccgggccccacctcaccttcacgggcggaggcggcctggggaggccctctaaggcccccctcacgcccagcgcggccgccgccccgacctcagcgatgaggttgtggccgcaggcgtggccgatgccgggcagcgcgtcgtactcgcagaggaagcccaggtgcagcgggcgtggcgtggcgctcggtgcccgggcctccggcggctcccactcggcgcggaaggccgtgggcagctggtagtgcggctgcactgcccaggaggccgcgggcggctcccgctcgaagaagtgcgtcagcacgcggtgggcatggtgctcctcgtaggccagctcgggctggctccagatcgcgcggctcagggcccccagccgctcggccgcctcgtcgatgcactccgccgagcgcagcttcagtagctccagctcggagcggccattgcacgcgcccccttccacgggccgctcccctccgggcctcatgctgcccaagcccgctgccctctgcgccctctcgctccctggctcggccgcaggtagcgaccgcccgcgcacgcgcccagaggcctccaggaccccggcggagcgcgcacgcggccacacagctcccagggcaccacccccagtcccggggccgcccccggcgccgcgcgggaaacgctggcggccgctcgtaccctaccaggcgctctgccccgccgtggggttttgggggtgctgtggagaaggcagggctcgggactcttccacctccttggctgctctggcctttgagttatgctctaagattatcgattacttttccgttgttgcttatttcccacagcagcagaatgagaacggttattagttaatagccatcagagacagaccaagtggaacacagtcctcggaaaaacgccactctgtagcattagtaattaaaacctcacaaggtttgtatttcctgaaggaggccgtcagtgtcaatgctgtactaacgacggtactgtacgtaagtttcggtactgcccccactttcttctccttgacattgtattactaaaagctgcagctactctctacagttttctcattggttactaatgtctggaacagcagctagattatgcagtaagctcttggtatgtattagctattatataataatttatttgaatagagtagaactaaaaatttgaaatgagttaaaaccaaagagttaaaagatttatggtagtaaatattcatactgttttgttgatttggacagttgtcttgaacagctttgaaagggaacatatgacaggtttcgtttataattttaattgatgctgaactccactaacatgatatgtgcagctggtgttacattataactgagttttttaattacccagtgaagaaattcaagatgtcatgctcttgtttttctccagagtgaaccacaaagtctgaaaaactgttgttgacggtatgcctattaataacactgtagatgtttatattctgaggttttccacatattaaaagcttctatcagctcttcataccctatcatctttccttaatttgtctcaactatgttaaatgggacacaatatattaatgtgataaaccaaatgaatattttgaaaataagtctaagggaagctaacatgcacgaagactatcaactactgtttttactactctatatgctaataataccagagtaaatgtcacattccattcacgtctgaaaactttctttctcagttaacactccaacaaaaactcagctctaaaaacaacaaatgtgttattaaattcctgggcccccttggcgataataaatctttctctggtattctgctgaagaaaattaccctgtatccacgagatccaatattatcctgctcagttagttggctaaaaaaaggggagaaggggggattggagagcaaaagcaataggtgacatttgtagagcaattactctgtgctaggcactgttccaagggcttagcatttgttaactcatttaatcctcacagcaaactatgaggtggttaatgtggttatttatcttcattttacagatgtatgtccaagattatagagctagtaagtagtggacccactgtagaacagaagccagagtcagcctccagtggctgactttcagccaccatggtctattgcttgtgtaaacagacatgcaaattcataaatgcatctccagtttatctattcaaatcagaacccacaacactcattttgaataaattttactgcagcaactctgcctgctgacatcagtagaacccatgtttgccctcctcaggcatcaataaacagcaacagaaaagggatgcatataatttcatatagaagctgctatttatattgctttgcaggaattaacaaagctgccacttgaggtagaggaaagacagattcatttcaagctctgttccttgtgtatatatgtgggtgggtgggtgggtatacatgcccacaggcacgtatgtattcagtttctactgttgacaccttgtatttcttgctcatggtattttgcacccttgaattcatttatttgataaactgtgataact

SEQ ID NO: 585623 - DNA, 4001 bp, Homo sapiens
gggaagacacaaatctcccacagagaattccaaataaattatgtaaatattccaccctaactgaggaagagcacaactgtccattcagtaagcgtgggctctgcaaagtgacttccttccaaagagaacagtataaaaaggggtgggggaagtaactttacagtggataaatctaacaaacgctactccagaaggatgatcaaggtcagtaataatgtgataagtcaccttgatagtatgtatccttgatagcatgtgttgaaaagggcatcttacctctgtgatcttcccctgatatagtccgtaaggccattttaatcatgagaaaatcgtctggcaaattccaatagcagggcaccctacaatatacctgaccatactcctcaaaaaatgtcaaggtcactgtattagtttggtatgcttgccataacaaagtaccaaagactgggtggcttaagcaacagaaatttatttcctcactgttctggaggcgtatagtgtaagctctatggggttgatttcattctaaggcctctctccttggcttgtggatggttgtcttctccctatgtcttcacatgatcatccctctgtatcctactctcttcttataaggacagcagttattaatatattgggctaaggtccaccctagtgacctcatcttctttaaagaccctctctccaaatacagtcacgttctggggtactgaggttaggacttcaagatacgaattttagaggggcacaagtcagcccttaacagtcatcaaaaactagttaagcctgagaaactgtcacagccaagaatatacagcctaagaatatacaacaactaaatgtaatgtgatatcctagctggcatcctggaacagaaaaaggactttaggtaaaatgtgaggaagtaggaataaactatggaccttagttaataatttatcattattggttcattagttgcaacaaatgtaccatactaacatctattaataagaagataaactgtgtgtgtagtggggacgtcgtatgtgctcaacgtaaacaaaaactgttctaaaacataaagtctattagtaagttaaaaaaaaaaactctcaagaacatctttaaagaactgttttctctataagccctttgccactttacaaaaaaattccacaagtaaaatctttagtagtctggttgctgttgttttcgccctgctgcactcaaatgaggaattctaagtttattttgttttacttgggggcagggggaagtaaaaagatgtaaaagattaatgttgaattaaaatcttaagctagaatgttaatttaacaacccacaaacaaatttgtctaatgctcaatttgttcagatgacgatactatccaccacagggtaaaaaactgaaatattggatactacctttagcgaagcttaacacataatatccatcattgggtaagaacacacgaaaaacacaaactaaggaactgcgcctgcgtagtcagagcctcaaagggtataagctccaggtcgcgagcccccgcctcctccgcccccatgaacccccttcccacaagggggttcccactgcgcacgcgcagtgtttaacggccggtcaggaacccaacaattagtcccttctcgtccgagaggaaactctgtgagaagatgggaccgtgagcactctctttaacaaggacatttccttttcagcgaaagcagcgctctgatttaccaagtctggcggaccgcagcgctttaaaggaatgaggttccagcggtcgcgccaagcagcgtacgcagcctattttaagttatgctaccttcgccacagaaaccaagaacgttgtaatggtccggcaagtgcccacgtataattgttctccatcacttacccactctagttcgggaacacccttgtcgccgccgttccggtaacacctctccaacgctttcgatgcttctacttcttcgggaacaagacaagatggcgcccgatttgtctcacccggaagtaaagaataataacatccgtttgtcatctgaagccataccatctctcatccaggtttgtgaacacgtgattgtgcggattgacatgtttcggcgccattttttttgtgggcaaaaccatctctactctggtcaacaccgggcaactgaaccattcctgcacgttactttttaacgtagctggcgccattcccgacccatctttatagtggccagaaagccaagaacgtaagtgttctacacatagggcgccttcaaattttttactttagcaacgtgatcttcctttaaggggaagtatgttccctcctagaaacactcccgccttggagaaggggttgagttcgcaactccacttacagactacggaggaaccccagggtcaaaccaaaccaaaccaattctggccagttgcttagcgcagttcaagttacttagtgcgctggaagcggcatttcaggcaatccaacttctggctcgaaccttctcggagtattccaaggatggaatactctcacttgagcgctgccgagggtgccgcttgaggaaaacgtgagtttgtgaaggtgagcagtctgggtcggtagcgaaagcggagaccttagctgaccccgcagctgtctttctctttgttaacctcaacacatcgcgcccccttccgggaacacttgctcttctctccttggcttaactagtcccggtttttcattctttatccgtgacttttagggaaccgtgggggggaagtctggtttccgtcctgctgctttccttcaactacaagatggcttctcaaaaggacgcatgcaatgccattcctcaaagacagtatgttgatttcacagtgtttttatatgaacaacgttcaagtgtcaaaagtatcaatttccaggctaggagctacaagttaaaaggaaaacaaaaatgttccaaagatacagtgtttattagctacatcttgggaagtgcctttccagagagtaacatgaaaacttctgcgtgacaaagtgcacgaagtatctgaattatttcattgggcaattgtcgtgcaaaagaaatagcaaattaccgtagaaacaaaatagtaagagcacagctagatggataaagatacagatgtgaaaatatagatgccctttgcatgaaaattcagttttcctcagcactagagacccagatactcctgaattagcattataataaagtcgtcactagctaaccatctgcctttcctccaatccacggacgtggtcctcaaaataacattttatcttgtgagaaaccttcattaattacacctaacaacaccatgacgcaggttcatgaggatactactgaaggcaaaaggaaatccctatttctctgaccctttccctaatttccacttagcacaaataagactactggacagtctgattttaaaaaatcactgtatgggccgggcttggtggctcccgcctgtaatcccagcactttgggaggccgaggcgggcagatcacttgaggtcaggagttcaagaccagcctggccaacatggtgaaaccccgtctctactaaaaatacaaaaattacctgggcgtggtggcaggcgcctgtaatcctagctactaggggggctgaggcaggagaattgcttgaactcagggtcagaggtcgcagtgagccgagatccctccactgcactccagcctgggcaacagagtgagtctctgtctcaaaagaataaaataaataaaaaccactgtatggagcaaaaactagaaggacatataccacatgttatcagtaatctctaattttgctctgtgattttgtgcattttccaagttttttgcatcaggtctgattttcaagtttaattctctgagaaacattctcatcagaggaatgttctatcttcttagagaaacctgattggcctagtgaaactgtcatgttcctactctctataatcatattgtaattctttgcttgtttccctagtaaaggtgaggcaatt

SEQ ID NO: 585624 - DNA, 4001 bp, Homo sapiens
tttctgtaaatacaataacattttactggaatggagccatgctcatttgttcatgtattctctacagctaatttcacattacaaaagcaggattgagtagctgtaaaagaaacagcattacgcaaccgttaacagctctgtcttgaccagcctggccaacatggtgaaaccccatcgctactaaaaatacaaaaattagccaggcctggtggcaattgcctgtaatcccagctgctctggaggctgaggcaggagaatcacccgaacctgggtggtggaggttgcggtgagcccacatcgcgctactgcactccagcctgggcaacagagcgagactccatctcagaaaataaactaataactaaatcaacaaatagatctgtatgaaccgatacagaaagatctccaaatcccatcaaggaaaaaaaaaaagtttctgaaactgagatgaccttaaaaaaaattatttttgtgtgtaaattttcttaagaaaaaaaaatcacaggccaggtgtggttgctcacgcttataattccatcactttgagaggcagaggcagaaagattgctcgagcccaggaagtcaagaacagcctggccaacatgacgaaaacccatctgaacaaaaaatttaaaaattagctaggtgtggtggtgagcctgtagtcccagtttactcaggaggctgacgtgctagtatcacttgagcccaggaagtctaggctgcagtgagctaagactatgctactgcactccagtcttggtgacagagcaagaccctgtctcaaaaaataaaataaaaatcgcacacacacagttttacttgaaagagtaacagtgagtgttccttaatactgacttatttaagcacggaaacaatgctgctaaatttggtttgctccgaagtgttgatttccatatgtatacaatggcccaacacaaaacaagcatacaaaacgatactcaatatccttgaaaaatctcagagctgtttttacagtaggaaatccaaggacaataaaaataccttcttgaaaaactctaacagctgatattaaactcaccaatctgacagactgtaaattgctgaacactctgacgggtctttagataccactccgatggcaaatcaaaaagactgtgaacaaacaggcatctcattccacgagcaatgacatcccatcccggcactatggcctccgcggcaggaccaccactcgcaaccggggaggattttttccttgttacaacaactagggagcactaccatcatttagtggacagaaaaaagcaaggtcctccaacacgtaggagcaagccacacaaaacgtcctgccccccaaatgccaacaggctgctggccagaaacagtgctggtctggccaggctcttatacagaggggacacagctttagttttacctgatctgctggggcccagacaggttagaacgaaggcccgtgaactctatgtccagacctgccaggaaggcaaaaaatagcagtcctcgggtgcagaacatcgccagcactcctcacactgtagatctgcaggcggccaaggcacccgcgctcacctctgcgctcaagaagccaagtgaggtcaggaagggaaaatggaggaaccaaggcaaggagcagccaggcacctgggcgcacggggctctggccaacaagggacgtggggctcggagtgtacttgctgctcaaagtcccaccgccccggggctggagaaggaagcccccctgtccttcccgaggccctctctgaggccctgtggcctggcaaccgtcccgccaccccctcctcaagctcgcccggggcaaggggctctgtccggcacagccgcgaatcccaggctcttcacccacgaagtcggcctcctggacgagctcctgcagcagagggaggctctcctcgaactcgtcggcgcccacgtccatggccgtgcagctccgcggagtcgcccagcgctatcacgtgctgcccacgtgctgcccacgcgcttccgtcgcgccgccgggtcttaaagggcgcacacatggaaaccaggcagctgcctccgccccacgtgcccagcttccccgtgtgctgctggcgtcgcccacacctgcctgcgggtgttttaattgtacgatttgctacagaggtttgattgcaattgcaatcaaagcctgtttacctggctcctcagcaatttctttgcagcccttaacgtgagaatgtcatttacatggacttagaatgttaagaggcgtggcaggagacgaagacagagtccagaaagggtgaaatcagaaaagcggagcaggaacaacaccggacgcaactgcaataagcagatcctttgctgcggctcacggtcttctaaatcacctcttcccaacttctccatcactgccagtatgtctgtccccattccctctcccacgcccctggacatctttttcctcattctgctgtccaccttaccactgtcttcacacctgcaatcaaactttgcaaagcctcaagaactgcccattaaattgaaggaatccttggtccccagggattatctcgtgcactcactccttgcggaaatccctacctacatcatcacatacatgtgagcttaatttttacttttgttactgtttccagtgcaactagtccatggtcttccttacagtgtcctcccttgaattctaggcttctacttgaacagcgttttggaactatggtcctcaaagtgaggtgctcaaatcaatctttaaggttagcggagaaaacattaccgttatactttattttttccttttgagacagtctcactctgtcacccaggctggagtgcagtggtgccatctcggctctctgcaatctccacctcctgagttcaagcgattctcccgcctcagcctctgaacagctgggattacaggcatgcaccaccacgcccaactcatttttgtttttagtagagatagggttaaaccgtattggccaggctggtctcgaattcctggcctcaagtgatccacctgcttcagcctcctaaagtggtgggattagaggtgtgaggcactgcatccgatcttcaattatacttttaaatgcctctccgggacattaattaagcaaaaggggactattaagccatttgattctgaagacctctcagaacaaatcatacttcatacagatgtgttccatttaaaataacacattgaatactcaaattggcagaagtaacatatttcacttctaaacaaacatttaattggggtatacattaaaaaaactggaaaacaatgctctagaagccaccttaactgcctacaggttttttctcacatttatcaaatagccaaaaattaacaccttaatcagctcctttcagagaactgccatgattcccatctacccaagctcaaattttagattaacttgcatgcatttcaagtttcatctcctatctaataaaatgttcacttcatggcaaattgagcgcccactaaccccaaccatttccacctctgctttcagctcctgatgccacctccttcctctttcaaatttgtttctcttactgttgggaaccaagagtccaagtgaggttggcatttggtcctttcattttcacatactgactgttctatagtattagattgatactgacatttcctattttaaaaaacaacccacactccgagcagcaaacaactgtcattcactgagatcactcgccatgaactagacacagtaataagtgctttacatcaacctcatatgtgctccactgccacagtgagctcagacaatgtcatataaccagaaaataagagttcataatatgcctttattttgtaatttataaacaacttctgacttgccctttgaaagttaattataattgatgactgcttttcttagatgcttctgaagcccaagagaggggcagaacgtagttcttgatttaaaaaaacagaaaggggaggaggatgaccttaactacaaata

SEQ ID NO: 585625 - DNA, 4001 bp, Homo sapiens
cacccacaggccagagctcaacattcctttctgctgaccccaggtttttagacaaagctttgcctccttaaccaatcacaaatcagaggatctttgaatccacctatgacctgcgggccccgcttcgagatgtcccacccttttaggtcaaaccaatgcacagtttccatgtattgatttatgactttgcctgtaacctctgcctccctgcctttaaaaacccttacctgtgagccaccctggagttcggggcttaagcatgagctgcccgattctccttgcttggcaccctgcagtaaatgcctcactttctcttgctgcaaatcccaatgtcagtgcttggctttgctgcacctggtgggcagacccaagtttggcaacagagtctgtgggagaaagtgctgtcagaggaacatgctggagcagccagattatagaagaaagaagtatcgttatggttaagtctgtgagcagatttgaggagaagctaacgaatggcaccaagtgtgttcagcatctccccttctagggtgtcatctgacagatgtgttatctgacagatgtgctgctcatgccttctgcacctgaggtcagggatgctcacacagaatgggttgtaactgcataaggtcgggagccccctctacatccaccaaatagaggatgagttgagtatgcagataataaagcagaataaggaaaggctttttatgaactgacagggaaagactatcaagaaatactaagttaaaaaaaaaaacaaaaccctcagtgccaaacagtacatataggatgccaccattttttttgtctaaaaaatggggaagaatatctatggaatatactcatttatatatgaattgaatattctaaagctagttgcaagaaactagtacccttacttttctctaggaaggaaaactgggaaatagtaggaagaggattatcactgtatatccttttgtaccctttgattttgagaccatgtaaatgcaattatctaagagagagagagaggaaggaggaggaggagaaaaaggaggtggaagaggaagggagagaaagaaacgctgtgcatgggctctagaatcagacggacttgtgaattccagctccactgcttcccagctgtgtgaccttgcccaagctactcaacctctctggggctcaatctgtgcaggaaaggggcatgacaattacataatgcctccaacccacctggactgttgggagattgagactaatgagtttaaagctcttagctagaaatggttgctgtagatgtttagccagccctggcttcacactctccagaccagcttccaaacttcctggagggcacatgcaattcatcttttcctttcccatgcaattccccaggcaccagtccatggcactccctatgcctgcaggataccacatcaaagcagagttgggggaggtgagtgtcttgagtcaaatgcgataccagcccccatgcttcctcccagagcaaagccccctgcagactaactgctgggctctctggtagtagggtcctgctctactgaaccccacatccctttatcccaggctgcacctccttcctcagatgaaaatagcaattctcaaacacaagtgcgcatctgaatttctggtgcagggccaattcctgggcccaccccaggactttgttttgcccactgagttgtcaaagatggagctcttgccacctctcaggcagtaggtccctcaccctttacaatccacatctctccccagttacacactggttcccaaacatgtccaaatctttcctccctcactctccatgcttctgattttgtagatctctccttcaagaatcttcgcaccaccccccaccatgcattcatgaacattttcccacttgcctaaacgatgcctaccttagtagaagcagctcaatcatctcctcctccaagaagccttccattgtggactgccctccaatgtgggctccccctggctgattttgtgtctgtcatgccatcttcatagcttacttgaattagaattatccttgataacaatgaaagctttgattagtgagtgcatgaatgtgagtggtttattaacattggccctcatctgccccacacccacaagaggtaagtgttattgtcccttttcatagaggaagaagctgagtctgaaggatgtcagagggtttgcccagggcacagcacataggggatgggttggaatttgtctgcctttacctgttttttttttggttggttggttgtgtgtgtgtgtgtgtgtgtgtgtgtgtgttactgcgccgacttttgagactaaacagtctctagagtggtggtcagtttgtttttctctctttcagggcaaggcaaagtctaatccctcagttaatactaacttggattctcgagatggggatgtcaataagaaagatgtctggcagtgacttgggaagctgaggggggaggatttcttgagcctaggagtttgagaccagccaaggcaacatagcgagaccctgtctctacaaaaaatatagctgggtatggcggcgagcagctgcagtcctagctatttggcaggctgaggcaagaggatcgcttgagtccaggagtttgaggctacagtgagccatgatcgcaccactgccctccagcctgggtgacagagcaagaaccctgatcaaaaaaaaaaaaaaaaaaggaaagaaagaaagaaggaaagaaaaggaagggaggaagggagggggagagagagagagaaacagaaagaaagggaaggaaggaagggaaggaaatgaaggaaggaaggaaaggaaggaaggaagaaagagaaagagagaaaggaagaaaaaagaaagaaaaagtgagagatgccgggtagagacaattcctgaggagtctatgaggtgggggtggctcgaagggaagcgggtgggagatgaacatcatcatctgagagaagagatggtacggtgcaaacaggacagggtggataccattctgaccctggggcactcatggaattaagggaatttgttgaaaatagggaggcacagggccgggggagcaaacactatctttccttttcttctaagcatttcaggaggttcctgtgaaaaacctacatgcacacacccccacgtgcagctgcagactgctatctatacacgaagttatgcatcgcagagtcgactgcaaaaggctggagcccacacagcgtctatcaatagggaacgggttaaatcgaccacaagatttccatatgacgatggaacactttccagccaagaaaggaggaggaagtcctcactgctctgatacggaacagtcaccaagacatattttaagtaaaaaaaaggcagcatgcataaccagggaaatgaaaactaaaaccacagtgagttacaatttcacacagatccatctacaaaaaaaaaaaagctgataattgcaggtgttggtgaagaagtggagtgaggggaatgctcaaactactagtgggtgtgcgaatggttataaccactttttaaaattttggcattatctactgaagttgacaatgtactttcccaatggccttgcaaatgccctggagaagttcttacccaacccccgccattccccccaacacacaccaaaagaaacaattaagaacatttgcaccagctctgttcctagaaccccaaaactgaggccagcactgaggccaagcacagtggctcatgcctgtaatcccagcaggcatgagccaccctttgggagcctgaggccggaggattattgaggttgagagttcaagaccagcctgggcaacatagtgagaccttgtctctataaaagaagttttaaaaattagccaggtgtgatggctcatgcttgtagtcccagctaattgggaggctgaggtaggaggatcgtttcttgagccctggaggttgaggctgcagtgagccatgattgcaccactgcactccagcctgggcaacagaatgagaccct

SEQ ID NO: 585626 - DNA, 4001 bp, Homo sapiens
gcctgttaggaaccaggccgcacagcaggaggtaagcagcaggtgaagcttcttctgtatttacagcggctccccatcactcacattaccgcctgagctccgcgtcctgtcagatcagtggcagcactagattcttataggagcgtgaaccttattgtgaactgtgcatgggagggatctaggttgtgcactccttatgagaatctaatgcctaatgatctgtcactgtctcccatcaccctcagatgggactgcctacttgcaggaaaacaagctcagggctctgattctaccttatggtgagttgtataattatttcattatatattaaaacataatgataatagaagtaaagtgcacaacaaatgtaatgcgcttgaatcattctgaaaccatcccccaccaaccctggtgtgtggaaaaattgtcttccacaaaaccagtcgctggtgtcaactggagaccgctgctgtaacaatgccgggaactaggcgctattaggagctcccatttgtggacggagaaacagaggcgcagaacgttcaataacttacttcaggcatgcatcatgaaatggcagagctgggatcccacctgaggagctcacgccctctgccccctccccacttgctgtcacagccgtctgtgctccccctcccttaggtgagatgagagcttgtggctaaggccacatgacctggcccctgttgacctcccaccaccttttccacaccgcaggcttcgtggctgctcctccaccaggaattctccttttcaggagctcccagtagcttgttctatcactatacccagctctaggcttgaatgtcacctcctcagaaaggcttccctgaccaccttcctgaaatagtctccatttcattctcagtccctttcctgctttaattttattcatagatcatatcacttcccgacctcacactagaaggtgccttgtttgaatgtttattatctgtttcttttctctagaatttctgctccacaagggcggggaccttgtcctcagtgcctggaacagagctctgtctagaataggagctctgtaaatgaataaatgcccctccaaggtagctcactaggctgttgggcttgttccttggggctgctagatgcatctgctgtccgggacagtgtttctctctctgggttagcagtgtagcagttcttctcgctgaggctcctggaccagcaggacagaaggtgaagtgagagcttctgtattctctccccaccccttcctattcttctcccactctgggctccctcctgtctacccctccagcctcagggcgttcatctttccagccacctggaaatggtggacaatacgtccccatcagggtgatagagatttgaagagttgcctctcccaagggtatttgcattttgaaagaggccaggcaggagcaacactgaaccccaatgtatgactgtgccgtggtgtagcttctgacagcaccatgttcgatgttcgagggagatactgtcctttactctcccaggcactgggagacagagcatctcacaggtaagggcactgagggagagggacaggggtccaggctcaccctgcatgttagagtctggggcctggcagaccccaaccttcaaacgtcacagctgccgctatcctactccaaccagctcttcccttcccttcctgccacccaggcctggctttgtcccccaaagcatccccagcctccctcacgctccttctgtctctgtggaatcccccaagagacttcccaggggacccagaacacaggcctcacccatttcaatcccgcagatggccagggcggcgatcacagcacctgccgatgtccccgcaaagcggtgggctgtttccagcatccggggggccaggtcccgcagggcgtccacagcccccgcctggtagaaggagaggaatccactgcccgagaaggagatggagtgaggggtgtccgggtcccccttgaacacctgttcttccatctcctcggcctctgactttctgcggaaggcggagccacccttcagcacttgcctgcccgagcctgggctgccgctccctgtaggaactccctacccagcttccctgccaccccggagcttggaatgtggctgtctctacccggctggagcaaccacaggctgctcaggaagctgcctcagcctgttaagctccgccaggaggcaactccaaaggttggaaaggggccccagaatgagatgcagaaggctcccccggtgtgtgagcagggtcttggtcctgtgagccccccactggcttcatttcttggctagattcatctcgggcacgggatcctcagccctctgcccatccatggtataccagggcgcattcactgctccccagcacagggccatgcccaaggaggcgggctctgcccagccctcagctgcaacattcagttgcaaaacctccgtgatggttatcggtgtacacctccctccccaacatgctgctgcggccgtgaagggcttccaagcccgcctccctccaggaggacggtgcctaccccatctcttttggacgggtcccccaaaagagatgcccctcctgggctccttcaggctatgtggtatgtgtgatgtgttacacaagcatttttatttgtttttcttacataaacacccctttgtttattcacttgtttatttacatgttagcattggccctgggtaaaattttaagagaagtgtgactttggcggccccacccaccaccgcctctgcacctctctctgtttcttctcctgggcccttcactgaccctgtgaccttggtcagtgccctctcgacaagccccaagccctcatgctatcttctaagtgtgcaggaagaaatcaacctgaaatctagatcattctaagtgtgtgaggcttcgtgttgcgtgttcttcttcccgctcagaaatgagaagtttgagatagcaatgtttaaccccaaggaggagcagctggggaggtcacctgtggggacgtcggggtcagggcagagagacgttttggtaagggaggtggtgtgagaggaccagggttagctccaggggctgcggttctgccccctgaggggctgtatcatgtggtcctgatggggaggagtggttctcacacccacaaaatgtcccctcatggagatataacaaagaaggcaagatggcgtctcccgctcccctcaaagaccacacagcaacaggaccagaatcagaatcaagacaccaaggcctccaccaagtgccaatccaggatgtgacatcagtggcttccccgcttctggggagcttgcaccattctggtggactcacttatctgcatgggaattccacagtgagggcaaggccaggcttcagttaggagggagttttctgtcttgggtaggtaattccaggcatatcattgcctcaggttgaaaagagagctttagattagataaagtgtgtgtgcgtacatgcgtgtgtatgcatgtgtgcatgtgtgtgcagatatctgaggcatactgctggggtgggggcgggtgtgtcagggtggagtccagtcagcttttggacagcagagaccctgcccccttcctgggaggtgaggtcagctccactgagggcttgtgtgccaagccctgtgctgtgtcggggccctgggggacaggagcacacagaagctccatccccaaatcagatatttgcaggcttcttgggaacaagacaggcaaatgtgaaataagcagaaaactgtacaaggcaatctataattaagtactaaactgtgcagggctgagattcctgccagaaaagttaggaggcggggctgagcagtgtgggctggaacatctgaggagctgtgcggcggaggtgtgggctgcgggactggaggcagctgggaggagcaggcaggcactggtcgaggagcagcaagagccccttgcagagaagggaaggggtgtaatgggacctgtttcacaggatgaagggcttt

SEQ ID NO: 585627 - DNA, 4001 bp, Homo sapiens
ccttataggaagtcttgaaaggatggaaaagcgtaaggtaatccactagatcactgcactaccaacacttgtaacgcggtagtaagcaagacacgacacgaaagaggaccacaactttccacgtcaataaggttcactgccagagctccctagttagtacctgttctagaaaacaggccaggaaacaagcacaaaagcttttaggtaatcacggatatttcaaaagtcgtggaattttaaaagggagacattgagacgataatttaaagaaacaaggtgggcaaattttttcccaagggcacagataaaccgcaaatctctaattcaatgcaacattcttcactaaataacgggaactttttcatttcattattacgaagattaagtcattgaacttaagtccataaaacgttattctgacaagactttgaaatcatttcgtagacttaatcctatttaaacttctatccattttatcctaatgcaatagcactgcaatcagacgggctaagtcaattcaattgctaactcttctgaaaacttactctggacacactaacacgaagtaccacagtggcaaaagtaataaaatcagttttgtgcggctcctgccaactcttaacttggaaccactaagtaggtcaggcccgaggcgggcagagccccaactggactgcgcgtcccacaccgggcacctcacattttggcacaactccaaccaaacgaaacccagccgctcggagcccactccaccccctacggcgggacgttagaggccgtctccgcgtttcaccgactaggactggggctcccgatagccgggaggccgaaagccgggcccagtccttccccagctgcccccacccggcctcgcctccttcatgggcgccggagcgccgggcacgtagcgcgcgctgacgtcagccctcccgcgggccctgtccctgcccccaccccgccgcgcgcccggaacgccgaaaccccctggaacgccgccagccttctaaatcggggctgttgctggggcgcagcggcgcttctcattggccgactcctgggagccaatcagaagcgccagcgcatgcctccccttcccccttcttcccccaaagcaagaatggagcgggcgtcacggaaacttccctcccgagtaaacagccgccccccccaccccgcccccacccgcccgaccccccgggtgcagggtctgcagccccagagctcggccgcgaccgtctaagggcccgactccccaacggccccctggcggcctcacctctttcctgaggggggtttggccgggagccgcgggccgcagcggggcaaggtcggggctggctccctccgtgccggctgcggctgcaggactcggggccaaggcggcggccgggcccgggacctcctgcgctccgctcgggccggtcgcggggctccggccgccctccagactcggccggtgctgctggtactggtggaagcggctgggcagctgccctgcggggctggcccgcaccttcttctttcgccgcttcttcggcgctgcccgaggagtgcctcccgccacggcgaggctgcggttgggcagagctgctggagcgcgaggctggggggtcagacacgggccatctccccctaggaaatgagggaggaagagggtcgggggcagtgcccgggggtccgggatccggggtaaaggaggcggagccgtggtcaccatcgggagggccccaaagtaacctcgggaggaaaagccaagcggcgcaaggcggccacccaggacgagcggctcccgctgcgggacggagacgacagtcatagcgctaggaagcttgtcgctcagcaacgaagagagaaggagaaggtgaatgaagccagtgaagatagggtggcggcgatggatgctgctaggagagcctgagaagatcgcggaacatgactcgggcggtggcggcgcagcaacaaatagccacagccccagctccgagtgttgttatcggaagctccgccccgcgcccgcccactttcctgcgaaagcccaattagagtgcgacaaggcaggccacgccccctcgctccgcctccgcagcttcgggtagacacacacaaacaaccagcttgctgcagcctggcacaaagagggcgcactgcgcaggcgctgccagcgagctcttttgggaagaatcggtcccgcgaacaatgaaattgggtttccgccccaccctctttactcctccccagcacgcccctgcgcttcgccgggctagggagtggtggtactgaaatgtcccggcggagtttgttgatgggggtggggaagggagggggcagggggagggcggcaggaagaacgggggctgggaagaggggatgactttggcaaggccacggttgcctcctccgctgctgaccttggggaagtatccgttttattttcagcccaacataacagcgttatcattttaaaacaaagatttctaagtacgctgtaaggatttcttccctagcaatcgtgaagaaaatcagtctacatttaaattttatctactgaagtatggctcacgattctttcatttacttggttcggcatcgctgcttattagtctcggtgatcagagtaaaaatcaaagtgacttactgattgaattagcccctcgatgtataaaaagttctccgtaaatccataaatggaagttggagtttttactgatttcatacttgaaggattgtgagactttgggatcagaacattgtgcctggttacttgaggaggcggcaagccggcttgcgtctcaaagggagaaagtgaaacagctctgcaacatagagtattttgttagctgcgcgtaaatagaaatttttcgcgatctccccgcactgctcaaccacaaaaaagaattgtggccataatttatcaagcatttatgttccaggaactgttctttacatagattgtctcactttaacctcacaacaacccttacgaataggtactaagaaaaatagatcagacctcagctctgcgaagtaggcaggctgtcattctcttcctttcactactaatgcctggggcaattgtttaaaggcattttgttcctgattagctgcctacgcattatctttaagtttctgaaatttaagatacaaagaacaatgtatagctagtcaagagcccacgatattttaatgtaaattggtaaacaatttaggagctgcctcttttcctttaaaaacctacttgtaacttgctaatccgagtgtatattcagggcagcttgaatctatggtcctgggttgcagtcctcaagcttggcctgattttgcctcagcttctttttggagggacagtactgtattttattcccattttacagctggggaaacaggcttagaaaggctaaaggacttgtcaaagatcaaacggtaagttaacatcagaatttgatctccagtccaggtactgcaagacaaaagttttaatttttttttttttttttttgagacggcgtgtcactctgtggccaggctgcagtgcagtggcgccatctcggcttactgcaacctccgtctccctggttcaagagattctcctgcctcagcctccctagtagctgggattacaggcacccgccacgcccagctaatttctgtattttttagtagagacggggtttcaccttgttggccaggatggtcttgatctcctgacctcgtgatccgcctgcctcggccttccaaagtgctgggattacaggcgtgagccaccgcgtccagccctgccacactagattctacattattagaagaccacagtaatcttacacttctgtatcctcaccgcctctacaatagttttcagctttggagtagtaagcaattagtaagcaatgaaacgttttatgattgatggcaaagttggacagattgcatatccagaaaaatgcttcccaatcactttataaacttttttttttttttagacggggtttctttctgacactcag

SEQ ID NO: 585628 - DNA, 4001 bp, Homo sapiens
gtgctgggattacaggcgtgagccatcgcgctcggcctagcatggggatttttttttttcctagacagagtctccgtctgtcacccaggctgaagtgcagtggtgagatctcagctcactgcaacctccatctcccggtttcaagtgattcctctgcctcatccccattagctgggactacaggcgcgtgccaccccgcccggctaattttttgtatttttagtagagacggggtttcaccgtgttagccaggatggtctcgatctcctgacctcgtgatccgcccgcctcggcctcccaaagtgctgggattacaggcgtgtgccaccgcgccaggccggggatttttaaaagctctccaggtaattccaatatgcagcagtttgggagccaagacctaaataagacaatcgaaacaccagcaatccatgatttaaatacgagaaacacaggttatacagttgagtgagcacccaactgtattctaaaaaaagtttttcaaaaactaacattcaccttgaaaaaaaaaacgtcttacaactgcaaagcaggaaggtgagtggaaagaaaaataattaaaatcagagcagtcaaagcattaattccttataaattccaatcgaccacgcctaaaacaggcagaatgtgatactttaaacatttacaagttaaaactataacatgccagaagtccctctactttgaagtggcttttcagtagtactggaacagactgagccaacaaatagtattgtaacacaaaaaaacacaggctaagcaccatattagatccaaataccagaagtggagcaagaataggaagcagtgatttatgttcagcacacaatttactaagcacacaatcacaaaaacagacatgcagactttaacagataataaagctgttgaggttttccgtttatgtatttactggagaaagcaagagctttatttatttatttttgagacggagtttcgctctgtcgcccaggctggagtgcaaaggcgcgatctcggctcactgaacctccgcctcccgggttcaagcgattctcccacctcagcctcccgagtagctgggattacaggcgcgcaccgccacgcctgtataaaaatactaaaaatgcaaacataatttttgtatgtttagtagaaacggggtttcaccatgttggtgaggctggtctcgaactcctgacctcaggtgatccgcccgcctccgcctcccaaagtgctgggattacaggcgtgagccaccgcgcccggccaagagctttataaagatggaaaatgaagaagactttctgcccaagccatgcttttggataaggattacactactttgaaaccttatacatagcacttggccaattatcaaaactgcacaaaccttcactgattgcaattattccctttaaacatctcgagttaccccaatccgcacaaaacaagtttagtgcccaccaggtaataatacatccaggaaagtaattccaagagagaggtttaacaactacagggaaaaacatacttttttctacaagaaaaatcttagaagacagtaccagggccttatccctgttagcatgatttatatttcacgcaaccttggcccagtcactgctacattataaaaccaatagccaaggcaacatagaaagtctgaacacagtgacagcgaacggttctaaattttcttaccaaggtaacaaacacctggcaaaactgccagcagcggttgccgaaaatgctgggttcggtgcctactggaaggaaaatggaagggctcctgaatatcttttcgcctttctaggagcggtccagtgagtttcgagcgagatttattccctgtgacgacggagaaaccgagaagggatcgtaaaggatcctgcccgggcaaccgtccccagcagggatcagacgagagcggcgcgcccagcaatgcagccgccagactgaggtctgacagcgcgcccgctgcgaagggccgttgacgcggctgcgcaccgcggcccttccgcctcccgccccgcccacctaggctcaacctgcacacgggagccgccacttccgcgggcgcgtgcgcagtggcgggccgggcgcgtgcgcagcgccggcttcttcccagcgcgagttgctgctaacgctcctcctccagcttcccacccccgccgcccgccgcggcccggtaccaacgggtggtctcgccgagggagctgtcgtgcctcgtggtcccgggactgcagtggtgtgcgctctcggcgcgtggcgctaggcatggcgatggatcaagtaaacgcgctgtgcgagcagctggtgaaagcggtgacggtcatgatggaccccaactccacccagcgctaccggctggaagccctcaaggtagctggggtcctggcgtcctgggccggtcccgacaccctctcccagccccagcagctccggcgccgcctgtaactggggtagtctcccgcccacgcggcccctggacctcctttcccaactccccgggaccttcccctcgcggccctccgcgcctctcccaaatcgccgccttctctactcgccgctcctgtcctttgcctgggacactccggtccctatgctgcttctcatctcgccgcagcttcccacagccctctcctccccctttcctcgcttctgtgcactcttgtccgcaacatgaccctcgcccattttcattccccaagcccgacatcccctcgccttcccgaggcgcacgtgtagatcccgcccccaacaccagcttcgttctttatggtctctcctgcactaaacgttttcctgctggcccactcccctggccctgaccgagctccagcccctctggtacccttatgcttatatgctttaacatctcgctaactttcgtttgtgtcttggacattttccggggaaattctcgcacccctacttctcccatgtttttgagtgtaatatttttaggctattttgcgcaaagataacttctaccacttactttgcattttaacaagggcactttggtttcctgaaagtagtttgcgtgagacccgaatgctctgctcttgggactgacttatgttgcagtttgggggtgttaatacaattcaagcttacttgcccataaaacaacgtgtgtgggctgtgagaaatggccatttaggagaaaatacttgtgctgtacatttttaaagtgatgttaacttcaaaaaagagagtgaccaccacttggaggaaatgttacaatatgtagatgtctgccacagggtttggaatcagaaacaattgggttccattagtttggtttttattattaatatttaaaatagacacaaaagtggagagaatacgacagtgattctgcatgttcctgtcacctaaattcagcaatcaaagattttaccgcatttactttttccaccgcctatcctctctccctgcctcgaaggtttttaaaagaaaccctagaaattgttatttcacccctatgtacgtcagggggatgtctctaacaaataatttcttattcctttgtgtccatttttttccaacactagtagggctactgttggccgtagcatggaaaaaatctggaaccatcacgctggaaggaatgtttatcagttctttattcataatatatatataatatatacacataaaatagagtgaacaccacttggaggaaatgttatatatgtgtaacttttatatattttatatttttatttttatattaaatatatatttttaaagcaactgtgcttggagatccacataatattgatctaggttttgcaactttaaacatatagcttaggttggagtttctttttgagtagggtctcactctggttgtccaggctggcgtgcagtggtgagatctcggctcacttcagccttgatttctcgagctcaagtgattctcctaccacttcagcctcctgagtagctgggattacaggcacctgccaccatgcccggctaatttaaaaaaa

SEQ ID NO: 585629 - DNA, 4001 bp, Homo sapiens
ctactcagtcctcttactagacttctgttatgcttggcattgattaaaaaaccccctcctggcccggcacagtcactcacacctgtaatcccagcactctgggaggctgagacgggcagatcacaaggtcaggagtttgagaccagcctggccagcatggtgaaaccccgtctctaccaaaaatacaaaaaattagctgggcatagtggcgcatgactgtagtcccagctactcgggaggctgaggcagaactgcttgaacccgggaggcggaggttgcagtgagccaagatcgcgccactgcactccagcctgggacataagagtgcctcatgaaaagcaaagaaaaaaatctcctccttttttgaactattcccctggtttctgagctctgagctccactcttcttccttctctgatgatcgacttccacccatctctaaatttgccaggttcttgtctctctcccaggtcaccttaactgtactaacagttttagcaactatctgttctgacaactcccaaaatgttatctcacttctgatctcatttcaagcatgcagtcttctagcctgctagatttctccacatgcagaaaacaatgcatcatcattcccgttccccagacccatttctcctctcagtaaatgataccacaatgcatcaaagcagttcccaagccaaaaagtcattttatgctacccccacagcctttaccaaagcaatcataaatttaccttctattctacctttgctctatttctaccatcagtcttagttcatgtcttcaacctcagcttcccttacaacagatctgcctgctccatatgatcctcctcaaactcattccctcccagccaccaaggttgcaaatctcatcatgtctgcttaagaactattcaatctccctatcatcaacagtgcccaagacacacttcaaccttgcctaccactcatgccagaactacttggacatgcccggagcacacttcacacaagccataattttttttcaagcattaacctttttcattgttcatactttattccttgtatcaacaggttaaaaaagtaaaattttcccaagcactgatttacagatcatgtttataagctgcacgcaaaggtcagttgcctaaacggtaacattcagtaatctatttaaatgcaattttaacccttattttaagctaagtgaaacaatacaaaagactaaatacacacaaaacctgtatatcctgaacttcactgacttgaaacaaacccttcataatttaactcctgttcttttttacttaccattcaaggctcaattgagatgtaccctcctcttgaaatgttaagtacctctccgcccctcttcctggtctcagcgtaatgctccccaccccaaccctgccgtcttcatcgctatcaaccaccttcaccatattacactagattcactgtttatacacaccattcctcaacaagactgaacatctttgcagaactgggtagaaaccgtgtctaatttggcctgtaaacggagcgtctagcacattgctcaacaaacttacaaacggagcgacccccaagagcagcttctgagacagacacaggctgctcagaccacaaggtctggccttcataaccctccccagacaactccggccccacttaccttctcgaagcggtcctggtcccaggcatcatcataaccggaatagttaccgggaaagtcagtagtatggacctagagcaaagggacgaatttgtccacgaagggacagtgagcccacagctatccccacgccaatcccaagacccatccctgttccgctctcattcctcccgcccgagctcaaggccacaaggcttacattgcgaaccccaaactcccccagaaccacgcggctccgcatttcctccaccgcctgagaagccgccatcttcaatctctccacgagactagaggttctatctcgcgcgtgcgtcctagtagccctgctccgtctccgtggcaacgcaccgcctcctggaatcttaaatatcgcgagatttttccccgcccccgtccacgtccccagcttccggaagttgcttttgtccaaacatccgggcttctcctttttgtgttccggccgatcccacctctcctcgaccctggacgtctaccttccggaggcccacatcttgcccactccgcgcgcggggctagcgcgggtttcagcgacgggagccctcaagggacatggcaactacagcggcgccggcgggcggcgcccgaaatggagctggcccggaatggggagggttcgaagaaaacatccaggtaatggccccaaggcaccagctgccagcagccggagggccggcgatgtccagaagtgtcttggggattccccctctgggcctggaagtccgctccatttacaaaactctcttctttgggtcttcgtgcacactaaagtcagtgggattaacattgacctgaaagggccagactactactccagcctgaggatctcgggtttcagggcccgcccgaggcattaggaagaaggtattcttggaacaagttaggaggttggtcggggtaaggcatggagtggggttgggtgggattcactggcattcgctgaaaacatactatgtgtatagttttgtttggggcttaggaaagaaggaaatgggcactttttcagccttttagtctttgataggtaacataggagaaagacatgaatggaagactagtaggtttcccaggctagaaaagatagccaaagctagaaaccaggcgttctgagagcatatgagggggaatggagtggcatgatctgtagtgattccaagccgtatcctcagcagtggaagaacaaagccctaaaccctgggatgagcagaggacttaatggatggaacagaaaagtcctgcactctaggagccattgtcttcacagggcggaggctcagctgtgattgacatggagaacatggatgatacctcaggctctagcttcgaggatatgggtgagctgcatcagcgcctgcgcgaggaagaagtagacgctgatgcagctgatgcagctgctgctgaagaggaggatggagagttcctgggcatgaagggctttaagggacagctgagccggcaggtggcagatcaggtaagcaagattgaatcctctgcaggtagaaaagtagacctaggtatgtcccgtgttctggaattggtgttggtgatgttcgccccaggttgtccagttagaaccatgtagaaatcaaacggaaaataggcaacaggatctagaaccaacagtaccacaatacctatgcccatcttccttacttcagatgtggcaggctgggaaaagacaagcctccagggccttcagcttgtacgccaacatcgacatcctcagaccctactttgatgtggagcctgctcaggtgcgaagcaggtgaggagccttctcttgaagaagcttccctcctaacacctagaccttcatgcacactacagtcagatttcaagccctgggctctgatgggctccccgtcttcatgaccccatcacctctcatcactgcacctgtcactgaaacaagtaataatagcacaccatcttcctcttcttttccatctaactgactactcatcttccctcaaaacctacctcagatgtcacttcctctgttccacattcctcaatcccatccccagtttgttctctcctggtgttcctatagaactctgtgcttgccagccgggcatggtggctcacgcctggaatcccagcactttgggaggccgaggcgggcggatcacaaggtcaggagatcgagaccatcctggctaacacggtgaaaccctgtctctactaaaaatgcaaaaaaaattagacaggcgggtgcccgtagtcccagctactcgggaggctgaggcaggagaatggcatgaacctgggaggcggaggcggagcttgcagtgagccgagatcgtgccactgcacttcag

SEQ ID NO: 585630 - DNA, 4001 bp, Homo sapiens
cactacaccaaaatccaaaggtggcttaaaaacagagtctttagatgtgctggctagggtggtggacatgaccacagaggtggccttgaccaggccatggaaatgatgggtagaagcatgagtaaatggaggaggggtctgcttggaggagaaaggagctatcatgggcgtagttttaagtggatctatgctgccaaagataggcttgaaggtaggagttaaggtaccctgaattgtggaaagggaagagattgaagatgctgcagctgtgactgaaattctggaatatgaggagcttccaatctcgctgttgtgcaggggccccaaaatcggttttaacatgaggtgagcagaagttgcatcaggaggtgcagatgcagaaagatgggatgttgggctactcaccattccaagcaaagtactttggatggtgggtggtgcaggtgggtctgggggcatgggagacctgtcagcctgagaggttgaaggcggccaggtggtgtcagtaactggtaatgtgggagaggtgggggtcagcaggatgaaagtagctgtgggctttgagtctggagaggtgcctggaaggagctctgactgtgagcacccaggtggggtcggtaggctgggtgtcttcaaaggagaatgggccacactggttgcctctcccgtggactgtggagaggccagtggacctagagacttctgcatttttcttaagttttccaactgaggatttgctccctgggttagatctgtttctgaagaaggcagagcaagagacaaggaaggctgaatagcaagccaagtctcagggaaagggtctgtgttgacctcagttgtatcttctcctgcgttgttgcttacctgtagctcagctttcttccccaaagtcaagttctcatcagagactgcataaccaagctggggaggtgggatctctgacaccaggttctcagggctagacggcagctgtggaatcttctggttttgctgcccagaactttcagatcctcctagggactcaaaatctgataccagtgggactggagaggaaggccgatgacaacttttttccttttttattggccactctggtgtctcgaatgatacactgggaacacttctcttccaagggtctgagaaatttctgcaagagctgtaagagctgccaatagcattccttttggagctgagggtgccacctctgtatatgctggccaaggagctcatggaggagcaattgggcctcttagtcaagctgtgatctgagccccaggagtggagacttctcttcagcggcccaggcctgggcacaaaagaagtgagggttccatttttcatcaggggcttaaatgccgatggtctggtctctggactccttctcttactgtccagactctcagggaatagtggttcttccaacctccctttcccttttctgcactctctgagggccctcaacactgtctcctttgaacatggatctgcgagctcctcagagggcgggagtcctgcaagggcaattacatcttcaggagaagtggaagggggcactctctggtcaggaggagtgatcctgatggtcactgggctccaaattggcctgggatgtcgaagagaccaaatagtccgctttaagtaactttcccaccagtctgaagggagaggccccaggggggaattctgggacttcttcatgggaaagcgcctccaggcctcgttggccagccacgtggttggattggcaggatccaggtttggccgcctcctcacaggtctataccgtggggcagggtgggcgcggtggacgaactgaacccgatgaacttggtgaaggggctgaggtggccggcgtttcgtgggcctctcgggcaagtcggtgcgcacctgggctggggacgagggcgaaagttccagtttgctcaggaaactgcccatgaggagagatgaggcgcgggcagtgagttcaagcacggttttggcttccgaggtttcggacgtctgcagaatcggacagagtcgaagagcgcagtgttcggttgacggttgggattcacgcgctaggaaagcgcgagtctcagggtgcttagcactctccaggcccggcacccgcgggaacgggggacacgcgggacttcggcagtcccagtaacttgctttgctgttctgagacctcagcggggcggtcagacctctgctgtctccgcagcgagttgcagtacttggcgcggggagaggaactcgagaggaagctcactgcgcctcgcccctggcgtcggcagcggctgtctgggaccctgtggtccggattcaccaagtggcgcagagctggaatcgagtgggtgcacagtttccaggctccgactattactggcctcgaaggtacaggctcaggcggctcagggccccggcgcagatctgtcggcccgcgggatccccggagtctgagtggggagcactatccgcaccccgtagagtgagtgcgggcggctttcgcaggtgctcaggactggagatctggaccggtggctgtgccgcccggatggcatttgtggcactagcagtcgggaaagcagctgattgaggatttccgcgtttctctttttttgcagatcgtgacgccgccagtaggtgtcagtcatttgccgcacagccacctttgagatccacctgtgtctcccagcggccgaatccaggtttccttcctattcgcacttggagaactcatgcagattgccgtcaggagtggcctcagagatccggagtgggcgaatgggaaatcgcatcttacggcccagaacctgagccctccacaagcacttggctcagtcccttgctcaggccacctcctgttctcttctgctctgtgaaagacactgttaagagaatgaaaagacacgccacagactggagaaaatatttgcataatacgtatgtatctgctgaagcactggtatacaaaatatacatagaatgttaaaactcataataaggtaaaaaattaatgggcaaaatatttaaacagaaaccccgccaaagaagatatgcagatggtaaacagtataaaaagatgccaaacatcattgacatatgctatatgtcaatatttagctatatataactaaacatcagtaaatacttctgattgcaatttaaacatcagtaagataccataattgcaaattaaacatcagtaagatattactacacaccattcaattggctaaaattcaaaacaccacatgctaaggaggaggtggagtaacaggtactctcattcattactgatgagaatgcaaaatggtacagccactttggaggacagtatggcaatttcttacaaagctaaaacacagtcctacaatacaattcaaccaccacaatccacgtgtttatccaaatgagcttaaagtgaatgtccacataaggacctgcatgtgaatgtttatagaagttttattcatagttgccaaaaattggaagcaaccaagaagtccttcaacaggcaaatgaataaactgtggcataaccatacaatggaatattattcaacactaaaaagaaatgcactatcaagtcacgaaaagatatagaggaacctaaaatccatattgctaagtgaatggaaccatctgaaaaggctacatatgacttcaaatatatgacaatctggaaaaggcaaaacaatagagatagcaaacagagtgcaaccgtggttgcaggagaggtggtaaagaaatgtgggataccattaagcacaccaacatacacaaaatgaaagcactaggaaaggaaagagagaaaggagtagaaaaaattgtcaaagagagtggctgaaaacttcccaatctaattgaaaaacattaatctacatgtccagaaagcgcaacaaattctacataggattatacaaagagttccacaaacagacatgtcaagtaaaagcgctgaaagacaaagacaaagagaaaatcttgaaagtaacaagagaaaaatgactc

SEQ ID NO: 585631 - DNA, 4001 bp, Homo sapiens
cttataactacttagataaaagggagaaacattttctctcttcctttaaaacaatcgaatcggtgattcgatatactcttctattaattggagggacattctctcgagggagctcataatcccaactgaccaatgaccataattacaaaatgtgatctcaactgcagtttacagactttcagatctatcatggatatttccaaagcagttttgaaatttcttgcctgccatgttgcttatgtgttatgctcacatactgtagcaaatgcttcataacattcttaattcttcctggagactgtttcaaaataagcaggcatcagtgctctagtgtgtcaaccgtattagtcagtcttgtggtgaaaagtatgggacttttgtttcccatgacacatttttatttaatagcatagaatgtaaccatttagaggcagaagatgcaccatgattcagctattttgagggactgatatgattaaagaaactcaactatcaaatatttcccatttaaatgtataaaattttgaggacagagaatatcttagatttcaattaatatttgtatcccaaactcctgaagacacacacacacacacacacacacacacacacacacacacacacacagatttttcaggacagaacctcagagatatctggaatctgggatcagccagagctcttcattttgcgaatatggaaactgagatccaattttttgtttatattttctgtctcatgtagttcttgtttggttttctattgtcacaaagaacaatgccaagttattgtactctcacaagaggatattttcatgcaacagtccgtagaattaaaaacaagaaggaaaaaaaatagccactaaacttagtatgaacaggcaacaataattttttaaggctgctataaaactcaattgcagtttgtaggcttgcaaattcaaaatatctaactaccggaattagagtgaaaagtcaggaagcaacgaagtttagtaaatcaaattgcgtccaaaagtgggcttctaattctacttttccatttattatttacaaacagaatttttcactttctgcaaatgtcttctggctaaatttttggcactgcccctcttactgtattttggttgtgcctttcatctttgcctaaaatacagaccctcaaaactataccactgtaaccgacatggtgataagacaatttaggggttggcaaatttcttttttggcagggggatccccaaatggagaaaacaggtccgcgcgacctttgatgaggcagcttttttgtacccccaactctgtgagaacagtgtgagagcactgacaccagtcaggccctttgcttacagaccgggggcgggagtaggggggaaggaaactcccggcgctggcatgacttccccaggactgacaagggcccctaggaacggcttttctcccttgcaaaactggcctgtttatttcggctccagggtgcctggggccagagtaggacctgcaggaaaagatctgggaggaatattcgcccagaagcctctagggcatacgactcgcgttcttcaggggtcggcgcggataggaaccgcagcaaaggatcccctagacctccgagctgtgagcggcgacacagccgggaccccagaccccggaccccagggcgcggagttgaccggagccgggaagggagcggcgcgggcagcgcggggcagcgagacgcaagcgctcgcaggggtcggcggcccagcagaagccgcgcccgctaagttgcccgaagcggccgcgaggtgcgagggtgcggacagcaccggaaggcggcggacgcagcgcccccgggctcaccttcttacctttccttcccagccctgcccggagcttcagcccggcgcccgcagaagtttcccggcggagcgcgcttgacccgggtggcccgcgcggaagccctcagcgtccccctcgtgagtgcctcgccgcccaccctgcggcgccgggcgcagcgtgaccgcagcgggctccggagcggcgcggcggcgcgggcgggtgccgggcacgggcgcgcgccccggggcgcagccgggtgggcgggcgcggcggctgcgtctgggccggggcaggcggttcggccaccggggtgcggggctgcggagaatcctagcggccgctacggaccgaagtttccaaagatgcggttccccgagtgtacaccgctcccggttgtaacatacacctagtattcacagtcacactaggcaggagcgatgggctggctgctgaaccaaggcaactgcacgcctgctctctcacccccgctccacacacaccgtaaacaaaatgaagaggtaaatcaccatagtggggacgggaatattagggtgtattggacagagagagagagagagagaggtaaatatagtattttttttttttttagagatggtgtctcgctctgtcacccaggctggagtgcagtggtgatcacggctcactgcaatctcgacctcctgggcccaggcatcctcctgactcagcctcctaaagcttaggattgcagatgtgagccaccgcacccaaccaataaatacggactgttgcatgaaaaataaaatatctatattcaaatcaatgaacatctctaaaagcaaatgagtaaagggcatagacaatcataaaaggaaaaaatttaaaaacacaaatgacaaaaagctcatatcagtaataaccaaatgcatacaattttaaagcaatgatcaggtgcattttttcttcctttgcaattagcaaagttttgttttgtttttgtgatgaaacaaatgtgagggttggtgacgaccagtaaaacacgccactaatttaagaatgtcatctcctgtcttctagttcgctttcattttatataaccatattgataacagcgactccaggaacaagaatttattgagcaatcagtgtcttttttgagccccagggtaaccacaaaaacagtgaatatagatggtaaaattaactccctttaattgatgctggaactgaggatcaagaaatacacatattcttacaccccagaaatggctagaaaccagttgactcctaggcctttgctctttctcttcattgcagggatttactcaaatgttggaaatccagtttgaactggatgtagtccatagtgtgtgtgtgtgtgtgtgtgtgtgtgtgtgtgtgtgtatatatatgtatatatatatatatacacacacacacacctttaaactatggccagggaagtgagaagcccatgaactttgaggtcagatgtactctggatttagattttacttgtttagtgtcctacattttaaaaatttaaggattatattactgttatttttaatttaaaaactcagaagctgttactgttgccctggattcttatgatctcccatgatagagattaacagagatcaccaaacatagcagcaaaggaaagtgtattcagcttgtgcgcaagggagtcagcaccaagaaaggcaaaggaacggactgctctgaggatagtgtgtgggtcagttttatagggtctttctataggggagggttacatcagggcacctataggaggagtttttctagtgcttgcacagtggcccaatatgctttttcatacatcatatgtagcattagcattttaaatctccaccccaggagtaatttttagcattaaagtgaggaaggggtaaatgtaggttggagtttaagtctaactgtacaggcggggatctggggaagtccctagccctctgaaataggagcttgcagttaacagcttcttgggtgttttgttacctattgactgagagttagataagctagagcttgagtaaggagcttttatcctttttcaccacaccatcttaaaatagctttcctgtctcaatgcaacaaagatatccctgtgtgacagattcttcagtggccccaatagtttctgattcccagtacctgttcatgttcatacctgtgtta

SEQ ID NO: 585632 - DNA, 4001 bp, Homo sapiens
ctatatgaaagaacatgtgtattttttcctctttcctgatgggaatccacaataaataaacacagcagcatgtgccaactctaagcatcaggaagctgcattttgtgtttatcatggtttggtggattttttttcctttttggtaatttatttagttttgccaggtatttatctcagtgcttgccatctctctgtctctctctctttctagctatcacacactctcctcactctctccaggagacactccactccattgcctggttactcgcctgcaaaggtcaaaacacatcattacacctgctacctttaaaggatagtccagtgtcttagttgctttccttttgccttattttttttgtctttttaagggacggggaaataataattaaaaataaaagaacaatcagaagttagagagggaacaagagggccgggaaagggccaaggaccgaaggggagggggagccccgcgctctgcccctcccccagctcgagttcactggacgggcgtctgcaccccgtggtgtggtggagtgtccctactccccccgtacacatcctcggcgcccggcagagtccctccgggaggggtcatccttttctctttctgtctcctgttacaaaaccaaactctcaccacctccttctccagctgtaagctgtccgcgagggaggtgatctcctgggccgagggcttggggcatttgaggaaatggctctccagagcccccttgacgctcacctcgatggaggtccgctttttccgcttgcgcccttgcgctgcgatcttgtctatgctcgtggggctgcccgaggacgagtccgcctcctccaaccacttgttcaacaaaggcttcagcttgcacatgttcttgaagctcagctgcagggcctcaaacctgcagatggtggtctgcgagaacacgttgccatacagggtgcccagagccagccccacgtccgcttgggtaaatcccagtttgatccgccgctgcttgaactgcttggcgaactgctccaggtcgtccgaggtcggcgtgtcctcgtccgagtgcgggtcgtggtgcgcgcctgggtggccaggcggaccctgcgggggcggcgggggcggcggctgctggtgtgggtgcgagtgcgggtgcgggtggtggtcggcatggtgtggctcgtcgtgcgcgtcccgcaggccgtggtggtgcagaccggccggctgcccgccggcgcccagcatgccgttcaccgtgaagctgggctgcgagtagagcaagccgccgttggacgctcccatggagggtgggaggtgcgctgcagccgccgcgctccgccatgccccgggtcccgggtggtggttagcggcgtggtgcaccagatgcggcggccgctgttgctgctgctgctgctgctgttgctgctgttgctgctgctgttgctgttgctgctgctgatgctgctgctgcagggcgcctggcccgtgcagctcgtctccgcggccgccctgctgcaccaccaccgagggcttgatgtccggctggcccagggggctggtggaccacggggagccgtcgccgccgcccccgccgccgcccccgccccccccgccgccgccaccgcccccgccgccgccgccgtgggacagcgcggtgatccactggtgagcgtggctgagcgggtgtccgttgctctgcagagcgccgtagtcgccctgcaccaggctctgcgcttcgcggtagccccccgcgccctgctgcatgccgccgggcggctcggcgtgcacgatggaggcgctggaggtgagcaggctgtagtggttagacgctgcggtcgccatgactctcggagccggactgagcgctccggttaaaggagccgcgcatttgacagttactttttcgcctcgggctccctctcctcgctcgctctttctgtctcctctctctcccacagcgggcagctccgacgcccgctccgacgccttctgttgctgctcctgctattactgctgctgctgccgccgccgccgcctcccgcccgccctcgctctctttctcctcctctccctccttctcgctctcgctcactctctgactagctcggcgctcccccctctccctgctctctccagctctctcccgctctcttggcagcgccggctcgcagcggcacgcgcctgggccccgccccctccgccccctcccattggctccgcgccctttgatttacgtggataccgctagcaacctcccaggccggcgccactgattggcgcagagctactccctccccctcccccgggctcggagtcctcctagccctcctccccgtccccttcgcctcccgattcagattctctcagttctcacccccccgcttcttcctcacccggggcctcctccgccctctctcggatgggccccgccccccatctgtctcccaggcagagaagaccggcaggggggcggtcccggtgctcttatcggccacagacacttggaagacttggattggggtggggggcgggaggcagtggtgtccactttcgtttcccaatagggctttaagatggggaaacggagggggtaagggaaaagctgggtcgcaccgagccagcgggagtcggatttttattcacctagggacacacacacagtgtgtatctcttaaacctagagccaagagccagacctgttcccctgttcaactctccttgcatcccacggttagaatttcagtgcacaagtgtctcttgctccagggtgtgcggacacttcggcccaaagctcttctccttcccctctaccccgcggctagcacaggctctcttccttttaggttccaggcccaattgtctcccactcccttggggaaagaaccccgagagaggcaggctcagcccgcaccgcggcttgtaagtcattcccatcaaggctcggagttgcttgctctgacagcgtagcggtctgaactgaaaaccaaacaaaactctaaaagtctctccgtcagattcacacgccggcgcgtgcagtttttggtttagaaaactagaagcctgcgtgggctccgtcttgtgcgaggctgccggagtgctggcgaggggtgtgcggccttgtaggggcggcgcagtcgccaaaggccgctccgggaagccgcgcggagggcctgcgtgcgcgattccccgtgctcctaccgctggtaggtgcaacttttccgttagccccttgggaaggaggaagagtgtgtgaagcaaatgggctgatgccaggggaaccttcctaatcagtaacttcggtgggcgctagcgggtggggttagtctatgtctttggcgctccctggccaagctcccagctcagctttcagcagtgaactccagagcaagactatgggaccatgcacccgcagcgccgctctacggagcgcgggcgcgtcgcgccatcagttctttagccgcccagagcaggtgccgcctgcgagtttccgagcctgcaagcccggtagctagaacttgggcgcggacccaggctggagcggcgtgaccgccacgcagggccgggtgtgtacatgggcgctgtaaagcgaatcaacagttactgccgggaagggaatgacagaccccagggaacctggatcgcgtccccacctctcacccctcgctctatcgctggttttgccggcggtcgtaggcttgagagggcagccaaatcaacgctcagagggagcattttggggcctctgagcatctgaatccagacagcagactggagcgggccagaaaattcatcatgactaacaaggagtcatgctctttggagagtggctgagctgtttataaatcaccacgttgagcacccgcccgggcaagacgctttggctgagaatttccacgtgtcctgtgtttatgagcgtgtgtgggggagagaaatggataggggaggggcgagcccacaggccgccagcaggacggacctgcacccccaccacgcgcgcacccgcgcggcgagg

SEQ ID NO: 585633 - DNA, 4001 bp, Homo sapiens
tgcagtgtgggtttcgggcactgcaggaacaaattctccaggttgcctctcactcggttctcgatactggttcgctttctctttcgggcctgcacgagggtttctgctttgcatatctgtgcaggtgggaagggggtgacaagggcaagctttggacttgctgagtaacagcatcacaggggtctgtgactagatgtgtcagcagagccaggtggtggtgtgaaaaggcaggatcctggaagggttggctctggaccttatcccagcagaactgaggaatttcactccatcccactgagaaccactgcaccaaagacggagagctacgagccagtgatggaagcaatggaaattaggccaagaaagggaaggtccccgggtatccccctcccacccttacctcctgaagattttcattgttgtcagcttcctccacccacttctgcagcaagggccgcagcttacacatgttcttgaagctaagctgcagagcctcaaagcggcagatggtcgtttggctgaataccttccctgggggaggccagtcaaaagagaagcaaagtgagggagcacgcagggcccttgtgaccctgagatccaagcttaccacctcttcccagagggagctcaaagcatcttctccctctccctactcctcttcatgggtgagggtagtctgcccctgcccctccccactaggttcagggatactccttagaggggagatgcggtcagaatctgcagaggggaacccaccaaatagaacccccagggtgagccccacatcggcctgtgtatatcccagggtgatcctcttctgcttcaggagcttggcaaattgctcgagttctttctgcagagctttgatgtcctgggactggattttaaaaggcagaagacttgtaagaacataaacacaccagttatcaatctcccctttccattcgggattcaagaacctacgtgtggccccaaggaatagtctgtagaagtgcctctgccttccaagctgcccacctaacttctagaaataacctacccacaaatgtcattcacccattccctgttcactgactcatgcatgtaacaaaggactactcttcccccagaaactggcacatccaagggatgcagagcatcgtgaaaggacagaaagagagaccctggcctcgagaacacctgtcaggttatgaaggttagaagttctttgctgggcgcggtggctcacgcctataattccagcactttgggaggccgaggtgggcagatcacgaggtcaggagttcaagaccagcatggccaacatggtgaaaccccgtctctactaaaaacacaaaaattagctgggcacggtggcacgcacctgtaatcccagctactcaggaggctgaggcaggagaatcacttgaacccgggaggcggaggttgcagtgagctgagatcacgccactgcactccagcctgggtgacagagcaagactctgtctcaaagaaaaaaaaaaaagaagatagttcatttaatacctgcaaaattctctcactcaagtatcacccccagtttaaggatgttttgagattagagaaatagataagctgctaagttctgggttaattaaaaaggaagagcatcatgtctcagaagctaaattcagtatatactctccccagcttgctttgagggtcccacaaactataacatggcatgcatacacacaaacacagcaaaaaagtaacaggtgtcataagaatggataaagtgctttgtgtgtacttactcattttttaaattgattatccctcatctttactgtatctttttcactatagaggcatcctaattgatttttaaattcaagagatttatcgagcaccttctataagccagcggctatacaaagtggacaaagagccctgacatccagcatgacagaagtgctatttggcacttgttcttcaagttgcccacttggatctcttccaagtgcactttccttttttccctgccctataactttttaataataaacttccactcctgctctgaaaaataaaaaagtaaataaaataaaaaatggccaggcacagtggctcatgtctgtaaatcctagcactttgggaggccaaggtgggcagactgcttgagcccaagagttagaaagcagcctgggtaacatagtgagacccgtgccgccccttctcccacccctgctgcctctatttaaaatatatatatatattatggaaaaaagtaaagcagtctgggcgcagtggtcatgcctgtaatcccttcactttgggaggccaaggtgggtagatcacttgaggtcaggagttcaagactagcctggtcaacatagtgagactctgtctctactaaaaatacaaaaattagctgggcatcatggcgctcccctataatcccagctactcaggaggctgaggcaggagaattgcttgaacctaggaggtggagtttgcagtgagccaagatcgcaccactgcactccagcctgagggacagagtgagactccatctcaaaaattaaaaaaaaaataaagcagtctataggagtagggtaaaggagggaaggagattatggaggagggtgacacttttaaagacagagaaggtgattgtttgagcaaaggacaagagtctaatgtggcaaggccctgaagtgggccttccagagcccaaagctggtctggtggctaggtagatcctgttgcagacatagtgactttgttttagtccaagcgaaatgatctctcaccctttttctccccaccaagacggaatctcgttctatcgcccaggctggagtgctgtggcgtgatcttggctcactgcaatctccgccttctgggttcaagctattctgcctcagccgcctgagtagctgggactacaggcacccaccaccatgcccggctaatttttgtatttttagtagatatggggtttcaccatgttggccaggctggtcaggagacctcaagtgatctgtccaccttggcctcccaaagtgctgggattacaggtgtgaaccaccgcacctagcctcaccttttttttttttttttttgagagtttcgcttttgttgcctaggctggagtgcactggcgcgatctcggctcaccgcaacctccatctcccaggttcaagcgattctcctgcctcagcttcctgagtagctgagattacaggcatgcgtcaccacgcccagctaattttgtatttttagtagagatggggtttcgccatgttggtcaggctggactcgaactcccgacctcaggtgattcgcctgcctcggcctcccaaagtgcctggccacaccttttaaaacactgactctagttgacgtgttggccacagacagtagggaggaagcagtataatttgagaagctactgcggtaatcccagcagagatgatggtggctgaggccagggttaggttgtgattgattcaggatgtttcttaaggataggatgtaggacatgaaagaaactgaggatgactgggtttggccttgagcaactgggtgatcagggtggagcagttcagggagccatcacaagagacagaaaacgcggtagtcatctggtgtctaaatggcatttaagccttgagggtgggtgagaggaaggaagggtagatagagcagaggttgaaggactgagccctggggcatgccatatgaggctgccggcagacagaggtgcacagctagtgagaaaaaaacaaggcctttttgtagttctgaagcctcaaggaagtgtttcaatggtgcttgatcatatcaatttcaaataggctgttttcatccccaacttctgctcagccaataactcaaactgataaatgccctctgctatcttggattttccaaattctgttttggggttttggaataaacactggtccaaatcctcgcttcatcatttagcagttaaaacccgttaaataggataataatacctccccctaggagat

SEQ ID NO: 585634 - DNA, 4001 bp, Homo sapiens
gactgggtttggccttgagcaactgggtgatcagggtggagcagttcagggagccatcacaagagacagaaaacgcggtagtcatctggtgtctaaatggcatttaagccttgagggtgggtgagaggaaggaagggtagatagagcagaggttgaaggactgagccctggggcatgccatatgaggctgccggcagacagaggtgcacagctagtgagaaaaaaacaaggcctttttgtagttctgaagcctcaaggaagtgtttcaatggtgcttgatcatatcaatttcaaataggctgttttcatccccaacttctgctcagccaataactcaaactgataaatgccctctgctatcttggattttccaaattctgttttggggttttggaataaacactggtccaaatcctcgcttcatcatttagcagttaaaacccgttaaataggataataatacctccccctaggagattttgtgctggttaatgagataatgatgtataaacggagcacacagccaggcacttaggaagtggaccacaattgccagccattatcattcaaggctcagcagtgacctcctgcgaagaggttggggcttctcggtcactccagaaaccagtcacacctttctgtgaggtctcaaggcttagtatttaatctctaattgcttacacttgtcgccttgaaggactggaagatacatctttaatagtcctcagcagggctggatgccttcaatcccgcagcagctctatatttgcaaatggcctggagaaatctctcaccatttttcttgtttacaactttggaactgaggctgaagtcaatcaaaatccagctttctacaaggggtgccagggtgtgcaccttaacacagtggccagtcattggcctgaggcagagatccggggaagacaagccctatacttgactggaggtaaacccagctcacaacgcgcacacacacagcccaaacaggagatcctatcagaaacgagtcacaccctagactttcaggaacaataatcctggaatgagcactgtttttaccctcaggctatgcttaaccctaaggccaaaatcttgggtctgataagggtcaaattttcaagcaggactaagggtgggaaaaggggctcaaaccaaccccaagctgggtctggtgctgggccagtaatgagtgaccagaccctgggcaggcctaggagatgtgagagaccctgacaagggctgggccagagcaaaggccagcctgggccagcttccgactctcccaggctgctctgccctcaccggcagttgtctcttcgaaatccagcttccacttcccacctggcccctgcctgccagggctgccagcagttgatacacacccctccctggccagggcagctgaccctgcctgctcctctcctgggtgccaggtctgggcagctgcaggtgaccacttccccatcaggctgccctgtcatgaccacctccccacaccccaaccccgtcgaagctcacttgcctcctccgggttttgctccagcttctccttctccagcttcacggcaccaggggtgacggtgcagggctccggggaggccccatcggagttgctctccaccccgactcctgcttcgccctcaggctgagaggtctccaagccgccttggggcactagccccactccaacctggggcccacagtacgccatccccccacagaactcatacggcggggggcatgggggaatcccccacacctcagagcctggcccaacccccggcccgattcctggccctccaggagggccttggaagcttagccaggtccgaggatcaacccagcccggctccggcccccctggcccatcacctccaccacctggagggggcgagaaggcgaaatccgaagccaggtgtcccgccatggggaaggaaggcgccccaagccgggggcctggtgaaatgagggcttgcgaagggactactcaacccctctctccctccccagtcccacccactagccttgacctctggccccgccccctggatgggtggaggagagggaggtggggggagaaactgaggcgaaggatgtttgcctaatggtggtggcaatggtgtctgtggaaggggaaaaccgggagacacaactggcgcccctccaggacctcagtgcaggtcccccacagaaactttttttatttttattttttaagacagggtctcactttgttgcccagactggagtgcagtggagtacaatgatggctcaatgtagcctcgatctactgggccaaagcaatccttctgctccagcctcctaagtggctgggactacaggcttggaccactgtgccctgttagtttttttatttttagtagagatggggccttgctatgttacccaggctggtcttgaattcctgtcctcaagaaatcctcccgcctctgccgcccagtgtcatgattaaaggcgtgagccaccacacccaactttcaactcccaacccgctccctggcactctctcaggctctgcacatcccagctgtctggaatcactcccacacctccatgttcttcaggaacccaggtgcttgaccccctctccacagacctctggcactgtgccttcaggggccagtcaccctctcagctcctcaaatttattgaatgtgtgtgtggcgctatccctcaatgcatcaacagccataagcacaatggccagctgctcccttatgccttcccccgatccatccagaatcctaggcattcccatcccgatactggccaaatccagccaccccgcagcctgggtgcctggcaccatctgcccagcctgccaaatttcaccccatcttcaagagtagactgccagacaaggcctccgtgctatatccccccacccccccatccccccacccctccgtcttccagaatcagactccagactctcctcatctaacagactaaggggttggtccctacttccccttcaagggaccagactttggactgactgggcctcagtttcccaacctttgctgaaacagagtgataagacacccgctttgggccccctccactatggaacctgcacatcaggttccttgctcccctctcaaccaaaactcagacatctaataccacggtaggccccgttctccctcccccacctccctggcccaggcctccagccctaggccctgggtggggaaaaccagggggtggggggtgtggagaaaaaatatctgacttcaggttcaaagaagcctgggagggactgggggaagggggcaggacaatggccttggctggacaatcccggtccccagagggggcagctctaaccctaaacaagtgctcaacccttgaatgggcctggatggctcccctggggactgcttcctgctccccaaccccccagtcccaatcccctcacacagaatccccttcagagacgctaaaaggagctccagcaacccccctctgcaatcccctcaaagactgagcctcagacgggcaccaagggccccccacagggacctaggtatctagttcctccttcctctgggggactcaggcgtccagcttcatcgtgcgtccctccccgagcctggcagattgagggatgtgctttgtttagtggggctggctggcagaaagacgcagaggaggtggagagtgatttgtggaggcgtgcaggaaggctgccctaagctccccttcagggtctgtttttctgggcctggcctgagtatcctgaggctcatgctgctggtctagtgcttgattctgtttgcaagagaatagccaacggaatgcctgtctgtgagggatgatgtttgtctgtctgctcccaaaacttgatctcagtggagggcctggggtaagtctgggggctccagagggggctctgggccagggctccccacagcttcgaaggccagaaggccaggtctggactgggcacgctgacctctgtcgacttaagtaaggct

SEQ ID NO: 585635 - DNA, 4001 bp, Homo sapiens
atgttatttcttgaatacttctttagagaaccaacgccaaataaaggagctcaaactgaaggatatgacgagaatcttctgcttggtaaggttaaacatccagacacacatggaaggtggtgggctctcaagccccagagaagatgatctatgtgactggaagcagatgtgtctgctcaagttcctgacaaggtctaactactgcagccccacagcccaccagggtagttatcaatctgatacctcatactatgcctgggcaaagggaacagagctctgggattgccgttcctcctggatacagaggaaattaagctcccagggaaaaagagggacaatttggattccctagattcagaaaagaacaaagaaaaaagagggagaagagactccaagagaacatgttcagtgaccaacatcagaggcacattcagttggccaaagattgtcaaagagatatgagagaaaatcagcagctgtttcaagccaccaataataaaaggggacagatgcccgccagccccagggctatcaggccagcaatctatttcaaaactcaaacgggaaaaaaaaaagttctggagccagtacacagaaaaaaggttgaggaccacaagtattttctggagcacagcttctggagaattctcttagtcctttcggatggagcacagggtggagggtgggagtgagggcagagagaggctggggtatcatggtataagtgtattccacacatccagagtggaaagacacaaaaccccggttcctggaaggggaaaagaattggacaaagcctccggctacccgtggcacacatccagctcagcgccgtctcccccaagggttcctggaagtcaacagccccataaaggggaagtattaaagctgagataagaagaatggcctacaaattggacatcatctctgatgcaacacccacgtacattctcccacacaatctgttatttcctttagtcaatcagcctcttaattcgatcaaggtctgaacacctccacccccaccccatggttatgtcaactgcaggtcaagtgaaagtagagtagagtgtggagctaaggcttctccctgaagcaggggaaaggaacagggagagaaaaggaggtgggcgacaggaatgtaggggacagaattgatacgaaggaaatcggaaaaaggagcaaaaacagggcctctcagggaaccaaggtgagagtcttagggagacagggactgcaggcacggagttggaaaaagcctaggaacaccctggggaagaggatggggacccataatactaggagggatcagaccacagataagaaggggacagggatggggagagagagtaaagcctgagagagcaaggatgggaggatgaaggcaggagacaaggataacgagggggacagaggaaaagatcccagagaagactctcgctagatagggcagtggattcaggaacaccagaaacgggtgaaggaagaggtcagaggcaggggaggggaatgggagaggcccccgggcctgagacggggttctcacaagtgggagaagacgaagccaccaggcccaagagggggcaaagagtagggtggaaggaggcccgtatttcggactcactcaagcagctatgggggtccaagggcgggggggcgcagggtcagcggggcgcctacatggcaacgcacgacggctgaccggagcgggccggagcatcaggaagccgccgtgacgctgtccgcggaccccggcagctccccgcaccccgttccccgccgccgggccttgcgccccagtcccgctggccgcctcggcccaggcccggcgcttccctccgccacttgcctgaccgcttctctcgtctcggactgacctgtcccggctgcctacggcgccaccgccgccgtcccgcaggctccgcagaattctcccgctcctgccaaaacttttcccattaatccccaggtccgcggcggccgcagcgtcacacgctccgcggcccggccccgcccccgccagcgagacgtcaccgcgctgctcggcctttccctccccacgcccccttccgcccggcggcggccaatcaccacgcctcctggagactcccctaattctgcctctccgcccaccgcacgctgccccgggccagcctgtggcgccctctggtgcgggatgcggacgtagcagctaagggaggagcaggggagcgccaggtccagtagaacaagtccagcaagtgacacaagagggaatttaaagctggaagggaatttctaggtcatctagtgcaacctcctcatcttccagtgaagaaacttagtcctagaaaaggtacgtgacttgcagtgacaagtctggagagactcttaacccagtgctaggtccactggaggagatcatatcgcctataattttcaaaaaagggctttccgccttcaagaggcttctacaactggaaatttacggtcttagagttcttaacctttcttcccatgtgcttatgcaatacgcttattcacctaaaataggggacatcctccttattgttgtagaaaattctgttcttattaatccacatctttaagacctggaagggacctattatcccaacctaccgcttaagatgtaccacaggaaactacctagcagctgggaggcaatctggtggaagaagttggctttcatctgacgatgaacaaagcttgactctcaggtatatgaccaatgcctcccctccatcatcattaaagatgacccctcccctctccttcggccacaccttccgtaggccgcaagctccttaggccacacctagctatctggatgagtgatttttttttttttttttttttttgagacacagtttcactctgtcgcccctgctggagtgcagttgcgcaatctcagcccgctgcaacctccgcctcccgggttcaagcgattatcctgcctcaacctcccaagtagctgggattacaggcatgcgccacacgcccagctaattattgtaattttagtagagacagggttttgccatgttgcccaggctggtcttgaactcctggactcaagttatcctcccaccttagcctcccaaagtgctggaattacaggcgtgagccaccgtgcctggcagggatgagtgattttttcccccttctttctgcttctctttttctttttcttttttttcccctactttttgaaatgcttgtgcattatatttgtaacttagatgtcaacctccttgccctttgagattgaggtaaaaatggacggtgaaagtcagagtccctcccttaacatatttgcaaatatctggggatttatattctcctaaatatctctgcctctgggtttctgcttttgccaggctgttgcgtaccacagttcagaagtctggagaggaaactcagctctccctaaggactgcccgcacccttcccacacaaaacattgacgagtacaaagacattagggtactctgggccctgggggaggtcatatgatacatggcaaacagtttaaactcacccctcagaagttttttttttttttttttcccaaggcagaagaatttttcttagtgcagaacaaaatgagaagtctcccatgtctacttctttctacacagacacggcaaccatccgatttctcaatcttttccccacctttcccgcctttctattccacaaagtcgccattgtcatcctggcccgttctcaatgagctgttgggcacacctcccagacggggtggtggccgggcagaggggctcctcacttcccagtaggggcggccgggcagaggcgcccctcacctcccagacggggcggctggccgggtggggggctgacccccctacctccctcccggacggggcggctggccgggcggggggctgaccccccacctccctcccggacggggtggctgccgggcggagacgctcctcacttcccagatggggtggctgccgggcggagaggctcctcac

SEQ ID NO: 585636 - DNA, 4001 bp, Homo sapiens
gaaattcatccaattcatctttcacactgctcccattcaacacagattgacagttactctgtgtgtggtactctttccctcatgaagcttacattctggaggatattttcaaaatacagaaagtagccttttggaaagacaatcaggaagtacgtatacaattctgaaatgtgcatacctcagtaatttcaacttccaagtatcctctaggaaaatatacaaaagtgcctaaggatacaatatgtgcaaggatgttcatctcagtatttgtcatagccaaaaaaaaaggaagcaacttaaatgtccttgaaataggaaatgcctaaaatatcaactatccatactatgggcagctacctgaattactgagtgaaagaaaaccaagttacagaaaaaacatacatacagtatgatcatatgatcccatttttttgttaaaaaaacatgagagaggtttatatgtacatagaaaaaagtctggacaatcatccaacaaactgttgatggtgttttcaggaaggaggtgactttcacttcttactctgtatgtctacattgcttggatttaacaatttattttgtaactttaaaaaataccaacaggagaattcagaaattacaggttggagcctgaagatgtagaattttgccatataaggtggggaagatggccagggagcatgaaatgaacagcatgagcaaatagagagaggactgacagaactctgctttagctgaaagcagcaatgggcaagaacagaaaggcagaggaccttggctggtccctggctgttgaggggagaatggcaggtagacaagggccagatgaaaaaaatcaccttgaatgtcaggattaatacgtttttactttatactgttatagcagcaagacgttattaaaggttttttgagcaggatcccttccttgtcctactttgtaaagatcactttgagctttttccaaagaggcaatggaatgaatagagctaaaggatctagcaaggtgagacgagcacaccaggctccaaacgaggttcttccagttactagctgtgtggctttggtcaaggctttaagctgtaaattccggcgtttcctcctgctaatattgaaagggagaaagttaaataataccttcatgatttgagttgctaagattaaactaaatgagatgacatacagcggggcatggcgccagcaggttggttaccacatcactctttgatagtggggaaaatgtgcttcttcctgtattttactggaatttgtttctacaactgtattacttatcacgtaatgtttacatgtctgtctctttcattataccgtaagctcctaaaggcagggctgtctgtgttttatctacctctgtatcctcagaactcatattccatatgcctggcttgcggactcattacacgtttgttgaatgaatgaatgaatgaatgagcggactgggggaaggaggacaatcaggcagctattgctgagacctcagcacaagaccccgcggagcttggacgcgggcgatggcggtcccctctcaaccctctgggggccgtctcggccgctgctccacgcccctccacgtggaggccggcctcccggaggaacgcgccaggaacgcagacccgtggtgaggcccgggctccgcgtctcctctgccagccccagacgcccgaaccccctcacctggtctccaagtaaacgttgggtggctgccaggaatctgggggaattgccgccatagcgaagccggcggcggaatgcttgtctagtaattgctacttccggcgtcgattagctggggacccgtcgctgctgcacacttccggtccgttcaaccctttcgataccaggatttgggtggccaagacaaggaagaggacggtcccttcttccaatgccgggaagctggggtgggagacgagaagaagctgggctcaagaacagaggaaaatgcaaacttcattcgcggtggtctccaagtggcgataccgcgccactctgggcgatctgattggttcgtttaggcatggaaggcgggaacaaccagaaaagctgcgctctggttggagttatgtcctaatattaaattcgaagaatttcttagtctcacaattgggcagggacgggaaggggaggcagagaatgaaagagggtagtttagagatgccagtaaagaatttttgtaaggcgctgtacgatgtacacagtgcttgcactttcttatctcatctactccacaaaacaattctataagtagatagtattattaccatttttcagatctgaaaatagactcggcagttaatacttgtttttccatagtcataaagcaaatctgagcctgcagaatccaaagacgaggagtctgaggagaaaagagagggaaggggcaggaagaaaataggagataaagaaaggaagagacaggagaaaacaggacaaacggatcagagcaagaacaaggcttaacattggctgggatagatggtacctgaaagttgttaggagggtttgcgcagggcgcgaggaacagaagcaaattagaggagctataatgtttggagggaggacaaaaatgaaatagagtacctaaacttaacgctgtaaatgctttgcacaccacttaataatgatggttgaatgtttaccatgtgccaggcatcaagctaagcattttattgcgtattttcacgcttaatcttcaaaatcccacaaggtagatattactattcccattttactttgaggaagctgagccttacagattaaataacttgcttaaagtactacagctggtgcacttgtgctcttaacgacagttcaactgtaatgtccctaattgtcaacaaggaataaggatgtacaaggttgtaaagataaactagacagctccttgagagaggagctgggcctccttcatctttgtgctcttcttgcacagtacagagcacagggtgctcagctttgctgaatgaataatgaacggaacactacattttaaactgataaatgctaaagtataatttttacacctcctgcagtttcaagttcatgcccaccttgtggcccttgagctggatgaaaaagtcttaatccttggtctgtttagtctgttgttaagttgcctttctctggactttatgtagttctttactgtgtatctcgggagtcatgtgccattcccaggctccaatgtctgaatattgaaaagccacccccaagatcatgatcactttcttcctaaatcttttactgcagctcctaccagtcacttggcactgaggagacagagatgagtctcacacacacagtgccctgccctaaagaaactcacattctaggagagatgggcaactaaatacgtagctgtaggagcgtggaatgaggactgtaataagaagcacacagtaggttgggtgcagtggctgacacctgtaatctggcactttcggaggccgaggcgggcagatcatctgaggtcaggagttcaagaccaacctgaccaacatggtgaaaccctgtctctactaaaaatacaaaataagctgggcatagtggtgcatgcctgtaatccctgctacttcggaggctgaggcaggagaatcacttgaacacggaaggtggaggctgcagtgagcagagattttgcctttgcactccaccctgcacaacaaaagtgaaactccatctcaaaaaaaaaaaaaaaaagaagaagaagaagaagaagaagaaacacagttttccctgagctctggttactccagagtaggtttggacagtcaaaaatttcccctggagtgacagcctgggttgagatccagaaaataaattggagttagccagaagccatgaggggtcaaatcaaatcaagaaataaaatgtctccaattcctcagaagcccccctactaatcattacccattccttcctcccaaagggtagaccactttctgccttctaatatcatagattggttttccctgtttttgaat

SEQ ID NO: 585637 - DNA, 4001 bp, Homo sapiens
tagctctacacccctttatttcctcataactctgggaaaagaggcccatttattttgccaggtgctactctacatgggcagagcgtcaaaggaactcaaagaaaagcaaaatcaagagataaaaaacaaaattccctatgatattctttgaaacactcgatccagccactcgatccaagcttaccccagtattatgaggcaaccaattattttgtttatgccagtttgagttgggtttctatcacttgaacaaagggtcctaactaatacaacacatttatatccattagtcatcataatgaacctctagtgtgtgccctaaaagtagcagacattgtactgggtactcaggatatagagatgataattatggtatagttcctgctctcattggagtttacattcttgagcgagggcacgcttgtaaacaacaccaggataataggtaaatgttaaaataaaatgtgtcatgtggtttataaaagacctaagacacagcagaggaaccctcaggtaactctgcttagaaaggagggagagcttcaaagaagagatgatgcttgatctgagatttagataataagtagtaagtttgccagaaggacaatagtggagaagaatattgtttagaagaaacagcaaaagaatggtaacaatggtacgggagagtttgtagtgttttcgccaggtggagaggagggaggaatagctgcgtgcgagggaaagcggagcacggcaggaggtagttattgtacaatattgcaacttatttcaccttctttgataggctctgcattccatgtgggtaggaccctgtttgtaactaatctctcctggtctcagtttcttcctgactctgatacattctccacaccgctgcctattatcttctcaaaacaagtatgccatgcctcaatcctgcttttaaagtcttcaaggactctgatcatcagtagggcacacaagactattcacgactgacctaggcgtatctgaccacactcgagtctaccattccacgactcacaccagtccttccagccacaccaaactacttgccgtttccagaaaattccaaacaaagaaagtccaagctaagaaaaccctcattcccattcatctttgaaagaactagttcaagtgttctatatagtattcgctagctttgcttcttcccaccccccaccaaagaagccgccctcttctggtttccgtggcaacttacacattcttctaccataacacatagaaaactaaaatgggttcctgtgtctacttcccccagtggaaaaatcagaccctcgggggcaagaagccaagcccaggacttagcccagtgcctcgaaggctcagtccacactccagacaacctcttcctcctccacctaagcggtatgcccacactcgctgcgccaagcacaccctaactgccttcatcaagatttaaccgattacacaccaagcaatagttcctatgttcctctcacgagtaaacacaataaaggcacaaaagctatgggtattgtatgtgcagctcgaatcacacacacacacgccccacacacacactcccaaaggcaattaatgaccgcaagcaccgtccaccggactggccaacacaaaatacgggagaagggctgccaaggctcaaacgaattcccgtcacaaaaacttttctagccaaggccggttaataaaatagcccagtcgcgggcaccagcagcccagaagctcgagctctagccaatctctgccctggactgcgcagagaagggaaagtagggagacaagctcgggggccccggcgacaggtgagtggggctcaagcctcaccacgcggccgttcttcggtgtacaagtcgatgacgacgtcgcctaaagtggtctccagtagaaccgccatggcgcccgctcctcctccgctacaaaccccgggaggaggggggtgacaggcgcaggccgacggcgtcgtctacgccacgcgtcaccctcggcgcgaccccttttgcgtcatctcgccggcgccgcccccggttccgagcagttccttccggtcggcgtgcgggcgccgggctgcccagctgacttacggatcgggttggtcccgcccccggcgcggccgttttgaaaatcctggtccgcccttggcgattttggtggaagcctgtccctcagaacggtctcagtatagtgttttgtgccccgtttgtgtccgtctcaagagcagagcggccctccgcgcggcccttttatccaccagggggcgcccgcggcgggatcttctctccacctatttgggcggactcctccgggtttcctcgtcagtctccttttcgcaaaacaactttgggcctctactaggggtttccgattctaagaactaacattttgttttgttttctgttttgagacagggtctcgctctgttgcccaggctggagtgcagtggcgcgatgtcggctcactgcaacctccacctcccgggctccagcgattttcctgtctcagcctcccaagtgaccacaggcgcgcgccaccacgcccggctaattttgttcttttattttttgtagagatggcggtcgggggaggtggtctcactatgttgctcagactggtctcaaactcctgagctcaaggagttcgaactcttcccgccttggcctcccgaagtgctgagattactggcgtgagccactgcgcctggccaaaactaacattttgccatgcaagtttattccccagacactcttctgggcaagcctgtcactctttcttatgacattttacacataatctccaataacttcacatctgacgaaaagccaaagcttttttttttttttttttttttgagacggagtctcgctctgtcgcccagtctagagtgcagtggcgcgatctcggctcactgcaagctccgcctcccgggttcaccccattctcctgcctccgcctcccgagttgctggggctacaggtgtccgccatcacgcccggctaattttttgtgtttttagtagagaccgggtttcaccgtgttagccaggatggtctcgacctcctgacctcgtggatccgcccgcctccgcctcccaaagtgctgggattacaggcttgagccaccgcacctggcggaaaagccagagcttttataatgatttacaagatcctctcctaccccatcctacgccatcttcttattcctctgaagccacagtagacagtttgctattccctgaacactgctgacatactcctgccccatggccttttcacttgccttggttgagggacctcttcctccagttatttgtatggctcccattcacctccttcaggcgctttggcgtcggtcaccctgtcagtgaggccctccatggctgccataattaaaattaaccccacagacacttctttttctccatatagctttttctccagagtacattttacaatctaacatgctatttacgaatttgtttgtttgtttattgttactagaatgtgtgttccaggatattccatcttgtctgttttgtttaaagctatatccctaatgcgtatgacagcctggtacacaatgtgcaaataaatgtttgttgaatgaataaatatggtttttcggtttgggtttttttttttttttttgagacggagtctcgatctgttgcccaggcttgagtgcagtggtgcgatttcaggtcactacaacctccgcctcctgggttcaagcgattctcctgcctcagcctccccagtagctggggctacaggtgcccgccacagcgactgccaccacaatattcatggctgggcgtggtggctcatgcctgtaatcccagcactttgggaggccgaggtgggcggatcacctgaggtcaggaatttgagaccagccgggcccatcatggtgaaaccccgtctctaataaaaaatacaaaaaaaaaaaaaaaaactagctgggtgtggtagcgcatgcctgtaatcccagctacccag

SEQ ID NO: 585638 - DNA, 4001 bp, Homo sapiens
cgaaaaaaaagagaaaaaaaatctctgaaactcattaatacattaactttgtaattaacttcatggccattaactttggtaataaaaggttgctgatcccgtctgcccaagcaacacagaccacaatttctacttttgatgattcatgtattattttcacagacttctgatcacttgttttctttttattatttatttattttgagacggggtctggctctgtcgcccaggctggagggcaatggcgcgatctcagctctctgcaaactccgcctcccgggttcaagcgattcttgtgcctcagcctcctgagtagctgggattacagagaccgccaccacgcccggctaattttttgtatttttagtagaaacggggtttcaccatgttggccaggctggtctagaactccgcctctgcctcccaaagtgctgagattataggcgtgagtcaccgcgccaagatatcttctatttgggaacattttgttgtcaagtatccagctgggtacttcgggagttaaaaacattaattaaggcatggtcctggagtcaagtgagcttcggcgagaagtttgccatggacagcatttctggagcaaaccctgtaagaagggctgaattctacatgccgacatttcatacatttctcctgcatttcaggttgtaagtgtgctgcagcatgactgatctggccaaattcttccagtttcctcaagtgcttttcctttagtatcgttctgagtgtttacaaagaaatgattttccaaagcacttgtgaagcatctagttcgattggaacgcagtgacggctctataaaattcaaagaaaagaatctccccgcatgaatagttaacaaaaatcgcttgggccgaggtggcggggttgtaaaaattagctagttatatagtaatcatttttccataaatttaaatatctctaattaaagaaaaaattgacgtagaacaaaatctgcgggtgtgtgtgtgtgtgtctcggaggggattaccttatctcccagcgcggttctgaacccttccttcgctcagttctccctttaaaagtcgccaagtggaacgcccgcccccggacccgcacttgcccccctatactctcctcccggtcctccagacggagcccgcccggccaggacacgccagccccttcctcggccggtggggcctcgacccccgccgcctcgaggaggcgcggcgcctgcagtccacgcggccgagagcgggtagcggggagggccgcccacgacggaggtttctctgtggttacctcagcggcgctcttcgcaatctgaaagttggggcagctgaagagccccaccaccttcacctgcagcggccgctccggcagcgacggcgagccgcacctagcgtgcgggggcccgcacggctgcggccttgccatggccgcgcccggggacgcccggtgaccccaaacactgcgcgtcgctccggcaaccgcgcggccccgcctccgccgctcgcaggaggcggggcccaggggcgggtcgagggcggcccgtggcggctgggcctttcctcaactttgcgcctgttgctgggccgccggcgcgcgggcggccgcgaccgccggggacgagcttggaggaaaaggaaccgggagccgcccacccgggggcgctctccggacccccagggtcctagcgcgcggcccttaccgagcctgggcgcccggatttcggcagcggatcgcctttccgggttggcggcccgcctgattgggaacagccggccggttgccgggggaacgcgggagtcgggcccgacctgagccacgcgggcttggtgcccacctgtgcgcgccgcctgcgaagaaggaacggtctggggagaaggcgccgccggccgcccccgtccccaccgcggccgtcgctggagagttcgagccgcctagcgcccctggagctccccaaccatgaagcccaacttctccctgcgactgcggatcttcaacctcaactgctggtgagtgcgtctgcggagtgcggtctgggggccaccttccgttcgcacccatgcagccttcctccccctatcccgccccacgatctcagggtgtagggaaaacccgaacctccaaagtccacatctggccccagcgccggtggtcccagcagtcgcctcccctgccccgctcttcccttccttaggggcattccgtacttgagcaagcaccgggccgaccgcatgaggcgcctgggagactttctgaaccaggagagcttcgacctggctttgctggaggaggtgagattgtgcagcacggtgcggaacccaggctgggaggagggacagaccgtcccactggggaaagaccaagcaggcatcctcaccgcttccctcaggtgtggagtgagcaggacttccagtacctgagacagaagctgtcacctacctacccagctgcacaccacttccggaggtgagaagcccactggcctgaagcctgttgtcatcccaggaggctcttggccctgccagcccttccctatcctgcctgcactctccagtctcctccagcctcctctccctctggatgtgagagaaggagaagggtgaaccaagaaggtcctatgacttcagcccatttcagctttgttttctggctgccctatactcctccaaaggctgtcgccttggttctagggctagtcccagcagtagaaaaagaaaaaaatagctgatcagagctggaagacaagggaggggaagaaggctgggtgtctctccctgtttttctggttattaagcagggcttggctttcagcggaatcattggcagtggcctctgtgtcttctccaaacatccaatccaggagcttacccagcacatctacactctcaatggctacccctacatggtaaggcagacctttgacctcttccacctcccttccccacctccagtaatacaaggtagaggaggcagccctctgagagctgcaggggatgggcagaaagatggtggcggtgccctgagtttctatctcctcctgcctgcagatccatcatggtgactggttcagtgggaaggctgtggggctgctggtgctccatctaagtggcatggtgctcaacgcctatgtgacccatgtgagtgaagctggcagtgcctagggctgggacatgcagcccagtcctgggacagagagatggtacttctctagctctcatacctggggatgaggtgtgggggcaagatcttataaggaagcaatgggcaaggcttatccattgtataccaaacaccatgccaagtgacagacacaggcttgattcagacatacccctgggaccctcagtcttatctgctgtgatctcatctatcttgctcagctccatgccgaatacaatcgacagaaggacatctacctagcacatcgtgtggcccaagcttgggaattggcccagttcatccagtgtgtgagcctgggcttgaaatgggaagtgggatgggacccaggggctgagggtgaacaaggccccagtcatggggaagagctggtgatggaagaactcccgcctcaccaacctggttcccccagccacacatccaagaaggcagacgtggttctgttgtgtggagacctcaacatgcacccagaagacctgggctgctgcctgctgaaggagtggacagggcttcatgatgcctatcttgaaactcgggacttcaaggtgaggacttgcctgttacttccccacctatatccccagcttctctccctccttctcccccacatcctagcatgagccaatgattcccttagggctctgaggaaggcaacacaatggtacccaagaactgctacgtcagccagcaggagctgaagccatttccctttggtgtccgcattgactacgtgctttacaaggtcaggctcctcccttcaacatgctttcatatgctgtgtctctttgtctactaacctgtgtagatcctttgctcagctagtctagtcttgg

SEQ ID NO: 585639 - DNA, 4001 bp, Homo sapiens
agtgaaaattaaagcaattaaaatattaaaaagaacaattttctgcagggaagaactgaatttgcaacggaggttcaaccggctaccatcgaccacccccatcctccctatagagggaaagggggaggaaggacttggacccctctcaacaaatagggttgaggtgggaggacaggaaaaaaaatgggtcaagacacaacctgcaacgccgcttggaagacaaaaggacaaggaaagtcgccatattgaagcagggaagaaaaaaattccttttaacgacacaaatcttttagaaagctagcattcaattgcactaaatggcttttaaaattatactcctaaattccacatttcccaacctttccaccctctatttaactgtacctcccccaccaaaaaatatcaagttaaaatgttaatcactcttttgcttttaaatacctatgcaatctgcaacaattataagacattctttacctccccaactattatcttgtatgtactggcactaagattatattttgtcctaagtgtcttgcaatctttattcctagattgccacctattttaaccacacaaatataccccaagcaaattacattaaaattgagaggatttaacagtcatttaaaaagttatagcgagctattacttctctctgcccatctccttaccctgcaatctttatgtacagattgcttattaatctggcaaattgaaaggcaccctgcttgtctcacacacaaagaagtggtacttctgggccacaagatccaccatctcttgtatgtgagctcattaacccttttgaagactgctgctaaccagaggaaggtaaccattcctccttatataaacacatatggctttggcagtctggaaattggctggattaccaagggttaaccatcaaaatcctcacttgctggccctccctccaccctctctttgcctgcagcaaggcagggaagagataggtggtaggggagagagaacaagactgtttagacccacaggccctttttaatggagattaagtgaccagattggtccttctccagttctctatttgttctatggtctcatttcttcctctcattatttttggtttcacaacgggaaacgttgatttcttgttgcaaggctggtttttgaaaattcgacacttactatccaatttttttgcgacgtcagcacctcgggctcaggggggagggggtaaaattttggaggaaaaaaaataaaacaaccaaccaggacccaaaactcaattatttagggggcctcattggatcaaaaagtcttttaaaaaataaaggccaactcagtattcatttcccccccacccaactccatttagggaggggggtcgcagaaaaaagttctgagtggattcaaaaaagtaaacgctggatgagtgaatttgggtggtttgggaagggagggtggttgattatttttgaagttatgtagtgacggtccttcggccacagatttcaagtcccaagcagcgtgggctggtggggtgggcaagataggtgggaaggggcagaagacacaagtggttgggctggtggctgctgttttccctttcccccctctctcaggatcctttcaagggcttagatgttgctgcggcttgtttctgttttcctcgtggccggcctgtctttctccgagaaaattcaaacctgggataaaaggaacacaagggagaaagatgtaatcagtacgggttgcttcaaaacactcacaaatgccatctttgttgtccccaaacaaacctgtgtcccatcctgatcgcaaccgctttaagccgtggctctcaaatgaacccatccatccctatcccgcttcccagatccaacgctctccgcaaaattttacccactagacgacaaagtaggcaaacttacctctaaacgaaccccagaatggcggccgcccgctcgggtggagtcttttatacccggacgccgcccaacgcgcccaaacgtgctagtgaaacgcccttgtcgcgagacattatacgcgaggcgtgaactcattggtcaacccaaatgacaactcgccaactgattggctactctcacttcacctttgctccgcccctttccctggcactctcttccgcctccttcctgcctccctgtcgcgtgcgcgtgaccaggagcctagcacctccctttcctctgcttccgccacttccgccctggagaacatttctcacccaggattggtagaaacctaagagcgcatgcgcactgagaggataccgctaaaaatcgccttcaaaattgcttaaaaggcaaactttaacaatgcgatctaagagtcgtagtgactggccaaaaaaaaccgcaattttggggtctaattcgattgtgacgcagttgaaattagcttctcccccatgccttccctttcacgcttccgtcctgacgcaaacgtggggccgccttccgcactgcgggcttgtccttggccctgccctactcagtttcctgaagcatgcgcagttgcctttccgtcaattcctgtcctgggcgtacgtcaagatggcggcgtctgtattaaacaccgtgctgaggcggcttcctatgctatctctcttccgaggttctcacagagttcaggtaactcttcgaaagacattttgcacaacctcaagttggttataccttctcgaggttgtcgctccactgtcaggaatccacgagtggagaccttcccacgtgtgtcttagctgtctaggcagtacttcctgcaaccccccccccacaccccgcgcattttctaatcccgagccgaggactaaacgccagggttaggtatcatcctttttccaaaatgccatttcagtaaaataacttaagtgatggaattgacccctgtccaccctcagtcatgcataaccagctttttaaaaattatttaactaattaaggggccatgctaatctctgtatcgttgcaattttagcataacatatgtactccccaagcgagcgccacaaccagctgttaactatgcaagtggtgactaaatctgtgttgctctggaatgtccttggggaaattagggatcccaatttctaccaaccttgctatttctcaataaggtcaggatatattcttacgacctgaggacagtttctcagctctctttattaaatcagtttcttatcggagttatgagagcttaactccgtcctttgaattgaggtttccctccagtcttgtgtactcacctctctggaggttcttggtggggcacggtgagataggaaggcttgcccagctgccactccctaaagtgggactgaagagtggtgacagaggtcaacacagaaataataacagccttggtagctttaaaactagcgttaggactcaagtttgttctgccctgtagaatgttgaccttcagcttttatgaaaatgggcaactcagtgacttcattggattgatttggagactcacctgtcttctgcatcccctccccaccacacatcttagttccaagaacctagatatccttcctcttactttattcttccaccagagtcaatttatttccaaaaagcaagaataccttttatgtactagatttttttttcttttttctttacacgaaatctcactctgttgccaggttggagtgtagtggcgcaatcttggctcactgcaacctccgcctcccgggttcaagtgattctcttgcctcagcctcccgagtagctgggactacaggcgcatgccaccacgccgaactaatttttgtatttttagtagagataaggtttcaccatgttggccaggatggtctcgatgtcttgacctcatgatccgcctgcctgggcctcccaaagtgctgggattacagacgtgagccactgcgcccggccttgtactagactttttatttgtcttctgaaataagattgttttttaggcatatatcccctaacttagcttttctttcaggatccaattgtaga

SEQ ID NO: 585640 - DNA, 4001 bp, Homo sapiens
ctttccgtggagctctcgccaaaggcccgaggtttctcataaatacagcagcctagatttagagggaggagcccagttaaagaggaggaagggtaagatatatagtcagttccattcccactcaaactcagtgaaaattcctattttctcctaccttccaggatccagcttccccaggcccaccctctgggactcaggccccacccctcttgtcctcttagagagccacgaattcaaagccccacttctcccacctctgacacttcttgctgtcagacctaggcaattccagttctagcccttccctacctctttccctgataccacagcaccaccaaaaaagtgacagaactatgaacatctgggggcttctggaaagccagtggatatgagtagatacaagatatgctgaagggagccagaactccagggctactgcgggccaacaattactcacatttggatgagcggcggcccatgtgttcattgtccacagtgtcacttgtccattctacctttttctctggcttccgtttccgaagtttgatggtaaggctccggttctcctagaaggttaaggatgagcatacctatctagtcccctcttactaacctttcccactccctcccagggaacctcctctcttttcttctttagctcaatcagtaccataggcatagcaccagaggagctgacagaagataaaacagaacaggtcttttacctcagatagtcccttgaggaataagtattatttcctgttcttataccaccagtataagagaagacacaattcctaacctaggaaaggtcccagcaactcttcaaaggaaaatataatccttgctgtttctccgtcttcctccccaaatcatccttggtagtattaatacatgaaaattatttttcagtccccagcacctaatctttgatctcccttcctttttccagatcccctattctttttctcttaaaaaaacaaacaaaacctctctcattctcaagctccagccctccctacctcttatccacctattctctggcatcctggcatctctagtagcaagtattactaatctattaattactaaacttcctttaatccaagagtattaagcccaatgcaaccttctccctttgaaggcaacttaacatgtttttggataaatacttcttgtttctccatttacatctttgctctctgatttctcaaaatacctcttttcatctccttttcttgtttcctcattcctgccacttccttttacattcatccattcaataaatatttattcgaatatcaatattgataatattgataagttggcctccaaccatgctttcttacactacctttgatttcctcccaacatcttcctggctccttaatcctcaatttccctttcgtttattacttacacacataaccaccccaagcagcaacacctatatcctaactgtacctccctattacaagttccttgacctgcctcctgcaccatctctgccactccaaatagctccaataccttccgattctcccagccctagatattcaaccccacacctcccatatccctaggcctagctcctccaacaactcttctaatccctgtcccctccctcccagtatctcccagacccctaaacagcaccgcccccccgcctttctcacgggctcggttgtcacggtaaccgttgtctcagtgacggtctcgctcagcccagcccctgcctcggccatggctaaggctcaggacagggaggagaggaggaagggggatgagacacccttccctttttctgtcgctgaggtctaagagaagcggtatcggattcagagtggtagccaggatcctccaccttctttattccccctcctcctgggcctccgcttctccacccctggggataacctggctaaccccacttccggctcgccgcttccgggtgtgacgcatactgcagtccccctttttcccttccacggcaccaaatgcgtcaaagcgcaggcgtcgctggattagttccgccgtaacgtgacagcgcgcaggcgctgaaagaaagagaaacaaatttggcggaaggggtgtcactgcgggtgtgggtggaggagggagagtctggggcagcacgcgtactcacagcctagaggaagcaggaggggcgcccagatgggtattgccgggccagacgctgcagagtgggtgtggcgagggcggagttgtgtgcaccaagctgagtcctgctgcagatttccgtttgccttgtctgggtaggtggaccggcgaggaagcttaaggagcaatagtaatgaccctaccgtggcctatttccctttccttgtttggtctgggtttctctaaagaaaacgggaagtgggagcagttggaaacacacttaagagtcaagcgatgtggttctacccctcgccctgtgcctgtaggtgtttgagcagttcagtttagtgcacgttcaacgtcagtttttttcagtcactgtgctacgccttgaagatggaggcgcgtaagacgctcagaccctgccttttagctctagtaggaaagacaggcatgctgaaaactaacaaaaatatgaaacactggggcattaacaaatgccatgtctgatttgtaaatctgaatgtagttacatactgccaacatattcgttctctctggggtgatgagtaggatgaagcagagaaatggtcgtaaattacagtataggctattttataaaaatatatgcacgtttcttagagagcaaaagaaagtggtaaaacaagaaccaggaaggccgacaagtaggtttttttagaagagcagcttaaaaagttgtagatgtgtgcactacaggaaatggagttttgtaccgcttggatctgagggagtgccagatgaagcttgacaggtaggcagtggttatatggaagaacctgtatgctttgctaagaaattaagcttaatccaatcactgttatgggccagagaaaggcttaaagtagggtagaaacatgaacaggtttgtttcagatttcaggagtgggtcaggaaagtcaactgccagaacagttcaaacgtacagtggggaagactgccctgcccattctccaggttgctgtgggggtcaaacaagatagctatgtttgagagctctgaatatatataaagggccacacaattatatgataattattacagtaaccccttgatcactatttgagccaaggaatgcgggacctgagtatgcatttgttccccttgaaagtttttagttcaaacagaaaaaagcaagatatagttcagcatgtctagtccattaaaaaaaccaaacacatatatagcaacacacatatacagagccacatacatatacacaagcacagatatacagtataatttggttatctctgtggagtaggattccttgtgactttacttttttctttctttctatgtaagaatctattataatagatatacaattcatccttgaacaacatgggggtaaggggtgctgaccctctgaacagccaaaaatccatatataacttttgactcccccaaaactttactgttgaccagatgccttaccaataacataaaccgttgattaacacatattttgtatatgtattatatacttataatacatataatcttacaatcaagtaagctagagaaaacattattaagaaaatcataaggaaaagaaaatatatttactattcattaagtagaagtggatcacattttcatgttgagtaggctcaggaggaggaaaaggagggcttaaatgtgctgctatcttatgggtctcagaagtagaagaaaatccacatatatgtagactcaagcagttcaaacctgtgttgttcaagggtcaactgtgtattgtatttatctcaatactaataaaatactcacctatagtgatcacttagtggcattacttagtatcagattttttgttgtccaaatttatatgctaaagagat

SEQ ID NO: 585641 - DNA, 4001 bp, Homo sapiens
atgctttttctattaattcgaatcttttccaaatcccaaatggagaaaaaaaaaacagtatgaaataaatgaaaattaactggattctacagaggcaggactgagcacatccactcatccaacagtaatcccatctacatcaaataatgtttctttacagagttttgccaacttcctataaaaatctcatgaatacttcttatgtttgccagtttttatttatgcaattaaattagctttttgtaagagctggactggagaaacaacacatttttacaaccccattagtcatacagtcaagcttcattatattataatcatttatcagtagtcagtaacgagtatgctgttttcttgtgcaatgagggtgtttaagaaaacgtgtcttcacaacaggccatgaaatgtgtcaaatacagaacacccgacattagtggtaaagcctgtgagttcatctggttgtcatctctgttgaagagcacaacagttgaatgaacacaaacctagctttagcttagaagccacattcttaattattaaccccttcatgcttccaccctttccaaactccactcccttaagaggaggtcacttcatttagaattaataactgttattcaagatgctcatgagagatcattttggcttcagtcgttttgctgcagtttattctacatatttctccctaaatcaaatgtatacacgtccctgagacttgtgtatgaccttagtccctggaccttgggaagtcacgatgtcgtggaggagaggggagctgggagcctgaagctgacagatcccgggatcccgcaggccccccgcagggctcccgcccttccaccgaggcacccgtcgaggttgccccagatgctcattctgcgcccatcaatgggagtaactgagcttagagaggaaaaactacggcttcaacaaagcacaacgtgtgcagctctgataatgcagggcggaattatggagacaccgtcggggctggctggaaagcggaaagcgttccatctcaggattttcacggggaatttcaagaaccaagggggcctctgagatccccagaacctctcctttccacgaggcagcttccttccttccctgctcgttctccacaaaaatcagggctgcccggatcccagcagtgagcgctgctctctttggctgctgtatccccaaccgctgctgaggcgcagctggagtgagcccctccgagccccgctttgcgcagctgcagctggagcccagaggcgcccggagctcggagaaaagcactgtgctccgcgggacccaaccctccccacggccaccaagggggcccgcagatccccgggcaccggcagccgaacccagacaggggcgtcccaaccgctgagcccgacgccagagggcaccgcgggggagagaaggcgccgcgcctcgctcctggcacttggtccccgggagtcagggacatgcgcgccccggagctggagcccgggaaaattactgcgcgggcacagaggagctagagaggtccccgaccctcccagccccgcgcccaggtacctcgcagccgtagagctgacccagctgctccacgatccattcctccagcaccagccgcttccgaagctccttacgatcgtatttcactgtcacttttccctgctggtgtcgccgctgctgttgctgctgaacctgccctgcagcggccgccgtggccacgggcgccgagtcctcccgggaggagcctgagccgctgctggagccggggctgccaccggcgccaccccgggggctttggaagaaaacccgtgcgccgccgccgctggccccgccggccgtctcgctgctgcccgtcgccaccgacatgtccccgcgcgcccgagcctcagtgcggcccggaggaggggcgggcggagcgcgcccggcgccgctaccacctccggcccggcagccgcatgcgaagggctccccggcacctgctctgcgccgcgcgcgcccagccgcccggctgctctgggagggcgggaggagccgcggcgagagggaggagggcggggaggacgacggggcggggaccgcagccttaaagaagccgccgaggaccctctcggtccagcccccagaggcgggatctggcgcctgcggcagagagggcccggggcgtgggagtctccgcggggcgggaaatgtgtgcgcctagacacgggaggtcgccgatgtgtagactccggaaggacgggcgtggggcggggtgccaggggatgctcctgcgcgggtgtccgtggcctctagtctcggagacagggactcacgcttctcccgcaatcccggagcgcaggaaacgcgccgcctctcggggcctccacctggcgcggccccgggcaggacccgcagcgaaggggacacaggaaaggaccgcgccgcaggctcccccaggaggttttcctagccccaccgtctcctctgttggctgggtagcgtcccctcccctccagccccgccccacggctccaaacacacattcctattcatgccacgatggatgccacttcctctctggattgtgagaaacatcgaagaggcgatgtttgtgcaataaggcagtcacggcgcttgagaaattatttccagaccaatgttttctttccttactaagcgtctgcttaatcatgggcacagcattcggatatcttcgtatccaaagggcagaaagcgtgacggcgctcaggcaaggcgtctgggggcatccagacagtaaacatttctctaagagggtcggcgacagggtcctggtttcacatttctagtgttgcgtcccgtgcactgccagctttctctccatcccattccaaacagccccttccacccaggagggcaacagcactgcctgactctactgcaaaacatcacagcctagtagttacacatgaaggagcttctcagaagggttaggacaataaggtggggagggaagttgtaaacagaaaactgcatgtgtaaaattagggagacactaacatattcttcttgtacacaacaatacattcctgttcaggaactgatagaaaccacagagacgtccgaatgaatacaagtaagcggcttttagtaacggttttgttttgttttgttttttgagacggagtctctctgttgcccaggctggggagcagtggcgagatctcggctcactgcaacctctgacttcggggttcaagcgattctcctgcctcaccctcctgaagagctgggattacaggctttcgccaccacaccaagctaatttttgtatttttagtagagacagggtttcaccatgttggtcattctggtctcgaactcctgacctcatgatccgcccgcctgggcctcccaaagtgctgggattacaggtgtgagccaccgcgcctggccatgaactttttttgtttgtttgttgttgttgttgtttttaaataaaagagccctaaaggttactggcagctactcaaagaagtttctcagagataaaatagataccaagtcaaattcctcggaacactttcctatgatggagaagatcctgtgtggggttctagactgacactacaaagacaaaataaaagtaaccagcaggtttctcctggcgcttcaggctctgcgatccaccagcgcccagctctgctctacccaggcttaggatccattgcctttgtaccctcagtctggggttttccagtgagagcctgaatagggattttcccaaagtgttccatgcctgcggctcttcacagggacatgtcaagcctcacaatgtgaaggggaaggatctgcggagattgaaatagggtggctggtgtggggccctggactcctgccataattacaaaggggtcaaagctgaacgatctctgccccgctagaagaggccagctgccctttagaagatgggttttgcaccgagcctatcagggacaagggagatgaattaccttgattgcccctagagaccgatgaccagtctctgc

SEQ ID NO: 585642 - DNA, 4001 bp, Homo sapiens
gcccaacttctggtaggcagattcccctgggctcagtctactttccacctcttttctcctggggctttgctctcgagactctgctagtctcagactccgctctggagtttctccaggactcagcctccatttccatgcctctgacagtcgggagctcctgtctcccacctctcctgggctttgcctccagtcccgagcctccagaggcctcaggctcaactcttgggctccccctatccccagcctcctctctctggtctccctcggacttagtctctcttctcttgactctcttcccttggggctctgatcccgcatctccccagggctgggtctccgctcccgggcctccagaggcccaggctttctctctgctagcagctcttcactccgttgttgttgctgctgctgctgctgccgctcctgccggatgaatcggttctggtgcactggcccgatggcctccagaaggaccgcagactcatccgggtctggaggtccagcctctacagtccctagcacagggctaggctccccaggggacagcccaagcttggcccggcggcgctccaggagccctcgtttccaggctggcatctgggacaggcgctcccgttctgctttctctcggcctcgaacggacgcctcctcctgccggcgccgggctagcagctgtagcttccagtctgggatggtggccatggtcgtcttgaggtgagggtagggagcactggggacagagaacaggaaggagaggctccagagagtgagacagcccgggggtgagactgagggtgggaggagaggaagtggagggggagaggtgggacacaaagcagggcagaggggctaaggatgaggacagagggaaagacggaaggcagagaactggggaaatggaaaaagtgaagagaagttgtgagcccaagttgggggtggtgggggtgatgtgagaggaagagtccggattggaggcaatgagggcaggagccagatgtggcagcacagggttaatgcgtattaaagaccgtctctaggatgtgagaaagagagagaagggcgaaaaggaaagttggcgtgagggagaagagagaaatgtggcaggggtgaggggaacctgggtgcaggccaggctgcctcagcgataccccagggaggctagtgtgggaaggaaggaccaggaatccctgaaaggaccaggaggcaacgggacctgagggggtgttggggaggcaaggaggggcggagagcgaacaggtctagaggagaagggaaaccagggaagaggggaaaggagggcggcggcagcagccgggcgcgtctcagcgcgggccccaaaggtcccggctccgcttccagcaccgctcgggccacgcctctccccagcccccacccctctgccccgcactccgcccccgaggcgggtcgggggaaatagccacccccgagactttcggaacccgggcgtcagggctgccagcgcgttcccagaaccctggcgtccacccccaccctgtcctgtcaccaccgcctgcctcccccaccgactgccccacgcgaccccagagtgccaagggccggctccatgtctcttctccccggcgcctgcaagtcctgcgccccgtccccgctctcatgaagccgtgacagagccggccgtctccaccccgctgtagccgcacagactgacaatctcggcacaaagaggagacagccaaggtccgggccagggacgggagcaaggacaggggcgaggagacacccactccccaagtctgagcccctcagtcaactcacaggccgcgggacccccgggggagggggtgcggaggagccgggcgtccagagagaggaagaggaggagagagggaccgagggagatccggagactggagggaggggaggagggagggagaggaggagggaaagaggcagcaaaggaggagggacggagacagagaccagggggccgggcgggggcggcgaccgctttgtctaaggacaatgaggagagggaagggggcgcagggcggagccgaggagagggcggggcctagatccctcccaccccgcgtgggactcgctgcgggactgccctcttctcgccccaaccactggtcctccgctctgtccccaggggccctcaccagcttcccgcccggacacgccaggtgtccagatcccttcccccagctcgccgacccagggcggtggcccgtgactcaggcccctcgtgggactttgggaggaagcggcagctgctccgagcggggcccgcccttcccatctcctgccgctcctccctacgcttttgccttctcatctgggtctgtaggtccagcctctgaagtcctttgttttgcggggtcgagggcagccgccaggctgtggggggctttgtggatgggcggcaggagaggcgctcagaagccagaggttttggatgctccctcccctaccagagctgctgccccgactctttctagcttcaacctgtctcccttgggtctacaggtcggctgccgggaaaaaggggatttgaaggaatgggaatggggacccggccgctctggcaaagtgggggcgggtctgcgggggtggccgaaccccagcggttgccagagggcgtggtggctgcccagactccagttcggtgctcccaggctccctctggctttctttcccaaactcagccctgtagcttgggagacactgacagactgcatgccatatgtagaaaaaggctgacttttattttcctgcagagcatcttcctcgggagagcagggagccccaagtcatcgagttaagagcaggagaatccccttgactaggttggggtctgagcccagaggcagggcctaaggaggtgcagagactagggccgggagtggtgaggcaaggttggggcctggagggacagctatgaccgttgaacttgcagaccctggtccaccttcttggagtggaagccagcggtgcagaaggggacccctgaggcgcagaggcaagtaacagtgccaggggagtggtcagggcagatcctttccttctcaggaggctgttgagggggagagtgtcatgctctaaacagtgaagggacagatgacttccataccccactcttccttgctggtgagaagtggaccttggagttcagtggctgaaactcagaatttagggtatggagctggacccagagaataaagtctcaagtagtagaaggggcatctccttcagtccatggatttgggcctctggcatgaagcagccagggcctggatgttaaggatttagaattcagtgggagaggaagaacagggcttgtaaccagagtgagctcctcactctgcctccccatcctggggccgagagagcaggtggagttttctttgtagctgggcccggaggtagcggaggtcttgctgatcaagcccgtgagccaggcccaggtagagggtaaggaggaaagcaaggaggagacggtccgtgcccagggtaggcaccacccacagcactgtcagcagctccacacacactgggtggcgcaggtgggagaagagtctgagagcccggggagacttcagggccagaggctcgcccagccccagcacatggtagtatacctaagagagggagaagagcttagaaatggagtcaagcccttttctcatcttgggcacttctttcctcctcttccaggcaccacccttctagaactcaggcccaggaaccccccttctgagacttggatccctgatcctgacttctgatccatgtaccttccccaggcccaggaggcccatgcttgctgcccttacgagggaaagtcaaagggaagggccacgagggagaagcagggagacagtagaagagcatgggaggagggaaacccttgaaagggaacgaggagttctaaaatgggtcagaggtcataggtagggatctcggagcctcacctgtttgaggcccatgagctcagcatagtcaaagacgagaag

SEQ ID NO: 585643 - DNA, 4001 bp, Homo sapiens
tcgtttccaggctggcatctgggacaggcgctcccgttctgctttctctcggcctcgaacggacgcctcctcctgccggcgccgggctagcagctgtagcttccagtctgggatggtggccatggtcgtcttgaggtgagggtagggagcactggggacagagaacaggaaggagaggctccagagagtgagacagcccgggggtgagactgagggtgggaggagaggaagtggagggggagaggtgggacacaaagcagggcagaggggctaaggatgaggacagagggaaagacggaaggcagagaactggggaaatggaaaaagtgaagagaagttgtgagcccaagttgggggtggtgggggtgatgtgagaggaagagtccggattggaggcaatgagggcaggagccagatgtggcagcacagggttaatgcgtattaaagaccgtctctaggatgtgagaaagagagagaagggcgaaaaggaaagttggcgtgagggagaagagagaaatgtggcaggggtgaggggaacctgggtgcaggccaggctgcctcagcgataccccagggaggctagtgtgggaaggaaggaccaggaatccctgaaaggaccaggaggcaacgggacctgagggggtgttggggaggcaaggaggggcggagagcgaacaggtctagaggagaagggaaaccagggaagaggggaaaggagggcggcggcagcagccgggcgcgtctcagcgcgggccccaaaggtcccggctccgcttccagcaccgctcgggccacgcctctccccagcccccacccctctgccccgcactccgcccccgaggcgggtcgggggaaatagccacccccgagactttcggaacccgggcgtcagggctgccagcgcgttcccagaaccctggcgtccacccccaccctgtcctgtcaccaccgcctgcctcccccaccgactgccccacgcgaccccagagtgccaagggccggctccatgtctcttctccccggcgcctgcaagtcctgcgccccgtccccgctctcatgaagccgtgacagagccggccgtctccaccccgctgtagccgcacagactgacaatctcggcacaaagaggagacagccaaggtccgggccagggacgggagcaaggacaggggcgaggagacacccactccccaagtctgagcccctcagtcaactcacaggccgcgggacccccgggggagggggtgcggaggagccgggcgtccagagagaggaagaggaggagagagggaccgagggagatccggagactggagggaggggaggagggagggagaggaggagggaaagaggcagcaaaggaggagggacggagacagagaccagggggccgggcgggggcggcgaccgctttgtctaaggacaatgaggagagggaagggggcgcagggcggagccgaggagagggcggggcctagatccctcccaccccgcgtgggactcgctgcgggactgccctcttctcgccccaaccactggtcctccgctctgtccccaggggccctcaccagcttcccgcccggacacgccaggtgtccagatcccttcccccagctcgccgacccagggcggtggcccgtgactcaggcccctcgtgggactttgggaggaagcggcagctgctccgagcggggcccgcccttcccatctcctgccgctcctccctacgcttttgccttctcatctgggtctgtaggtccagcctctgaagtcctttgttttgcggggtcgagggcagccgccaggctgtggggggctttgtggatgggcggcaggagaggcgctcagaagccagaggttttggatgctccctcccctaccagagctgctgccccgactctttctagcttcaacctgtctcccttgggtctacaggtcggctgccgggaaaaaggggatttgaaggaatgggaatggggacccggccgctctggcaaagtgggggcgggtctgcgggggtggccgaaccccagcggttgccagagggcgtggtggctgcccagactccagttcggtgctcccaggctccctctggctttctttcccaaactcagccctgtagcttgggagacactgacagactgcatgccatatgtagaaaaaggctgacttttattttcctgcagagcatcttcctcgggagagcagggagccccaagtcatcgagttaagagcaggagaatccccttgactaggttggggtctgagcccagaggcagggcctaaggaggtgcagagactagggccgggagtggtgaggcaaggttggggcctggagggacagctatgaccgttgaacttgcagaccctggtccaccttcttggagtggaagccagcggtgcagaaggggacccctgaggcgcagaggcaagtaacagtgccaggggagtggtcagggcagatcctttccttctcaggaggctgttgagggggagagtgtcatgctctaaacagtgaagggacagatgacttccataccccactcttccttgctggtgagaagtggaccttggagttcagtggctgaaactcagaatttagggtatggagctggacccagagaataaagtctcaagtagtagaaggggcatctccttcagtccatggatttgggcctctggcatgaagcagccagggcctggatgttaaggatttagaattcagtgggagaggaagaacagggcttgtaaccagagtgagctcctcactctgcctccccatcctggggccgagagagcaggtggagttttctttgtagctgggcccggaggtagcggaggtcttgctgatcaagcccgtgagccaggcccaggtagagggtaaggaggaaagcaaggaggagacggtccgtgcccagggtaggcaccacccacagcactgtcagcagctccacacacactgggtggcgcaggtgggagaagagtctgagagcccggggagacttcagggccagaggctcgcccagccccagcacatggtagtatacctaagagagggagaagagcttagaaatggagtcaagcccttttctcatcttgggcacttctttcctcctcttccaggcaccacccttctagaactcaggcccaggaaccccccttctgagacttggatccctgatcctgacttctgatccatgtaccttccccaggcccaggaggcccatgcttgctgcccttacgagggaaagtcaaagggaagggccacgagggagaagcagggagacagtagaagagcatgggaggagggaaacccttgaaagggaacgaggagttctaaaatgggtcagaggtcataggtagggatctcggagcctcacctgtttgaggcccatgagctcagcatagtcaaagacgagaaggatgctaaagatgaggagccaggagatgacatggagcacaaagcagaggagcggcacccaggtggcccatggctcagcccgagcctcccacaacacagggcctttgggtatgggctcccagtaccgcatcaccagctgtggaaggataaggggctgggtatcccagtggcctagtctgcccgaccttgggagacccagacccagatctgcccccaccacaggctagcctgcaactctcccccacctctctcctaagcatcaccaccaaatattcaccatgtggagggtgcgtgctgggtgaggtcccaaagatgtaaggatggcctgtctctaccctgagaacttatagaatagatggggtgacctgatagctacgcaaagtagtagcctgtgccaaccacccagtgaaaagacagacaaggccttctcttcagacctagggaagtggttttgaagaaagggtaggactgaagagaagggatctcaagcaggacataaacaaagttgcagaggtgagaagcatatcttgtgcttagggaaggacaagtacacccttcttgataaaaagtaggatatgtg

SEQ ID NO: 585644 - DNA, 4001 bp, Homo sapiens
acagccagggcctgcccgaggactggcatttcaattcaccaaacgtcttaattcggagggggacggaacactttctacagaacattttaaagcacatgggaagtttgggccctttcgcagtagagaggaaggaacgaaggggaggaatttgtaggctgttgtttaaggattgttaaagtgcgcacatcatcagctgacaaagatcggccgactgccaatgcctccccaaactcacgaaagccaaaattcagagtacagcgtaaaagggggtgcgagtggcctttacttttataaaggacatttgtacacaatgtcgcacaataaacaacgtcaagtctgggcacacattacccacatctcagtcaaaagaaaagggtggcctggcccagccccgaagggttttctctgagaaataggttggggtgtaaaggtcccacgcgtgcacccacagtccgtggcaccttcctctggtgcaccgtggcaggacgctttgttctttccctaggggtctccagcaaactgcaagggctacaatatgatatttagagttaaaaaccaatcccaaggccttagaaccatgcccgggagttgggagcctttttcttggaggcagctgctccgggccttggaagtttcttcctattctgacgcaggctgggaattctagaggccttgtaggaaggtcaaacggacgagaagactgaggtcagaggctttcggagcattgcccgggctctctaagctcgctcacttgtctgcgggggtgcgagtcgacggttcaaagtctccctcctttccctccacgcgcccctcacgccagactcgccacgctcagcaaagcgtcccagcaagttccttgaggcggcagcccgagctccacgtgctaatcaaccccgccccacggctcttcgaaactctccaggctcagagcgcgtccgcagggcgcgcgtagcgcagcgtgtagttggcgcccgcgttgttgtcccagtactcgccctgcgcgcagcggtagcagacagcgaagtggaccgcgacgccgcgctcgtcggcgtcctcttcgtcctcaggctgcaggcccgggggcaggcacagcgagaagtggaagcactcggcgcctggctctttcttggcatccccggaccctggctcggaggccccagacggtgcctctggctgctgtggctccagcggctcgggctgcagctcagccggcacgtccaggaaggagcgccactcggtaaaggtgtagcgcacggtcacggccctgggcccagggcagctgagcacccggccggagcccttcacctcagcgcccgaggccgtcgagcactgcacgcgctccaggcacacgcgctgccgctgcagacgctcggccgcggcgctcggccccgggagctggaagagcggccggagccgggaaggcggcgctgaaaggggcgcggccactgccgccgcggccagcagccccccgagctgctccaggtcctcggcacgcatagggaagcttcggaggcgcgagagcacggcgggcggcacctgcggctcctccgcctcgctgaagtgcttcacgctggccaggcttagccccagcgtgtccgcgaactgcacccgcttcttgcacttggcgcagcagccgcccgggccgagctgtgcgtcctccgccccctcgccgcccagtgccaccgcctgttgctgctgctgctgcaggaacttggccgcctgcaagatggggtcggcgggcaaggaaaaggagcgcgcgcggcagcggcggcggcattccagcagctcctcctgctcctggggggcggcctcttccttcggggacaggggcctatcccctagctgagcgtcaggactcggggtctccgaagcgccaccgccgtcgccgccaccctgcacacaggggaccaccggggcgggcagctcctcggccggcggggcctctcggaagggcgctggtcccggcgcctccaaacttagccgcgcccctatgggctccatgacgccgttcgcccctggacttgctcgggccgaaccgggcccctctggagacttaactaactcctcgggccgtggaaggagcgcagggctgcagttcaggctcgccctccccgaggcgagtcgccccaggctcgacaagacaacgtagttccactttggagcctccggcttttagctgcggctgcccagggcgaagtgggaggaggatgcgggcctggggccggctccggggccacgccgcctcccggttgaacctgcccgcgacgggggagggccgggggcggggaggcgcggccgctgggacacctggaagccgtgttcccgagtgctccggtggaatgcggggggcgactttctgtcgttcgcgggctccctgcagccctcacccgcacccccggcggggctcgcgtctgttccgcttcttgagtgcctcgaagtgggggtgcagagctcgcgctcaaccttcagagacccccacgtgcacaaagtcttcctgcccatgaacttggcctgacggctctgcccccagagggtcactgagcgctctcctcttggctgcctcacgggctggggagtccccggtgcagcgcgcaactggggaaatcttgcctacgcagaggctggaaggaggcccattccgcgccgccggagagcggggagcgcatcccttcccttctgctcctgctttccccaaacttcagggcgccccgggttccaatcccactcggaagcctgactcggtcaggcgcgctccgctctgctcttccgaaagccgggaggcaggagccgccgcccccatctgcccagtggcggcgcggggtgggctgcggccagactggggcggggaccgtgtggggacgcgccggggagcggccatggcccgcagccgagagcggccggaggccattcgcgccaggcccgggagcacgtcccgcccctccccctgtcccgcccgacgcgcccgcgagtccgcgccccgggatcccgcagggagggcggagagggggccccgtggggccggcgcccacgcggcacgcaccacctcccaccgcaaccggacgccagcgccccaagcaccctccccgcccaccgggagtgggggcgtggcccgcgccggactgcgctgtcaccgccctgctgctccggccttgccaggggccaaggcccgaacctgaggccggggaggggtggggaagcgcgtcgtggtacctagggattgggggaacgtctaaaagtggtgtttttcttgttttggttttaaggccaccctgagggccatctaagtcagtgattctacttcagcatgcacggacatcactcgggggcccgttgtcacatcacagggccccactcccagagtttccttctttctaactttttcgagataggggtcttgctatgctgcccaggttggtctcaaattcccggcctcaagcagtcctcccgcctcagcctctaaggtagctgggattacaggcgccccccactgctcccagctccctagcgtttgtgactcagtgggcttgggctggggcctggaagtatttctaacaaggggatgctgatgctgggctctggggaccgtatttaaacctatgtggatgtgtattcagttacttatatagaaagttggggattctagaaacagaaccactaattaagaaacgtaattaattggggcttcataactaaaacatgtcatggtttggcagaactgaaaggggccagggttttagccatgttggcagagggcaggcaaaagagatggtgggtgaggagcgtgttaagagcttacattgattgactgagcacctacaggatgtcctgtccatgaaataggaatcacatcattcctgcctacatataggacacaacactgcagaaagatttctcatcgccaaggccccacagggtggctttcatgggatttgaagccaggcagcttagaggaaacatttcccccatcactactaagcctgggctgggagtgatgtcctgta

SEQ ID NO: 585645 - DNA, 4001 bp, Homo sapiens
tcaggccctgaaaggttaaggggacaactcagaatcagagctgcctggcaaatacagaacagccccaggagaaaaagtttgattgaaaaggtcagagatggcagcccagtaacccagccaatcagagggcaaatgaaagcaatatacctctggggtcatcgagcaggtggccagaacaccaggccagagccaacccccaccaaaaagggccagccccaggagaggagaagctgggggaggctggaactggtatcctagcatcctatgtgtgagtctgtacctcaaaggaaccacacctctgagtcagacctcagcaacagcaggaaacagagggtagaaaaaggcacggatgaggagcaggggaaggcagcaccgaggtagatgaggaaggtgaaagaaggcaacattaagaactggcctgtgggccaggcacggtggctcacacctgtaatcccagcactttgggaggccgagggggtcagatcacctgaggtcaggagttcaagaccagcctgatcaacatggagaaaccccgtctctactaaaaatacaaaattagccggatgtggtggcgcatgcctgtaattccagctacttgggaggctgaggcaggagaatcgcttgaagctagaaggcagaggttgtggtgagccgagatcgcgccattgcactccagcctgggcaacaagagcaaaattccatctcaaaaaaaaaaaaaaaaaaagaaatggcctgtgtcaggacatcatgataaagacatgggtgttcaggggtggctggcctgcaggctaagaaggaacaataatctgacagtgaggacaaattcccaatttgaagatggtgtagcttaggaaaggcagaaatccagcactggtgcgaaaagaaaaaaaaaaaggaaaaatgcaaaggttatcctaggattaagaataagggtgaggagcctactcagattaggaaaggtgactggtctaggatgcacttgggtgacagttaggagggctttgatacaaaagaggcctttaagtcaggagacctgatattgcagctgggcctccagcaggctgtgtgaccttggacaagtcccttgccctgtcggggcctcagtctcctcatctgtaccattagggattgcactgcatgcgctcagaggtcccttccagcaccaacgttgtgaggttccatcaacagaagggctcagtcctgcttacaagtttgtgtgtgaaggaagaactagagggaggggcctaggccagatttgggtggaggagagagaaagcagcgctgttctaggtcaggggcttggcatggaaagagaaggggccgtaggggactgcggggcggctgtcccaggcgggtaggaagaggagacaaggggctgctcagggcggggcgagggggcaattctggaggaaggtgcagtttcagatgaggggctgcccaaaccgaagggggatcggggccaggggtgatgggggggacagaaaaagcaggacagtgacctgggaatggggcagatctggaagaaggaggttaccctgggccgggggtaagagaagggaagaagggagggaggtgtatgtggggggagtctctccggggcaaggtgggggagctgtcctagctgcggcacaagctgggggtgctgccagccgcgggggcggagggctggccccaggagtcctgcgggggctggacgggagggtcagtctggggctgtcccgggcctggctccggcccctcccagagctccgcgcaggctccaaggcggcggtgggggaaaaagggccacgctcaccttctcctttttcagtttatagggcatctcggcccgtccggacccggcccgtctcctgcggccccgctccggctccggctttgctcggccgcactcggcccgctcggcgtctcttcgccaccgcctgcgcgctgcgcccgggtcgagcggtgcctgcgcctccaattggcccgaactcctacaaaactgcctgacaaccaggcgccgcctcctcggattggtcattggagccaagctgcttcctttttttcttattggaaagaaatagtacaaaccgccagggttcggcttccagaattggctgaagtgggtggtcccgccctaaagtgggtcgagcttagagaaggaggcggggataaggggaaacccaagcttggctaggagggctgcactccagcgtctgctgtgcgtcggcctcggccattcttcgcggcgcttggagccctgctctttccttctaaaggctctcacactttgcccgctctgctaccctgtccagtcggaattggaggaaggaagccctaatacggagggcacctttcttcactggggtaaagtagccctaattgcagatgcaaaattgatggagggagctcccaaggaccttccaagacacccgcctccctagacaggggttgcagaggagcaaaggggaagcctggcagggctaggacctgggcgaaatgagtggagaatccctggcttggtgcaactttaggaagagggtccccgttgctactgcaagtgtactgggattggggaaccagctagatttgagcagttgggaacgcagtggaaaagcaacttcattgttgactgtctcaggaaatccatcccttacttgccaccctgctcaagtccgtgttctaatgggtaagactcagtttatgcccacaaagagttcgcagtctggtgaatcacagatgtgtataaacaaaggattaagagagaatgtaaaccaggcaggcacggtgtctcacgcctgtaatcccaacactttgggaggctgaggcaggaggatcacctgaggtcagaggttcgagaccagcctggccaacatggcgaaaccccgtctctattaaaaatacaaaaattagctgggtgtggtggtgcacgcctgtaatcccagctactcgggaggctgaggcaggagaatcacttgaacccgggagacggaggttgcagtgagccgagatcacaccactgcactccagcctgggcgacagagcaagactctgtctcaaaacagcaacaatgacgacaaaaagaataaacctgtggccaggctcggtggctcacgcctgtagtcccaacactttgggagaccaaagtgggcagatcacgaggtcaggagtttgagaccagcctgaccatagtggtgaaaccccatttctactaaaaatacaaaaattagacagggtgcggtggctcacgcctgtaatcccagcactttgggaggccgaggtgggcggatcacgagtcaagagatcgaggccatcccggccaacatggtgaaaccatgcctctatgaaaaatacaaaaattagcggggcgtggtggcgcgcgcctgtagtcccagctactcgggagactgaagcaggagaatcacttgaacccggtaggaggctgaggcaggagaattacttgaccccggtaggtggaggttgcagtgagccgagatcatgccactgcgctccagcctgggcgacagagcaagactccgtctacaaaaaaaaaagaagaaacctgtgatgcaaaggcatgagaatgatacaatggaggccgggcgcggtggctcacgcccgtaatcccagcactttaggaggccgaggcgggcggatcacgaggtcaggagatcgagaccatcctggataacacgatgaaaccccgtctctactaaaataatacaaaaaaatagccgggcgtggtggcaggcgcctgtagtcccagctacccgggaggctgaggcaggagaatggcgtgaacccgggaggcagaggttgcagtgagcctagatcatgccactgcactccagcctgggcgacagagcaagactccgtctcaaaaaaaaaaaaaaatactacacattgggtacagtatacactgcttgggtgatggctgcatcaaaatctcataaatcaccactaaagaacttattcatgtacaaaaaataaatttttaaaattctatataaaataaaatattt

SEQ ID NO: 585646 - DNA, 4001 bp, Homo sapiens
cagttcagcatccccactcaccatgccagtagttgcagatggagaattcctggccccaggggctatagcagatccgatagaggttagaccgcatggaggtggggaacagccacttcaagtagtccgtgtctggcaagcgaatggcaatgctaagtgaccataaacctctgttcccccaaaactcagggcattctatggagtctagtgcccactcacctccatactgtcccatctgtggagaggagagggagatgaaagaatccacgttgtgatcatccatgacagaaagcagagcccggcacacaaggccccctgtaagcagaacaccacattgggcaggcacttaaggacagcaaagccagcagcaccccccacccccaccacacacacacacacacacacacacacacacacagagacacacacagacacacactgtacacaaaggagactgaggcttacagaaggcaggcacaccctgtgccaaaaggtcacacatcatataagtgactgagcccgaattagatgctgggcctcctgcctctagttctaggatgtttttacctgccccattagcccttatgtccaagaaccatgggtaacaggaagcaaaagggcagcagtgtagggagcctccctcccattcaagacagagatgagacccaggtgctgagggaagtcagaaaggaagggctcaggtaccagggttgtgcctggagcaatgtggttcagaaaaagggacgctaggaagtgtccctcagataaggatcaagcctcagatagggcttaggagttaggggcaggggagtcgcctaccctgcgagtagcagatgagatgcaccccttgaggggcctttgccatgatggggaccacagcctctcggaacccttgcacctgttcccacaggggtcgcaagctctctctcccatcgaagagatcgagcactgtcaccacagtcccggggtgtgtctgtgggaagggggcaatgcagccaccggggataggctaagaagctcccacacgccaccccctggcccgcgtccacaggtctattgtaccctgctagaaccagggatcccgtcccccaactctcccccacgccagcaccagctccctgaggaactgggcaggcccagaggggtggctttcagttccccgctctccctcccctgccacagtagacgcctctaacgccctgcacccaggtgtcccctgccagacctcattgatgtattccagcaggtggcggaagctgtacgagctgtcgaagagcccatgcaccacgatgaccggcttgtaggacgcgcggtggggcgcgggggctgcaagcagcagcagcggcaggaaaggcaacagaagcaggacccacgccgcggggagccgctgcccgcagagccccagcatgctcccgcctgagaaaggggtgataagggcatgtgagggagatggcaacaccctcctccctcggaacagacgcccggcaatcaagccacctcctctcgctcccacaccaggtccgtgtcacaaaatagcctacttttaacttactccagccctctccctacaaacacacccccccaccacgttgacgcaccaacgcgcacccgaagtcccgcctccaactcagcgttcgggggacttgttctctaggtccaggatcttcctaatgcatcgcctcagccatgaacaacgcggagttctttaatacccgtgagcagcagcccaggccccttgaagagtgcagactcccacctggcctgggtccgtaggcctcgctccacccgctgtttacttatcccaagtctggaacccacggtggcggggggaagggtgaggaaagagagcgcaggggaatgacggatgggagggggaagggcgggctgcttggggtcgcgcaaatccgtcacgtccggggctttctctggcaaccgcgcgagcgttccccgcaacacagacccaggacaggaggggcaatggaatattccattgcgccctaggtgctggggaggaaacaggcggagcgatccatttaggccagtggggagaggaaaaagcagcaaacatattctgggaatggaaagaaggcctctccaggcttcgttgcccccagcgacccaaaagtccgatttccccgccttgattctccccacttcccaatacaggcgtctggctccgcagcagaacacgaagtttgcattccccaaggggcggccagggggcggaccagggaaaggtagtcctctgcattttgccgtgtgctgggtgagtggcagggtggcctggagggctgatgccagcccgggcgtgcccctcaacacccaccccaccccaccctccagtccgccccaggtcagcgacttacaactcttcattctgaagtgcgtgtagtgcccttgtctccagagacgcagagagtcctcgaggccccttgagctaagtgcagcctggcccagtttctcctgccctactctactcccctccctataagcgacccaccctcaaggggcggagggcgcgtagggatgcgctgactcatgcccgcgtaatttcgaccagtctttcaacctgaacgacccccagaatctggctgtctgagttatctgtgggtggctccctaccgaaacccccaggcgccccacctctccgcctgtgacccctaaccgacaccctagtgcctcagggcttttacttgctagggcttttacttagcatttaaagacgtttctctagagataaggatttctcagcatgtctgagcccctctctctgtttacaaggtcattgcttggtctaaatttgtctcaatcaaaacatttttgcgctcagaatggtgtagagtgacgatgaggtggcggtaaggggttgagcgctcacgcgaacgcctaagtgaccagaacgactggtgtgaagccgtgatctgactctgtggagcctgggactggtttcagcgagagcctctgtactgctctgtagtctctgctaggacatggacgaaaagggacgcagccgggagagcgactgccccaggtgggggctggggggacgtaagggaagaataataattatctggctgtgtttttgtttaaaaaaaaaaaaaaactggtgtaaatctccatagacttcctatcctcgctcccttcacccacccacgcgctcccaagatgcaataagcaaataaaaagactaataacgctgtactgcaggtcgactcaggagctggagatgcgtcttggtgggaggtggtgggtgggagtaggggggtttagggaatggatctgaacattgaccagcccagagactctaagcagcctcaaaagcaaagggaaagtgggggaacaagcacacattaccaacagagctgccagaaatgagcagttaagtcataccccctaccccctccaaaagagcttcagctccttagtcctggacgaagaaggtatgtatgcacaccgcccaaactctctctcccttttccctccaaggcccagctccccctgatttacagacctgggcctccctctttactgctaggttggtaggttcaccaaaccctgggaacttttcagaccatcgcagttctgaactctgcacaattctctctcacacacaagtatttatctcttctaaagaggaggaaactggggccaaggatttgggagaagaccctggcaccttgcagggagctaagagggggagacgacctgcctctggaggcacctgggttattaactccactgagaacctgttcacttcctcccacaatacaatcactgagtcttggtgggggagactccagagagttctccttccttcctttccttagtcccacccgcctcgcctggtctagcctccgtgtttccatgacaactccaaaggaacccaaactgggggcttgaatgccggggtaagaggaggagagaggtggtccgagagcagagagagaccgagtgggaaacatctgaagcgctccccctccctcgcctcggtccctttaagctcc

SEQ ID NO: 585647 - DNA, 4001 bp, Homo sapiens
ttctaggatgtttttacctgccccattagcccttatgtccaagaaccatgggtaacaggaagcaaaagggcagcagtgtagggagcctccctcccattcaagacagagatgagacccaggtgctgagggaagtcagaaaggaagggctcaggtaccagggttgtgcctggagcaatgtggttcagaaaaagggacgctaggaagtgtccctcagataaggatcaagcctcagatagggcttaggagttaggggcaggggagtcgcctaccctgcgagtagcagatgagatgcaccccttgaggggcctttgccatgatggggaccacagcctctcggaacccttgcacctgttcccacaggggtcgcaagctctctctcccatcgaagagatcgagcactgtcaccacagtcccggggtgtgtctgtgggaagggggcaatgcagccaccggggataggctaagaagctcccacacgccaccccctggcccgcgtccacaggtctattgtaccctgctagaaccagggatcccgtcccccaactctcccccacgccagcaccagctccctgaggaactgggcaggcccagaggggtggctttcagttccccgctctccctcccctgccacagtagacgcctctaacgccctgcacccaggtgtcccctgccagacctcattgatgtattccagcaggtggcggaagctgtacgagctgtcgaagagcccatgcaccacgatgaccggcttgtaggacgcgcggtggggcgcgggggctgcaagcagcagcagcggcaggaaaggcaacagaagcaggacccacgccgcggggagccgctgcccgcagagccccagcatgctcccgcctgagaaaggggtgataagggcatgtgagggagatggcaacaccctcctccctcggaacagacgcccggcaatcaagccacctcctctcgctcccacaccaggtccgtgtcacaaaatagcctacttttaacttactccagccctctccctacaaacacacccccccaccacgttgacgcaccaacgcgcacccgaagtcccgcctccaactcagcgttcgggggacttgttctctaggtccaggatcttcctaatgcatcgcctcagccatgaacaacgcggagttctttaatacccgtgagcagcagcccaggccccttgaagagtgcagactcccacctggcctgggtccgtaggcctcgctccacccgctgtttacttatcccaagtctggaacccacggtggcggggggaagggtgaggaaagagagcgcaggggaatgacggatgggagggggaagggcgggctgcttggggtcgcgcaaatccgtcacgtccggggctttctctggcaaccgcgcgagcgttccccgcaacacagacccaggacaggaggggcaatggaatattccattgcgccctaggtgctggggaggaaacaggcggagcgatccatttaggccagtggggagaggaaaaagcagcaaacatattctgggaatggaaagaaggcctctccaggcttcgttgcccccagcgacccaaaagtccgatttccccgccttgattctccccacttcccaatacaggcgtctggctccgcagcagaacacgaagtttgcattccccaaggggcggccagggggcggaccagggaaaggtagtcctctgcattttgccgtgtgctgggtgagtggcagggtggcctggagggctgatgccagcccgggcgtgcccctcaacacccaccccaccccaccctccagtccgccccaggtcagcgacttacaactcttcattctgaagtgcgtgtagtgcccttgtctccagagacgcagagagtcctcgaggccccttgagctaagtgcagcctggcccagtttctcctgccctactctactcccctccctataagcgacccaccctcaaggggcggagggcgcgtagggatgcgctgactcatgcccgcgtaatttcgaccagtctttcaacctgaacgacccccagaatctggctgtctgagttatctgtgggtggctccctaccgaaacccccaggcgccccacctctccgcctgtgacccctaaccgacaccctagtgcctcagggcttttacttgctagggcttttacttagcatttaaagacgtttctctagagataaggatttctcagcatgtctgagcccctctctctgtttacaaggtcattgcttggtctaaatttgtctcaatcaaaacatttttgcgctcagaatggtgtagagtgacgatgaggtggcggtaaggggttgagcgctcacgcgaacgcctaagtgaccagaacgactggtgtgaagccgtgatctgactctgtggagcctgggactggtttcagcgagagcctctgtactgctctgtagtctctgctaggacatggacgaaaagggacgcagccgggagagcgactgccccaggtgggggctggggggacgtaagggaagaataataattatctggctgtgtttttgtttaaaaaaaaaaaaaaactggtgtaaatctccatagacttcctatcctcgctcccttcacccacccacgcgctcccaagatgcaataagcaaataaaaagactaataacgctgtactgcaggtcgactcaggagctggagatgcgtcttggtgggaggtggtgggtgggagtaggggggtttagggaatggatctgaacattgaccagcccagagactctaagcagcctcaaaagcaaagggaaagtgggggaacaagcacacattaccaacagagctgccagaaatgagcagttaagtcataccccctaccccctccaaaagagcttcagctccttagtcctggacgaagaaggtatgtatgcacaccgcccaaactctctctcccttttccctccaaggcccagctccccctgatttacagacctgggcctccctctttactgctaggttggtaggttcaccaaaccctgggaacttttcagaccatcgcagttctgaactctgcacaattctctctcacacacaagtatttatctcttctaaagaggaggaaactggggccaaggatttgggagaagaccctggcaccttgcagggagctaagagggggagacgacctgcctctggaggcacctgggttattaactccactgagaacctgttcacttcctcccacaatacaatcactgagtcttggtgggggagactccagagagttctccttccttcctttccttagtcccacccgcctcgcctggtctagcctccgtgtttccatgacaactccaaaggaacccaaactgggggcttgaatgccggggtaagaggaggagagaggtggtccgagagcagagagagaccgagtgggaaacatctgaagcgctccccctccctcgcctcggtccctttaagctccccccctccccgctctccctccgcccgccccccccgccccccccccccgccgctgccttcatctctccatctctgcgctgctgccggctgcgccatccagcacccagactccagcaccggccgaggacccccactccggctgcagggaccctgtcccagcgagaccgcaggcatgtcatccgaaaagtcaggtaaaaacaataacaaaacctcccaccccctccactgtctccagactctccgtcccccttgccccaaccccctcccttacccctcctcagctgtggttctatttcattccccttctctccagctctcaacactcccccagtccccctcctctttctgtctccccctttctcttcctttcctctttccagtggcagcctctgccccttgccaacaacatggtcaggggggtaggttgagagggtgaaggaggtacagccaggttttgcagggatggcatcattgggagtgacagatggacaatcactggctggcatggagacatcctgtgaggaaatatggagacatgaccagatggg

SEQ ID NO: 585648 - DNA, 4001 bp, Homo sapiens
aaactcagcctctgtccacagagtcatatccgcatcctccatgtccattttcatggtccccttggtcccctctgccaatccctgaaacctcacagtgctggagttacacttgggggcagcctggaagagaaaggaaaggcctttaatccccattgtcccgccgttcctgtggctccttctgagaggctatgactaatacagtagtctgaagactttaaaagcagatgcagagtgcttggtacagttgagaaagagccaagaagccgtataaagtaaactgccttgaaaagaagcaaggtttttaaatgctactcttagttaaaaaaaaaaaaaaaaaaaagaatgtggcaacctcactgtggggaaaaggaaaaaaaaaaaaagaatcacctctgaacaatccctggctttacctctcatggcagaaaaatgttctgggcacacagtccagtgtcccagaatgcctggggtcatggccgccagaccctcggcactgtggaaaagctgcctcagaaaagtgtcacaaacaaggagaggaagaggaaggagctctgtctgcctctgaatgaagctaaaaatggaaagcgcgtgtggtgcaggagcggaacccagcctgccttttccaaatggggaagaccgaactttcccaccagctcccaacgcaaaacaactttcaaaacaactgcctcctccctctgctgcgagctctctttcatcctctcacatggaagactgaaaagggttgcatcctgccagcatcactgagctacggcctcttagaaatcacttggaccacaggaaaagaggaggaaaaatgggtgaaggggaaaacagcctgcagtgtcttctgacttgcaagcatctcataccaaattgaaaaggcaaaaacaaaacataaaaccgtttaataaaattccctggagagaattcctttaggagtcctcagctacaaatagcactttccatttaaatctgaaagtgtatgaattcccagaagtcactgatgtactacagtttactgtaactaaagttataacaaatttagaagacttggaggacaagctctgcttccacttgtacattgatgaggatattcccccaaaatcctccctcacactcagaaaaaaactgttttccaaaggcaaaaaaaggtaaacaacttctgtaagggttttctcatatagacatgtttgataaaaatgaggaatatgggtatcatttccatgtaagaatgtgtgtttgttcaaatgtaaacataacattctgtggaagtccttcaaggaggtttttacattcttccacttctctaaataggatgctcttaaaaaaaaaaaagttggatgcaaagttgtttttccctcagttatgatttaagcaaacctgcttatttttatttagttccaacatgtagagtcatgacgccaaacacatgttaaaaataaaataaaatagaaaacttcagccaacccggaatagtttgacgagtgtgagctggaaccactactgaaatttcaatgaattggcaattatgtctagaactgaaagggttaatgattcataaggaaagtctcacaaatgtttgacagcactaagtgcactaaagcagaagcatgtttctactgcgacattagccaaaaaaaattaataataataacaataaaggaaaagaaaataaagttttcagatcaatttcagaattaaaaaaaaaaaattcaagttccttaccaaggtcgtacccacacgtttttccaagcaaatatccaacatctgagaaaagtctcgttcatctctacccagtccacattctccccgcgtcccccgccaggctgagccgcacagacgcgcacctcggcggtccctcctcgcttcgtccggccgcccgggcgcccgcgtcccagctccgggcggacaggtgccgcggtcgctgctcttgcctctccgcaacactggagggccgagtgtcacggcagcactttgtctgtgttaaccgtctggcttcccctccctgcttaagatttccttagccactcggctgcgcgaagtgggggcgtggccaacgtggccaacaccacctggccgagcccagggctttcccccagattgctagcacagccgccgagagcttcctctcttcgcatgtgtatttcaacattgacttggaatcttcttacttccctttgaaggcacttaacctcaacgcttacttgggctctattgtattctaaacactccagatcgccctccttcctggcgcggcagaattagggggcgcacgttccttaaattaaggaaacttaaaatttacctacacagtttctgatttctcagctcaaatccccaggtacaaaagacacaaatcttacttcaaaagagcaagttaaattgtttttgcagctagtgtaatacagtggagctgtctggtcctcaagctgttgtgtatgtaacgcacgtttccccgccccccgccccaaaagttgtaacattccgtttctcctgctaacgttcaaacttggcagaactaactttcctcttttaactatttagtaaatagggaaataggcaaaagttataattctacagattgtttgttttcctttcctctcctcccagaacccacaggctgacttcccaggagtgtaagtaaaatgtagagcattagtcgtttcacagttcagaggaatattgaactgatcactgcaagtggaaagcggtcggaggcagtaattagtggggcttattctgagccccggccagcttttcctccagcccagtcagtcctctgttgaaggaaggacatcctgtgatgatggcatacaatgtcctgtttgtttattattaagagcgtggaccttgcattcctgcttctcattacaaaacaaaccagatgctttacttccttcaatggtcttgtgccttcagcaaggaatcctttaattcagagaaacaatgtttatagcaaacaccccatttcaattattatttagatcattgaaatccaggtcttccatttttcctgcttgccttaccataggtaggtttttttaaaatcatttctccttcgacctgcaatgtcttttctaacattttaaatacacgtgtgcacacacatccacccacacacacacccacatacacacacccagttccaacctaatgataccaacttagtcatacaatgaaatggacatctgagtatttgtttacaggaagaaatgaaacaaagcaaaacaaaagcccaactcaatcctaaaaaatatgtctgtttatctttaaaatttcttttctcacttttagaaaacttttctagaattttttttaggggagagggggagaggcaaaagattatttgccaggaaatggtgtctaaagtcttgctgcaatctctctctcagtacagaacaattaaattcccactaggggacatgattagcacacactcgctgcttgctgcgtggcccacctgtgattgcatgttatgccagaggggacgctagcaccaagaggaagcaggacttttagaaggcagatctgctgggggtggaaaactgaatgaacaattcctaagagtcctcagaaagctccaagctgataattaaacaagagaaatccagcctgctcaagagggtttattaactgatgctgagtcagcaccacaatggacagaaaaacaatgtagtcatactgaaggctggcctgctgttcaaacagtctcacttgcagatgttaaagagtatttcacttcccttttagaatcaaactctgttcttaggccacatacaccatcatgcaactgctggtgagtcaaccatgatagagtaagggaataggcaaaaagtttgatatttgaggtgggaagaaggctattttaagccaaatatttgctttaatgactggaagatgccagtgaatcaactcactgttaattaatatcagcctgcactcaccttcagaggtggtgaaatgggcttgagtctagggaggacgcaaacttcaaataccag

SEQ ID NO: 585649 - DNA, 4001 bp, Homo sapiens
ggaactgagagccagttcttttcctgaagctcaagggtaacctgttgtgtaaggaccccaaacacacgacctcccctacgggggaggtcctgatgcttttatagccccagattttcagaaaaactgcaaacacaatcttgcaatcttaagggagatcaagtaaaatgaagtgtggaatgaataccaaataaccatacagttggattatatatgactagggtaagtacttggcttgttcattggtcctaaaatcaaagtcaaaattccaatttatgttaacattgatatttattccaaatgtctcaaaggtgaaaatgagaactaaaacaagttagccttctggtaaagcaaatggatatacttatcaataactggtaaacctgggtaaagggtaagtggaaattctttgtccttttcttcaaatgttttcttaagtttgaaatgatatcaaaaccaaaagttacaaaaacttcagcatttagtcttaacttctaaaccaaaaggaataatttttaaaactgctaataagatttagtggtctaaccaagaacacacaaccatagttacagcagaggttagaatcttatggcaattcttaaattgctcaaagagatcacttgagaatgaccaaaatgatgcagccctctgcagagagaggtcatgacagcaattttaatcaaataaaagaagtaaaagcacataaacctaaggaattgagaatttgttaagataaagtgataggtggctactataatactgatcaagagatcagatagtttttttactgtaaggaaggaagctaagatgtaaaatctttacggttattcacttagaataatattgaaaaattatgacaaagtttttctagcaatgatcttacaatgttccacatcagatcctaactgtacactcaaatgtacatctataaatattttgatgcagtctaagccctgccaaagtaccacagatgagggctataccttgcatacgcagcatgtctggaccaatccctgtaattctcccaactgcttttggataaattagaattggacatatatttcttcctgtaacatcctgaattcaaaactcaaggtagctcctcatatatatatatacttttaaatgatcaagtttcctaatagttaatagggactcaaaaaatgtttttcctcttcctagtccctagcttaagccacctacttcatccaacacatgacaaagccgtataattaaacaacatgttattagttcaaaggggcagaaccgacattactggcattttttatttttttgttctgtaatccacttactgagattcatcattgtcagctctccgggataagggtagtgaagcctttctgcaaagtcccgacaataccacacaagaagttcctggttggcagggatgggcttaatggtgtagaagtagatgttcatcccgttctgacacgcagccaggttttgctcccggggagagtgtgctggattcacatagcgcatccagttgcttttctcttcattaaagccgtcaatgaagtggtgaagctcccctctggaatagatctgtccaaaagagaagacaggcatgtaaaaggaagtcagacccaaagctccccagcacctctcagaataaacacagccggtaccgtgtgtgatttctgatcccctactgcctagttagaaaaagaatccaatcagtttagccagaatagtcttgaatcagcagaaatcagggcggaaacaggtaaggcacacttttgtcagttaccttttccatttcagttttatcgtcttttcatgttcgggaaaataacagaaaaatgaaacacaaatgttcatttaaggagctgcctcaaaccgattaacccaccacagagtactacttttgctactgcagtgaatggcaaatgggcgatgctactgacttcagttccgattatgctgacttttagtgctttgagtcactgggtagaagaccaagccggctgacgacgtcaaactgagtcttagctttttctatggcctctgtactcgccgtttcctacacccccgcccaaggcttcaactatgcaaacatcctccacccccaaccctccaagtcctaaagtaacacttgttcatatgaatacttggaaccttgcctttttgtggaaacactgggtggggcaaaggtgaacttcacctgccataacaaagcgaacactcgggcagcagcccgaatttgacagtctattactgagaagtcacttttcctcttgataaacatgtccagacttgcactttcctttcaatgcaaaggagggaagggaaccccttatctgggaggaggctggctaaaacaccacacacagagccataggcgtgtgtttttggaaaaagaacaggaagaaagtatgttgttccttaaaggcaacgcagaatgaagaatttgaagtttgtcctagagtaatactacttctggataacagatgcactcaggctacttggcaaagaggcagaggaagaagaaaaattaaaacgtacactcttactgaaactataaacacactccttatccttccacacaaagttttctctcttcccctctttttaggaggtaccacctttactttagactttaagaaatttccttatacaatcagtcaatacctagtgtgatctgcgacttgcagtctccaagcagcagtaaggcactgttcgtagcaggaattttgtgctcaccggacagcaggttattgcttttccttactcacgtaccgactatgctagtctacagatagtttctgtatttcgctcaaacgttatcagaaataaaaaggaactctgtccctttaacacaggcggtaaacaccagaatcactttcttttaagagtaacttcctgtaaattgtgaagggggaaatacatgtggcttcatcaaagcagcttgtgagagcttttgcggtgtgttttgttaagagaaaatggaacaaggctgggtgaattctgctatcaagaggggttttcaagtttgtttactctgatgtgcaaacttccaggaacatggggttccatcgctcttgtactcttcgctggtgcggaaactgctttctaaagctacgggtatgttgattccagttagccttcctcggactgcaatttactgtatcctcatttaaaaacagcaatgtcggtgccatgaagtcactcacacagaataaaataacgcatatgtaaaatgaacaccgtttcctaccaccttcctgcacttccatatattatctagaagattaaaatgcgctgattcatagtacagttacaagaaatgtcactggtttctcaacttgaacatcccttctttggcagtgtaatttgcatgaaactttttctttcctcacaacagatgttcatattcctgccagcaaaaacgagatgttctacaatatcctttgcatgtgaaagactgattcaaataaatcctcccaaggaaagcctttcagttacttacagtgaatctttaaatgaaacagggaactggacagtgagggggagattcttaggtacttcttgccttttctcaaaataatcacacattaatgagacttatgctggattgtcttaattcagacctttaactccaagaactatgcacctttgtggctcacttctgagaagacgttattgacaataaaggcaaaaatgcactcatggttccaccattgtaagtcaggtgattaatatattttaaggaggaataattattaaataaaaattgtgagcacatgattcttagtgaatctgtaactaccctcttttgcttgggaaatagtaagataaatttctaaaaatgaaaaacttcctggattaaaaatattgtttcttaggaatagcttcttgtccgaacgatataatcgttctaggcaaaaataccagctaaagcaagcataacacaatttttgttatcatgcagctgtttctttttaaagaattcaaataatgtacatttcatgtaagtatgcaca

SEQ ID NO: 585650 - DNA, 4001 bp, Homo sapiens
actcgtccaccagctcccctctcaccatgcgcacctgcaacacaagcagtggtcgttctcccccgcaccttggccaggcccacaacccaaacagaaagtttatcctccaccccaacccaacacaggaaagtggttgtttttggtttggccagaccactatgggctactgggaggaggagaattccttaggaccttgcttcggggagggagaaagaggaaagtctacctatgctaacagtactcccacttccctgcgccccaccttgacgacacggggaggggagaggggtgttgagagcatcctccctgagtgcttaggcacatcttgtaccaagttgtcccctaccccagctctcccatttgcagttctgagagcagccgtaacaccacggtagagacatttctaggtcagtcccagggcccagagcgtacccccgacaaacaaacaaaaaaattatctcatgcctcctgtattctgtgtgcatcgcacctagttgcctgtgagccctgcagctaaagtctcggaacaaagcccaagcggggaaaagcttgcccgcagctggcaggccatttaaaagcaattaaaacgcgtttaaagaggaatgcgcggtgggcaccaaaccccgctttagactgtagtggggggcgtgattgcaggaggagcgaggtgcaagtcccgctggctggacaccggagctttttactagaaagctccaagcaaggcaagctaaagccaaggaagccaaagtcctttcttctaccccagacttctgccttcatttcccggtcgctgtttgccgacctttggctcctgggacgcccccaaagcgggcgagtgctataagtctctctggtcaggggtcgcgacggtgtgtggagtgtgggagtcaaagctagtggtttggccctggcgcctcccggttgggcctctggactctcagagccccgctgcagacgctctgaccctgtgccccgcgcgaatgggcgcgcctcgcccttggagcccgcgtcagagccagtaccttgctcatcctctctccatatgccgcatacccacaagccgacatcggcaagggaaaaaaaaatatctgaggaggttctaggaactgagagcctcccaaagattttttttttcaggaaaaaaaattactttaaggcgaaattaggcctcaaattaacatattgaagggcagaagggaagaaagggtctcgatgccctgagcccccagaaagagggtgcttttgcagagagagctgcggacagcgtgcgggggtgggcttctggcttctgactgaggagacccgagagcgcaggggaaaacacaagctgcgaatggtcccggcacctacagcgctcagtgcaccccacccagggctgtcgcctctcggccacatcctctcctctcagcccgaccccgtccagctctcacagttaaagaggctacttgctcagaataataggagtccccttccacccggcagaattagcaggtaacgactcaatcactcccttcctccactttctctcgtacccctttcccgggtcagggcactgagaggcgaatggcagtgggcagaggtctgaatggtcaatacctttttcttaggcccgggctccctgcggtctgacaggtacttgcccagcttgaaggtaccaggcaccggtccgaggcgcaagccggccgggatgcagcagtcggcactcacgctggtggctggcgctctggcggctccgtgcattgttgccgccgccaccaggcaggcgctcgggtgctccaggtccttggaagggcgcgagtgacagagctggagctgcgcgctagccagagagccgcgccccgacgtgcgtcctccgcccgcggagtgacgcgggcgggcatgcactgcgccttttcaatcggggcgggagccttttggcaccgctagcgcaagggcgcggagtttggtgagagagttgcgctgcgaagcagctgcagagtcccacccgagagggtcacatggagtggttccctcagccccctgcataatcgaggccgctgaatggctagcacacaatggtccaggcgaccttcccattcctaaaaatccaatttgtcaagggcgaagaaaaggcactggtgaatcaaaggtccggcgggaccattaatcctcagcatggggtattgtcctccagacagttacgatattttaagtgacaaatccactgtataatttctccataaattttacttccttttattgttccccgacaaaccagttttgggaaataagtgactactttaagtctacttggctgattcctttgagccttgatctacttcaaagatttttaattctctccccttggctttattgtaaaggagattaaacaaagagatggagactgtttggaggacttgttaactactattgatttctggcgtgtgccatacagaaattaggcaggtacttgatgggaaaacaccagaaaatacctacactttttaaataacaaccatattaccatttcaggggattgggttcaggccagtcgtctattcagaaccgctttaattctcacttctgtcccatttcgtccgaaaatatgatgaagcctccagaccaagttgagaaggggaggtcaactgctcatcacttttctcgggcacaccccgggcctgcactttctctggagaatgggaaacagccccagaaccaacagtttcgaatggggatcctgcgccccggtccgcagcccagggttgaagaggaagaagttctaccagtgggttattgatcacgtcccctagaagatgtccttggactaacttccctaaaaccagcaacctggacttttctattaaaaaaaaaacagtaaacaaaaacgaaaatcaccgcaatctgttaaaggttgtagagaagaggggcgaggtgggcgtttgggacaactctttcttacacctactttgtgaactaacaagacgttgtacttcagagttaaaccggagagctacccgttttcttttagggaagcctccaattggcgtgagaacatttattttcataaatagtagccaagtaatcaagttcatcagatatttgtgatttctgccggcacctgccgcgtgctgctagttctgagcacagctccccaaatcctatgcagccagcaccggagcccgatgcagttcttccaagagaggcctgagtggtggtgtatttccaagcctagcgccagaggcccaaccactgcacaaaagggcagagggccctcagcagcgcccacgctagcttctcctcgaggctttgtcggctgaaagtgctggagcgattgtggttagcaagggtggcaggacgcaaggtggcgacacctgcaactcagcagtttatctgaggagggtcttcaaagaagctccgtgtggtgcccctcactcgaaacctatgttcaccacactgggcaggaccaggacactcaggatcattcaccctgtgctctcccactcaagactcggggaacctttagtggattgcttcggaggctcagcctcccagtctgtaaaatgggaatgatggatacaaacagaccctttgcttcctctccgtggttcacttcggtttgtaacaacaatctgtagagtgcgtgcattctagaagctccaaaactggttgtttgcctaatgggaaaatccaggccaggccaaaggtttcaagtctaagcatctcaagtcagaccatgagaggacacacggaaggctggcctcgggccaactccagggcctgtgtatacatggctgccgaggcagagaagagccgcttgaaaggtctggagggccacacactgtggcctctgggaccgtgcagccacactatgcccaggtcactttctgagggagctgccactgatttttcctcagaagcctccaattgcgcttctgagggctgcgaagactgccctcaacagagcagagggaggctttgatccagcggcccatgaatggcaaaagccggggggtggggaggag

SEQ ID NO: 585651 - DNA, 4001 bp, Homo sapiens
cgagttgtttataatcttttagacgtcttcataaaatcctcacttaaacctttcatgaaatatcaaacataaataaacaaactgtaggatttaggcacccacagtggtgaaaaactaacaagtaactctaaaaacaaacttaaaactgcacttatcaaaccacagaatgggtaattctttatattctgatcctcaagaaccagaaccaagagagtcacctggcttcccattactagtctggaacactgcagagctagactgtcacatgaatgaatgaatgaatgacaacattcctactgcagaagcaagtaagccctatggtcagtccaaatatttctcatatgagaaaaaaggcccataacaggtaaaagagctgctaaaagtcacctaactagtgaatgacagaaccagaactagcgctctggtcttttcatttagtccagcctctttctccattccagcaggatcactttactcccatattcaaaggaaacaacctttaaaccacaggaatagagcttcttgagctgttagggtaaatttaataagcaagcagctgagcagactgagaaaacatggttaccagatggccactggtcaaagaaaccatgaatgaatgcatcagtgtcacttggaagtcttaatttaaaacagtatgtcctttactccgaagcgtcagcaccctttaccccaatgtagcacgtgctttaaagtaaacactttctggcataaattgggaaagtaaacagaaaaacattaaaactgtatcacacaaatacatacttattctgattatattttaagtaatctgagaaatgtagctattagtaagagaatcacggccacaacatgtggatgcaatccagttcctaagtcgtcaaattcacgtttacacaaaaaaggtgtctgcccagaattccgcctactggatctcaacagttaccttgagttcatctgcagcttaggcaaatggtggtcaactccgccactagacaaaacttactcattctgaaaaaggtcaacccctctcccttctaagacctcctctcaccctctctcaactccttttcttgtttaagaaaacatggatcagcacggccacactatggggtcactgctccgccttccccatttctgtccgggtctctggcatccccagggcccagtgcgcctcatccgacctgggacagggtaggcgctcaacacaccttttaaaatcgaacgaatatgcttcaactctaaggactttaaagtgtaagttttaaaagtttgttttcgtttttaaatgtgacatcacacacacacacacacacacacacacacaaacacacacacacaccccagcggacactttctcctaccaccatatttaagcaagaggcttcgccagtcaaaaaagcagtgacaccgtctgtcttcccactccctgaagacacccattctacccgggcgtctgcccttgaccccattgattctaggaagcggccgggcggcgctgcccacaggctccgccgccagcactagcagagtgaccgcccgcgggaccccagcgctgcagaggagccccgcgcccccggcccaattctcccaaacaaaggccgagggggaggggagggacgcgggggtcgaaggcctacaggaagaggagctgcgggtgccacgggtcaggcaggctgggcacctttgcccgggagccctctgggcggaggcagagatacttacggcggtctcgtcgcggtacacgtcggggtactgaagggacagcatggccggggacaggcagggggcagcgtggaggggcgcgggctccgggagcggacctgagctagccgggctggccgcgaggcgcggctggggcgcaggcagctgcggggcggccggcggcagcgggcggccggctcacggccagagctagcacaaacggactggcggcgcggcggcgaggacgtgcagaaagcaggaagccgctgtctgcgaggccgggagcccctccccggcgggcgggcccagcggcggcggcggcggcaagagggagcgggcggcaccgagcgtgcgctaaggccggcgcacagctccctctgcaggatcgccggccgcgcccgcgccgcccgggcgcacggaggagcacgccggctacgcgctcgcccacgcccggccgcccgcccgtcctctgcgccggggacaagtccttccaccgaggccgggtccccgcgccttccctagcgccctgcctctctttggccgcgctcgcaggaccgcctgtaggagagtgaagccccagggtttccttgctgatggagtcccccaccttccccagccttcctgttcccgggctggttacggcggcgaagggagaccttgcctctccccagccttggaagcagagggctggaggtggccttatgtccactgcctgcgactctggacttgaagggaagaagtaatcgatcatgatgaccgtgaaagaaacacgtctcccttcatcccaggacccctggtggacactgggtggtttagcatccggactatggagatgctttggaggtgttggcaggactacggttgagcccttatttgatatttaccgattgagaaagaaccaagattaagaggcctggaactcatcaggggtattttatttatcctgccttttcctcatttcctctcctgctgtcatgcttgtttattgagcacctactgtttatgggaagaaaagataatagacaagatacttgacctcaaacccatgaaaatttaatagttacatgtcatcatcctcgggccagcagcggtatgtgttctggtcttgcttcctggaccacccagaagagactttatagccccagccatcaggggtatagtgtgtgcccagtgtgttttctatccctggcttccaaaaagtcctggaagaaagaataggtgtgaccagaaagtccttcacctccggaatctaagtggatatggtaactattataaacttgtgtcctccgtctcttttgtgatatggtcccaattccatgcctcacccttagttcaccatttctgttcatagtgatgtgtcataatcattttctgcatctgatcccagataccccctcctggggcaatctgagaatcctcaattctgggagaactcacgctattgataacaaactttgtgcaaacacgggggcatagcccactacagcccagaagtcccaattccagttcccacctcgtgccttccctggctgtcacctgacgcagggactggcaggcattgtctcctccttctgccactgtgagggattttttaaagagcaacccaggagcacttgacccagcagaccccctaatgataatattaatgcttatggagtgtttttttcagtgtatcaggaaactatctagaactaatgtccctattttatagttaaggaaaacgggctgacttttgcccaggacttcacaaaaagtgaaaaagtagagccaggattccaacctaggtctctccaataccaatgctcattcttaaccactctgacggccttcctactcataaataagtagagatactctagagtctacagggcacccatttgcagggaaaacttcaatttagcaggacctaaagaaaatgtgggaattgtggtacccaaaggacaaatcaaacctaggtatcatcctctcttccctttcagtcagccgttctggtgcccagttcctctgggccctgagaggtaaaggtttgtagtggcacagacagtgcaagaggctcccagcagtaggttgtctgcatctggagtgagatggagtgggagggaagatgggagagcaccctttcccctcctattgaccacgttagttgcacttttgtttgccaatgtgttgtctcctttaatccttatagcaaagaccattttacagatgaggaaaaagaatctcagcagctttaagggaatgagttcaaagtcatcacacagctaagacaatacaagattcatattcataagttgactgca

SEQ ID NO: 585652 - DNA, 4001 bp, Homo sapiens
tcatctcttcagctttcctctcggcagctcctgatatgaccataatatcttgggggtaagaagtgactattggctgggcacggtggctcacgcctgtaatcccagcactccgggaggccgagacaagcggatcacgaggtcaggagatcgagaccatcctggctaacacggtgtaaacctcctctctactaaaaatattaaaaaaattagccgggcgtggtggcgggcgcctatagtcccagctactccggaggctgaggcaggagaatggtgtgaacccgggaggtggagcttgcagtgagccaagatcgcgccactgcactccagcctgggcgacagagcaagactccgtctcaaaaaaaaaaaaaaaaaaaaagaagaagtgaccattggctgggcacagtggcttatgcctgtaatcccagcactttgggaggctgaggcaggcagatcacctgaggtcagtggttcgagaccatcctggccaacatggggaaaccccatctctactacaaatacaaaaataagctgggcgtggtaatgtgtgcctgtaatcccagctactccagaggctgaggcaggagaatcgctccaacctacctggaaggcagaggtggcagtgagctgagatcatgccactgcactccagcctgggcaacagagtgagactccgtctcaaaaaaaaaaaaaaaaaagcgactattaatgtagagaagagatgagccccgccctcaaggagctcatagtgggtaagacaaagatgaaaccaggtagaatgggatcaatcagagctcgggacagacatacaaaaaccctggagaaaaaaataaccagagcaaactttttaataatatttactctgtgccaaggactcttctagaatattacataatatagtccatcctcacaataatcttatgaggtaatctctttcattccacttgacagttgaaacaagttaattaacttgcccaagatcataccagaggctaagggaagccttagggggacctggcttctgagagctgggatagattctgaaagtagctgggcacaggagggtcatcatcaaatccctggcctctaagactgggccagggattcgtactggggttgaggtgagggtttggactgtaacagttaatattgcttcccagcactgaaccctcctcagcaccgcccctccactcccacttcaaatgtcctgtgccacccttccctccttcctggcttcacacccacctgcttccttcctcttctgtccttcaggtcaggtttcctgtggaaggtggccaggatgggctgttcacaccaggagtagccactaacagcactgcccctgctccaggcagcaagaaaggagggggcgtctggggccccaggaggggacttgcaccctcttccattttggctctagtttgcatagaattgtccaacacagaaacaacactcagaaatcaggcctctattcctcacccttccaatctccccaaaggcagccaaactccacctccacctagcactggaacacccttactaacaggccagctggattccttccataattcccttccccctcccacctcagataagggacagagctgaaccccttgtcttgcctccgtgcagagcctccgtgcaagagggctcaggagctggacatccccaacacccgctgccctgaagggcagagcccgagaggacttagggcttggggaggtggagggatgggaagatttctggggacagtgggagggagaaggaaggggagtgcccagtcccgccaactgccctctcgatagatccccagagtttttctggaacttggcgggcccgcctccggggctgggacgcggtgtttcccgagtccgctggggttcccggtctggctgctgggattttaggggaggggaccaggactccgctggggtctcaccctcgctgtgcgtcgctgtccgggcagttctggaccgactctgccgtcaggcccctcacccggtccccaccccaaggcttcagcgcccgcccccgtccgcccccgcccgccctaatagcgcggcccttcctctcccacgccccagcggcccccgcccgcccctccccggctggtggagaggggcggctcagggaggggcctggagctgcagattggggggaggaaaaaaaaaaggaaaacaaaaccacatttatgggatctcagggtggaaatgtgcgggctccatggcctctgccatgcaggtgcaagggctctctggctcggactgcgcccggcaggcatccagcagacgccgggagccgcgtttacgctgggttttcaaccattcgctgaatggaaacgcctcgccgggcccgcagccctgtctctccgcagttcccaggtctccccaaactctccctgtggtctcccagccccgctcctccgcgtgtttcccttcagttctctcccccttgtccccagtggtccccctggccccttcccctcccctcaaccctcttccaggttccatcgtcttgcccttctcctttcaggtcccttcagaccctctccccttcccttcgtttctcgcccaaccctccgtcccctttccgctccccggaccacccccaactttggtgtcctcagccccgcctccgcgccccgcctccgccgcaggctccgccctgtcccctccgggcttgctcagcccctggccaggagcgccctctggcgtctgcgcatgctcactgctcccgactgcaaagtcctccaaagggaccttctaggctgcgtgccggtcgcccccgctcgggtccgccagcccgcagcgtctcgttggtgctgccggtgacctccgaccccgcggccgcggggcggggcggggcggggaggccttagctccgggcgggcggcggctgctgcagcgggacccgggagcggggcccggcgccgcccgggccgcggggcgatgtgagtcggggcgcggcggggcggggacgaggcggcttcaccgaggccgcgccgcgccgcgccgcgccgcgccgcagtctccactccctccctaggaagccccgggcgggcgggcaggcggcggagcaccggggctgggggcggggatccggggacagcgcgcacccagacctcctcattccttacgggcatgtagaaattccccttgacagtcctgtagcctgtcctgcagcctctggctcccccaacccacctctaccctctccgccctggacacatcatcgcatctcctggagccctcagaaccccctcattcactcaacaaatctcctgctatgcccacggacccaccatttctcttggatgcccccaaatgcttccactgcccggaaattcctaggatccctcatatccccattctccttgcactatccaaaatgcccacatccaaaattcttgctcatgtttccccaaacgtcctcatacgttttcagcccccacacccccctctcactcctgcccctgatccatacctatcccagaccagaggcctctccccatttccactcaatgcagtccctcctcagtgggctatctgatacatcctgatatcttaaggagaagagatggtgatagggaaattcagcccctcccccatcttgcaccctagagttcttcgtttcagtgcccgcgccgtgcccccgtcggtggctcaagccccagtattttcccagcaacctatctttagtctgtgcacacctccctgagcctgcttcttccttccagaaaataagccagaccaaggggatggggtccttttacctggaagttgtccaaggatgcagggtgcaaggggccctgggaagtgtttctccagagcaggaatgtgggatgtccagggtctgcagagtcctggcttgttgacttgtctaccttgggctcagatatcctgaaattttggcttactgttaacatttatgttaaaattaggcctttcagagcttggggagcagaaaatctatcaagcttccaaatgcgaaattgaagcagcctg

SEQ ID NO: 585653 - DNA, 4001 bp, Homo sapiens
attatcatagttcaggcccttatcatttcacctcaagtgccaaacccaagggacacttttcaatcaccatcttaatccctatgaagtattgacactgctaagctttctaaaacccttttctcccttgtcttcattctttcattcaacacacaggcactgagtgcctcctctctgtattagcagtgcttaccctgctcctctaagaatgattaacagtatctcacctttccttctgatttccccacagggatatcctggaacataaactctgaagacaacgctagtgtttctgtttcaattcatgtctagcccattcttttctctagcaacacactgaggattaagtaggcccccaggacggtggccacatccttcttacaccccaatatcatatcattagcatggcacaaaatgccctccatacttctccatccaccctgaattcctgaacttgttactgttagctcaaatatgaaattctctttcatgctccaagcctttgcataggccattatctcagcttggaaaaactcttcacttcttctctgctggaaaatttctactcattcttcagtatgtccagatcacatttcaacttctctaagaagctcatttaataagactaagtcagtcactcccacttctttgtttcaacagcactaccatttacttctactagagcagttaaaatactgaattatgactattattttggatgtctgtctccatgtactagaataaaacttcaacaaaaaataacattattcatctcaaaatccctgccacctagaacataatggcactcaataatatgcattgtacaataaataaatgaatgagtaccaaaccctcaacaaatatttgttgaatggattgctgaatgaaggatatgaattacctcaataaatacttgttgaatggattgctgaatgaaggaaatgaattaccttcattcattctcacaaagggtaagtgagcttctcaagaatatatacattctaatttaaatagtacttacatttaactctatcaatagccaagttttcaaattctattaaagatatgttttcagaaggtggctgcaagtaaaactgaaggcaatgagggtaggaagcattcctctggtcacctgccaacctcagcttcctccactttcttccagaaaactccatcttggtcaccttagaaggaagtacacaaaaagcgtaaaatgatggaaaacaaagttgggggaaaaaaaagaaaaaacacgaaaaaataattccacaaacacagaaaaaaaatggatttgagggcatgcacaaaatgttagcagtggcaattcctgggtgatgtccttctctcgtttccagattttctacaatacacctataataattttgtaatgggggtgggagaggcgctagagcagatgcaggtggtgatcctaattttcagcaacatgaaagtcaggtgatgttgcctgctcattataggcctgtgtgtcactgttcttggatctttacgatcccaagagttaacataaggttttacgtggtctgcaatcctgaacttagaggaaagtgctgtaggttctggctaaatgagggtcttacttgatggactgggtccagttactcacttcctctgttatgactctgggaaacagagcaactgtctttcggaactccttttcgggagcatccacaagtgccttacaaaagttccatccccaacacccctcctcactccactggcaaacctatctctccccaactcctccctggtacctgggtgtctgccccaaacaaccaacccgccaagtctgtccttctgctactgctgcctgcaaagtgatccatctctcctttctctcgacttgcaagccttaataacaggattgctctctgtcctaaattcgcggaagtttcccctacctgcaagaattcaaactcgggaaaacacaaacggtggcagccactgttcccgggtggcgggagagttcatatgaaaccggaagaggaagtgactagcacagaaggccagccctgccccacctccccttggcgggtaggagggggtttggcctgaggctctgggcatgctcagtggagcgcgtctgggaattcaaggtgttccgtccaccttggcagctttaaagtgtttggatgtcagtgttttggggattttttttccaaattttaagatgcatttcctgtatgtggagtcggtagctttaacggttgaaactggggtgctgaatgctagtggcgaaaactcccacacgccgaaaattgaaccaatgtaacttcgtctggggacactaacaaatattccctatattgaggaaaatatggcgctttaaccctcagggctggcactcatcactttcaatctggggaggaatgaggaaaaaaggcattaggatcttttttgcacctagctcactattaggggctcttttttttccgctcgtttaatctttcagcgacctataaggtcctataagatcgtattacccccatttggcagatgagaaaacaagttacaagatcctcgttagtttgcccgtctacatacaatacatattttgaatttcgtattgggcggcaagcccctactggcaggttccacgttcaattcgctccccgctctccggcaatgcctcgcacagaggaagcgcgcagctgaattatctgtggaatgaactagaatgaatgaaagaaggcacattcgcaggaatcgctctgcaatctacaggaattagaagaacccagcctcggagggaaggtagggtggaagaagatgaagcactggaaatcacgcggacgtgccgcttactttccagatgtccgactgcagactcacaagcggggcgtcagagccaccacaccagttctccgctgtctgtaagattttcgagaactggaaattaacttcactcgtggcctctaggaggcgtgcctcgcttacaaatgtgctggaatgaggctccggtataggtagtccttaggagatcaaatgaatgctttgaaatgttcacgtttttagaaatgcaaagtacattgaaacaatatcaagcttcaaagcatctacccagcctggactaaactgtggctggcactgactttatatcaggacctgttctaagtggtttacatatcaactcattttattatcataaccacataagataggttattccccccgacccaccaccaatacccgagacagagtcttgttctgtcgcccaggctggagtgcagtggagcgatcttggctcactgcaacctccgcctccgggattcaagcgattctcctgcctcagcctcccaaatagctgggattacaggcgcctggctaatttttgtatttttagtaaagatggggtttcaccatgttggcaagctggtctcgaactcctgacctcgtgatccgcccacctcggcctcccaaaggttattatattaaacgtattttctagatacggaaactgaagaacagagaagttaaatgaagtcaaaaggacacaaaatgtcagagccatgttcaaacccagagaaactctccaggccccactgtgctaacgatctcactacaccaattccagtaatatgacagcagagcttcacctcatttcttcctctctgtattaaatacataatacaaatacgtaatacaaatacatcacgtggtccaaagaagacacctgaaagcatataaactgcctgaaaaaacctgcatcacagaccataagaatatttacatgaatatcttatctctggatagcaaacaaatttaaatattataaattacaaagaaaaaagatataaagacttgaccataaaaagtataaaattatgcatgtaaaaaattcacagaagtattttgcactcatcaaactagagaaaggtctaccaaaagtataacatcgaaaaggttaatgccatcaggatacaaagaagttaactcattaggaaaaaaatcctaagacacaaacagaaaaataggacaagaagaag

SEQ ID NO: 585654 - DNA, 4001 bp, Homo sapiens
ccgcttactttccagatgtccgactgcagactcacaagcggggcgtcagagccaccacaccagttctccgctgtctgtaagattttcgagaactggaaattaacttcactcgtggcctctaggaggcgtgcctcgcttacaaatgtgctggaatgaggctccggtataggtagtccttaggagatcaaatgaatgctttgaaatgttcacgtttttagaaatgcaaagtacattgaaacaatatcaagcttcaaagcatctacccagcctggactaaactgtggctggcactgactttatatcaggacctgttctaagtggtttacatatcaactcattttattatcataaccacataagataggttattccccccgacccaccaccaatacccgagacagagtcttgttctgtcgcccaggctggagtgcagtggagcgatcttggctcactgcaacctccgcctccgggattcaagcgattctcctgcctcagcctcccaaatagctgggattacaggcgcctggctaatttttgtatttttagtaaagatggggtttcaccatgttggcaagctggtctcgaactcctgacctcgtgatccgcccacctcggcctcccaaaggttattatattaaacgtattttctagatacggaaactgaagaacagagaagttaaatgaagtcaaaaggacacaaaatgtcagagccatgttcaaacccagagaaactctccaggccccactgtgctaacgatctcactacaccaattccagtaatatgacagcagagcttcacctcatttcttcctctctgtattaaatacataatacaaatacgtaatacaaatacatcacgtggtccaaagaagacacctgaaagcatataaactgcctgaaaaaacctgcatcacagaccataagaatatttacatgaatatcttatctctggatagcaaacaaatttaaatattataaattacaaagaaaaaagatataaagacttgaccataaaaagtataaaattatgcatgtaaaaaattcacagaagtattttgcactcatcaaactagagaaaggtctaccaaaagtataacatcgaaaaggttaatgccatcaggatacaaagaagttaactcattaggaaaaaaatcctaagacacaaacagaaaaataggacaagaagaagaagaggtaactcatagaaaaaataactactgttaaatatgaaaaatgtttttatcactagaggcaaagaaattttctcctgcaaaattgtcaaggattttataatgaaactactcagtgttgccacctgttttgctcctcatttaaacccctgaggctcttcatgactcccatatggtgtagttctttaaataattatagccctctactacagaagttctttatcttttggaagatcaagattaagaacttctgtagtagagggatgttaattaggtctatgaaccactggacaatgtgatgaaagctctcttcagaaaaatgcacctacacacacatctatactatttcaagaggttcaagatcaccatatgtggctagttaagaattccagcactactaggttttaagctttctttggatgagcccttttgttcatctctgtgatccccaaagtacttcctacaatatctgcccaattaaaagacgaagtagccagtgtcatttcatgaccagctcagagaaaactggaaatatatgttcatgcttaacataccaatatcttactatgtcacataatagctgccttttcatcatattaaaaactgattttaagccccggggaacaaaataccctgtgttggtcagctattccagcatttttattgtttcctaatgccacagttttggtcactacctcactgtgaagggtgtttttctgaatccagaggcaattgcaatataaatccgcatatcacggtagcaataatgcacaataatgttatacatttcagcagccatgttcagtaaatcactgtgagctctttcatgtattcacttcatctacaaaaaattgattgacacaatgctcagccctggcaaccaagattcttgtaaatacagacattgacctcacaatcatgggaaggaaaacatacataaacatgtaagttttacttccactgaaccatagcatctcaaaaacagggatgactgtttcattcatttctgtgaccccagtgcctggcactccatgggccctcaataaatacttatgaaactgaattgtttttgttttttctttggttttgttttgttttttgagacgaagtctcgctctgttgcccaggctggagtgcagtagcatgatctcggctcattgcaacctccaactcctgggttcaggcaattctcctacctcagcctcccgagtagctgggattacaggcgcctgccaccatgcccagctatttttttgcttttttagtagagacggggtttcaccacgttggccaggctggtctcagactcctgacctcaggtgatccacctgcctcggcctccctaagtgctgggattataggcgtgagccactgcgcccagcccatactgaattgttgaatactgtgagagacatatgaaaaaaaatgctgggttcagcttcccattaaacagatggtttgaatcaaatgtgactccaacctataaaacttcaagtcctcatctgaaaacattatacacattccttccagaatgagttggcttcctagtttagcctgtaataaagcacagagtaccttctctggcagaatttccatgaatcatcactgctcaattcagtgcctgccttgggcattacccagctacagacagactgccccacgtggcattcaccctgagataactcctccacagctccagaacttctatcccaaaaagtgtcacacttacagctgagaatttagttgccatgcttggtaaatctaagtgagtgttcattcctcttctgagcggggtgtgtcgccctgaaaaccaaaggcgtggtaagcttctttactgagtaagcatgctgtaaattctaggtcctaccagctgtgtttgccatgaaaagcagagaacatgaggtatttccagcaagatagctgacccataaaagctaatgcagagttagccaacctctggccctccaccctccccatttcactgcctacctctcggagttggctgggaaacaacctaaagaaagcacttcattctctctccatttgctttagattgctttattagtcaaaatcaaggagcaggagaactgacagaaagcacattcttaatggtagcacggtgaagaaacactacccttccatatatcagcattatttggtgtgttccagaaatagtaattaaacacttactaagtgccaggcaacattttctatgctggggatatgagaatgatgagagagccaaaaaatcctgctcttataaatcttctaatggggaagagagacaataaacaagttaaagacataaataattatgttagataacaactactaaacagaaagaaattaatcagaaaagaagaatgtaaagtttttcaaggagataatgaaattttagaaaagatagccaggaaaggctggctaagaatgtggccatgaaacagagaccagaagaaaacttgggatttagtcatgtctatctttaggagaatagcatttcaggcagatggaaggctaatcttaattcattagtatttaagacattacaatattggtacaagaataaagtcatcaatcaatggaacagaatagaaaacccaaacatggtcccacacctatgaggaaacttagtatatgacagatccaccgtacaaatcaatggaagaaaaaaatagacaattctaaatggtgctgggacaattggctgtctatagggaggaaaaatgtattccctacctcctactatataaaaaatcaattccagatgatttaagaacttgtatatgaaaggcaaaattttaagaatttaaa

SEQ ID NO: 585655 - DNA, 4001 bp, Homo sapiens
tttgcctttgattgattacatcacaacagaggccccagaaagcttgattttctccacttttcctgctctaattacaaaacactctgatctttgctgaaggttttcaaagctttgtcatcaatttgctatctcagcaaatggacagttacagtcctatatatatcaataatttatactttcaaaaggaaagaaacgatagatagctaccaaattaaaatcacttgttaacttcagtggcattaccccaaaagaatgcccaatataaaactgtgtttatcacaaaacttaagtccttcaaaacctttaagaaatgcaatcagaaatgcccaagataaaactaggcaaatgctaaagtttagtttgtgaaaaagtacctaaacctaaacacttaaaaatacctaaaaaattgcttagtgtaggaagtgactaaatctgttagttgtaaaataaaatttttgtttgagatgattcctattatagacttttaatttttcaaaaacatgattcttccaaaaagtttattttatgcatactataatcatatgacgaaaccaaatgtatattttatctgtatgtgtaaataaaatgtgctttgtagatagaggaattggaatagcaggtctaggaaattcacaactggatagatgttctgtaactctgagtacatttatctgcacatttagcatggaaaggatttttaaagcccaaaacgagataaaatagacacatgtttttgttcttcatttaattagaaacacattttatggttgttactaatttattttccttgcaaatgtcaaccaagaaagtaaaggtgattagttattactaggcagtctgtttttccttttgaaatgtcatttggcttgaaccaaattgacaaagaataggaaagacaattctgttgttagtgtctattttatggcttcacaattgaaagtttcatcaggttgattcaagttggccaatccacattagaggcctgataaccagaaaatgttactttgtccctttgagagttgtggcaaattggacccacagactctttgagtcttattctagtccagagtttctcaatcttgatattattggcattttgagttgaataattccttgttctgggggctgtcccgtgcattgaaggatgttcagtagcatctctcatcactatccattagataccaatagcacttttccctcacttccccacctcagttaagacaacccaaaacatctcccgacattgccaaatgcctctgagagaggattcccctgtttgagaaccattgttctgttctatggtgcccttgtaaaattgctttctagaggaaacataagattgtgcttctaaaccttgtaaacctgcaagctcttgttattagttaaaatttcacattaatccccccacaggagtgttgatacaaccaacaacgcagtgagttgtcacacatacctttccatggcgatcctttgatgttcatgttcgtgatcgttgcaggaaacacacttcaccagagaagatctggaagtctcacggttttctctttcccagatattggctttataaacctttgatatcttcatgaatataatgaatcaggcattcgtttcccttttcctggtcatctatttccgtcattgagattacccccataatttcaaacatcaaatggtattttatttcttattcatattcaggaagacatactggccagaaatgaacattctaggaaggattttgattaattaggccaaaaggaaatgagagaaatgatgaaggtgagatctgagactagattggtttggaggatctataaaactacagaagtcatttactttaaaatttatcttatttctctaaagtttgttgaatatataggattatatttcacttaggtaacaatctcatgtattatcagttatcaagtttcttcctcaagattgctaggtaaagattttaaaatttttacactaaataccaagagatatagaataaggattgagaaatcaggattttcagtcccctgttacactgtcattaaatttccttcattttgttgctttttacattttgttttatctttttgaaatacacattttgttttgtctttttaaaaatacatgtgttttgtctttttaaaaatagcgtatctgtatggtactttgaatgtacatcttcatctgtttatttcttttgattttaacatatgtgttaagtggtattattctctccagtttacagatgaagaaacagaagcttggagagactaaaggtaaagaatatgaaagaagtagttcagtgcaaaagtaattgaggttttgggctttacttttaaatggtaaaaactgcagtcacttgcgcaccagcctaataattctatagttgagttaaatgaaggaacaattattacttcacggaaaatcaggagtcatatgaggaaggctgggaaatgaattctcttgtaaacatcctgtggacccacttctaagacaaacaagctataacccctgatttaagagtttattttggggaagtgatgcagtagttttccagggcaaacacacatgtgtgtgcacacacacagacacacttacacccatcattctggtataccatgtaataaactgaaattctagccagtaatttccactcttttcaaggatagcagtgtgtaaactgttattaacttatgatctctctaccttctctgaccctgagccactctgaggccaaggtgacaaaaattcatctttcatgggcttaaaaattccattcaccttttggaaatttcctaaatgaaatgactataatgaataagaactaagttttattgatgactttctctaatttttaagtccatgcatctaaagcagcctgtgacctttagtttcaaatttgctgtctcttacaatagactgatgaatgaggtaatttaaaaaatagtcttcctatggcatttactttttccttagttcctagagccacatatgtgctttagcaattatctgactaagtgctcttatggggacctagaaatcttaacaaagactaacgtctctgaaaaactatcttcctaattgccttagtttaaggcaatcctacattttgaatcataaacatcaaatgtgatgattcatagactctctcaatctgaaagctgggtcaggattccatatactcacattaggtattcattttttccctggatggagagagtctgaattattaagaaagcagagctgtgtggcagagaaattaacattatcctatattctcctcctctcccataaacttaagagtaagaaaatctgttataagaactgacaatgacaacttaatcttaaaatttaaaggtgttgcaacattcttggatagccaggataagagcaatctaagaaaacctaagctgtgtttattcagggtctgtcagtcgatttatttgactgcaaagaggtacaggtttctctgtaaaatttattgtgtgtctccttgctgctccatagccccacatttcctgtgaatggaatattgaaatatataaataatgcaaagacatatattatgcaaaaatcatagttgtcctaattcttctaactgctatgcatgttaccccctttcaccttaatttttatatgtgctttcttgccaggctttctctttatcaaactgtgcccttaatttaaaacaataaagaagttcagtaagaatagggttgtacattttaaaactttacaaaacttcatttgtttgccatttttggtctgagagcttgtgatgcaactgaggggtgatgattgatttatgtcaagtagctgaataaatagctcaaatgatgctaaagttcccatgctatgtttagtacctgaaactaataaacaaggttgccatcttttctaaagaacgctagtttttaacattaagtaacatcaggttggtttttattcctaatttagaacaaagtttgtattttcttttgtttatctgtttttaagtttggaat

SEQ ID NO: 585656 - DNA, 4001 bp, Homo sapiens
ctctggtctagttctatgaagtctctatgaattgtatgtcacgtgcttgttctgaatcatgtgtgcctttgtacacattttaatgcctgatataaaataatgccagatttaaggatgacatgtccagagtctccacaaacgtaaatctcactctttgagagttatgttttctttaggcaaaagaattaaatatttagctgtatgctaatcagaagtgagatggatgataactttccttgtgaaaggttcctcacacttcaatattctgtccatgtgcacaggcacacacatttcttatctgatggaaagtagagctgaagcatgcctacttctagctagggatcaattggtctatctatctacttatctattacctatctgttaatcatctcttattgttatctaataggaaatgggactctcagccatgcttacttcccgggataattttaaattttataatttaaaattctaattagcacaggcaccatcaaatagaacagaaagctatagcgatagatcagggtgcctgaggccccctgaaatgataggcattgatgtttttattgtttcatagtggtgagactgtaggggttgacctatgtgaggggctgggggagtctagaggaatcagggcacttggaaagtcagggaagtgagtctgtactaagtattttgatattgtaacaactcttagggccatgcatgtgctgacacactattacccctaacttcccccactgccaatttttttgcctgtattgaaaagattcagactgaaaagtagagcaggctcttcagagaaaatgctacccttcaaatccagcctacgtaccctttatcctccaatacatttttgttagaatttgtctaaaatatcttagctgtgacatatctgcttagtttttttttcttatttattcattcatgtcttatcagtataaccaaagggatgatttttttaggaaagctttttaccattggggttgacctagaagaaaatggacatataaataagaattaattctttgatggaatgctctgatgtccaacagtaattcaaacaagtataatactaggcttttaaatgatatatgggaatgtaaaagttcaagctgttgaagaagccttatgggaaaggcagatcacagaatcatggatctcactaatgctaataaaataaatggaaaataagattaaaaagaaactaaaaaatacacttgttatcaacagtggaaggaagtatgaacatgttcattttaaaaaatggtttatatctgagaatcaatagatatagtcaagctgattttttatcagttacgatttcaacaaatgatgcaaagttctgactataacccttcaaaaaatggaaaacagatcgtaaaccttttaagttgtcagaaaaagaaaatacacatacgcacacacactcacacacccagaacacaagacattccatttaacagaaaatagaaaaaaaaaaaggatatgtaggcaacaaaaatatgcaattaggaggcagaataaaatcaagtatattgagataaatctacttattgaaataaaaaagactcagtttctctaaaaatggcaaatcccaattaaatgcttatgtacaagtgacatatcttgtaggggagaagagattccgtttcttgcccatagataggtttatgcctgacagtcctataacaaaagacagagtaacaaaagaaaaacgtacagatttattcaatataaatttacatgaaaaagagccttcagaaatgaagaaccaaagaaacagagaaatgtgtatttttatgcttaaggttgataaaaagtggacagtcatgtagaaatacaattgtccaaaaaggagtatgatctgaaatgactgaacattaataaactgtagggaacttaccaaagcctgtatgttccgattcttcttggtgtctctgtctttgagggtacttctggaatgaaggttcttatgacctactttatagaaacgtcagaggattcttttatggcctgcttcaggggagaagggtgggagaagcttacagagtgaacttcctgtttttgctgttttctgaaatgccaagatgccatattttgtggtagtgtgttctgaaccccatcaatctaaatgagtggttttcaaagggcaagcagttaggaggtgattctgcctcccaggagacatttggcaatgtgtgaagatgtttatgactgtcataactggaagtgggggtgctgctggcatctggtgagcagagaccagacatgttgctaaacatcttacaacacacagagcagccctcagaacataatattatgccatccaaatgtcagtagtgctgcttttgaaaaacctagattaaaatggagtgtctaaaaacgttgaagtacaaaaaatcacagcaagcaaattaaattgctggagtaataaatttgttactaggcaaaaatgttaaagcatagtacagtactttgtgatattgtattgatatgcagtcaataatggagatgagactgtctatagtctttttgcaatcaataataggatcaaaaatattaagcatgcattaaacaaatgtgaggggaaattaaccaagactcaagagtaggatatgggtgtgtgtatttcaagcacctagaacatctacaatagaacatatggcaaaaataatatataaatagtttagtttgttttgttttctcttactcgttaccatgattgtttaatggctgaatctaaataattccttgagttcttatctatgttaatttttgttggcattcaaccttgtactgccccctttggctgtcttattcaatgtcatgactttatttgtcacatccatgaagatgatcccagctctgtttatctctccctaagttgacttctgagctactaattacctgctagacatttcaatctatatgtctacaagtaagatatgctgatttattaaagaaaatccttaatgattcatcttttctctcaaacagcttctcagtcaacacttaacatctcagagttgagtttatttccttttcttttgtttcccttgcatcacactcaaccagttggcaggtggcaattattctgtctctctaactccataaaattatctttcctcctttctccaggttatcttgacctgcatattacaatagcttctcctccattttctcctgcctatgttcaattcaatttcaatctgttcatccattaagattaaccatcctgaggctcaacttctggacaatctctaatttgtctaaatcatagtattgcagaggtagaggaaacatggactaattctaaccaaatatcacattacagaaataaagaaaatgatgtaaacatatttaattactgaaagaactggcactggaactccaattctttctcctgccatactggtaatatttcttcttgccttctgtctgcccacttctgtatgcctttttatgtgcccactgagcttcttatgcagctgatggtaagtcttggtgaggaaataaagatgtgacctcgaagacaccttgtgaaacacattattacttcaaggaaaaatgccaaggtaattgggtttccaaagagagaggagagataaatggaatgttctgaagaattcagcatctttaagaaaacatggccactgtcaaagataatttgcgtgtgattctgaatcatgttataaaaacaatacgtttgttagactatttcttaatgagttatgcagataagggatgagaagctattaatttttttcgtcttcaaattggtctttgatttatctgccatttcagtctctaagaattcttttactaatatgagtcttgcatgtgtcataaaattttcatttaactttttcacttgtcacttctacatcattagtggaatgaaactcaaagaattcttgtaaattaaaaaaagagataaaaggttatctgtcgaccacttgagagaagctatgctattattaccattggaggtgatgtgg

SEQ ID NO: 585657 - DNA, 4001 bp, Homo sapiens
tccatagggttgttaaaagaattaaagccttcagggagcttaaaagctgcttcttatatttattctttctaaattttctgttttgaatagattctatataactgtaaactactcagtgttctctaaagaactgttgtagacactatattcagggactcactatgagcaccaggcatagtttgctttcataccaaatggttatcttctttgttaaatactttcaaactactgaaagtgagacatatacagaccaaatattccatttacaccaagtgctctgtggggaagggaagggaaattaaagattatctctgttactcatacagcagaggcctaaatatgtatttttgaaattattaagtctaatattatttgaatacagtatgtgaataaactatggctgacccactcctggaaatgaatctgaaacatccctaaaatcaaataaatggacataatattacagaacttttcagattagtagaaaatgtaaccacatagcatgagatctgcacggtactggcataaacactgtaattgtgccacacaatgaacttggtgagaaacagtaagaggttaaagctaatttaaaacttcagaatccatttgttctctgctaagtcaaattgtaaaaataatacagcagttttgaaaagcccttaattaaaaattccgtttctctgcctagctgagtaatgcagatgattgaggagcccaaaactggatgcacagcaattaagtgtcaggttgtctggtggcaaagatttcttctatcgctcagtcacaagttgctgggagactatacctctttctaagatggctggaaacagatcagacagtgcagatgcaaaaaaaaacaaaaaacaaaacaaaaaaaaaaaacggtcgctataggaacattgccgtaaaatccattctctctgttaaggttcttgtttgagttttcctaacatagacatgaacagcaaaatactgctttaagttaaccaatggttaacctttgcagcatacactcgtatttttttttttttcatttttcatttggccgcatggattcttaatgttagcttaattatagacataaagtggtttggcagtagctagcaattcccactactccttccactcgtcctcctaaagaagggttataaactcaggcaaaaaaaaaaaaaaaaaaaaaatgccaggcctcaaaaccaaagactctatcttactttgcctcaagtttgcaagttggtaaaaaagctgccggtaggcactcaaaacaaaacaaaacaatactgggtgactgctggactaaagagtacaaggtgacgagatcaagtatcccgctagccacagactagctctgggatggccagagagtgtgaccccagcacctccgctctctgctttcaggtcctaaactgacaccagtaaaaggacgactgggggtaccgcatgaggaagaaaagacttagggcttggcccgcctgctgccactgaccctcgtgtccccaacacagatgccgctaagagctgcggccagggagctcagatgggtccccaaaagaggcataggaaagcgcgacctcactgccgcggcagccgccacgcgcaccggacctgtagaggccgctcgcgcctacgcctcccggggcaacgacgcgcggcaggccgcggccgccttcaccccagcagccacggcctctgggagaaggaagctcgaaggccgcctgctccccatgcctcccaccccacaacgaatcgcgccggaaaaagcaaagtttgactctcgccgttaggcccgaactttcccgccaccccgtgcagctcccactcggcagtccccgggctccagcttctggcccactcacagagactacttactctggctgctcccgtagcgactgggtctccgcggcggccatcttgaacttcctgactcctcggcggcggtggcggcggctcccggacggtggagggtaggggaagtggaggaagaaggaaaagagctgccgcgcatgtgccgaccgtgtagggaagagctgggttctgagtccgcgctaagaatccggatataaaaccccacgtcccgggactagcgcagggcgtagtgtcgcagcttccgggagcatggtgggcggtgctgctaaggattgaggtcgagtgtcaagcttgagctcttcagtcaatgctagaaatggacgtttagttattgaatcccgctaacgaggggagccaacaagagagggatgtcggcatcgggtgtgcggttccaagaactgattggctgtggagattagaagttaggtgaaaattctcttaaactcgggcaaacgaattgatgatttttcccctggtcggtgttagagacacagtaaatgcttaaccatctcgctagacagctcaactgaagtggcattaacttcccgggaaagtgtgtagaaaggcatttttaaatactgtaaactcgaacgtaaatatcttttaatgtggaactgttactacatttaacactgaacatcttttcaacttttacatagttcaagggtgacacgattcagttcgttatttccgtaattggaacgtgtaatgttttttggcccaagttgcgttatgtgattttgttttcttctataacgactctacagtaatggggtagaatggaatattgtggggaaaacatttactggctcttggagaactctcaaaaccaattaggttctttaattcctctttaaaaaaatatttctcgcctggcgctgtggctcacccctgtaatcccagcaccttgggaggccgaggcgggcggatcacctgaggccaggatttggagaccagcctggccaacatggtgaaaccccgtctctattaaaaatacaaaaaattagctgggcgtggtggcgctcgcctataatcccagctactccggaggctgaggcaggagaatcgcttgaacccgagaggcggagtttgcactgagatcacgccactgcactccagcctgggcgacagagcaagattccatctcaaaaaaaaaaaaaaaattatccatactttggaacctggaagcagcgtgacgatcactttcattcttgtaatcatctgagtttgcctttgtcctagaaaattgagttcggaatctccagactccatacatatctcttgatttccaggggagaagggttttaaatgttcttacaaaatgtctcttgttgcctgaattccaaacgttttgaaatgttagggccgggcgcggtggctcacgcctgcaatcctctagcactttgggaggccgaggcgggcggattgcctgaactcaagagttcgagtccagcctggccaacatagcgaaactccgtctctgctaaaaatacaaaaaattagccggcgtggtggcgcctgtagtctcagctactcgggaggctgaggcaagagaatcgcttgaacccgggaggccgagatcgcgccattgcactccagcctgggcaacaaaagcaaaaacgccgtctcaaataaataaatgaaataaacttagtaaactatttttaaataatgttaaaattaacggtgtacgtagtagaactgtgagagatctcatcttggaaatagagtgatatacttgaaggcaagagattgggtcaggtactattaacacgttttacacatgaacaaaccgacactaagaggtaaggtaatttgcttatgattgagttcccaagtacaaagctgatttttgaactaaaatctgactcgaaaatctgctcttttcttatcaggctgcttcctacaaaaatataacctcgcttagcatctgcttgttaagcatccaccctcacagctctttggcattcaaatgtttgttgagtaggggtaatagagcactacgttcgaatcagaaaatgccttatttttccttgcttgcaagagcctattataaataaatgccttgttttcgctgtgtctctttcttgttgtcgagagctcaggctggtcttaatttctgcaaccatagtatt

SEQ ID NO: 585658 - DNA, 4001 bp, Homo sapiens
gttgttttgggcttcaaacatgtcctgctgctggtgccaatgccctgagttcaagttccctttggacttgccagcctcactgggaagaaaaaaaaaccacccttaggaataactgaacccctaacctcagccaggtagggtcgagtcagacagaaagaagaggtgagggaaagcggctgcctcaaggcaggctgccctttccctgaaaagtcactcgagccccaggttggtgggtgtgttgggaagagcagcccgctggagccagtgcacaggctgttccctccgacacagtggtcgagagtctctctctcaccagcacctcccacagcccatcgcagcattttacttttacatatgccaagaatactttagaaatgctttatcacattgcactatcatgactcgctaagtaaacaccagcaagcatttaatgagtacctgctgcatgccagctaccaggcagggctaggaggtgacttccaaaattacctattctattccagtgctcatttaaaagatgggcaagccaaagcgcagagtgactagtgacctgcccaaggtcacaagaccttgaacaacagaaccaaaacttcaccctagatctcatgacttccccttcctatgctctttccaacatatccagacaaacatcttgggaatggatgctcagggttgaaaggttggaaaacaagggaactaactaggaaatttaaacttctgggactgaatccatctactttgaatgaatgggacaaatagccaaatagtacctcagtgtttgtgatctatgaatgacttccatccctctgtataaagtggacacacattgctgcctggctcttcatcccaaggggctcctatccaaacagcttatataaattgataccttcctaccaccttagccaatgttaggttgaaccctatgaagttgtcattttttatgggtcaaagaggtagaatattagcaatttcatatggttccacctgatacaccctcacatacgcagcaataagttgtgcacccgatggagaggaaaaggcactgggtgcggggagaggggctggtcagaggcctgagcctcagtgtccccaatatattcatagctctgaccccaggactggaagccactcactctttgacttctttggaggaaaagtccaggtagcgattgctgatccactgaatctcaaaccagtcccgaaaaccgttgttgccgcagcatttgaactcgatctgcagcatgtcgatggtcttcttcatgaaacacctgccaggggtgtctgtgtcccggtagtacttcatgccgttcttgagcccttggcccagggtgttctccagcgagccccgaagcagaaagcagcagagagccacaaggaagaggatgatgttgaagagaacacagatagccaggtacggcttcagccagggcttccatctggcatacttggctgggtccagggcgtcgtagcagatcttcccagccagcgagttgaagacacaggatagcacccccatccctatcaatgagttgggcacaaaatggctctcagaattattcatcacatcgctcctctttcggagttcaatcttcaggaacagtcctaggctgaagatgatgatgccagccaacacggagaaccagttcatgagccagagcccttgggccaacttgacccgcttcttctggtcaaacttgactttcagtagcgccatgcttgccaagtgtagtccgggttgcttcccacagcacagctcccaccccaaaccttaacgagcccagaggcggagacttagggccttgggaaaagtgcagatggcccaagctgtagggagctgccctgggggctacccatgtcgagtcccactagcctgggatccccgtgaatgcagtagtggtggcaggggtctcggaatcacagcttgagcaggggatagtcctggtcctgggcgttgtttcttcagcgcccttcccagccaagaaggggcagcctgaacgctgcagattaaaagtgggatccacaagacattttgctaatctctttagccaggttcatcccattagataaagccatgccactctcaaaacatggtcaaaagcagcctccaggtacatgctgaaccagaaagctctgggtacagcttggagaatcaggagcaaagggcaagactggccagaagaatgggctgtatctggatgtctggctcagaccgtgttgctccccaaaagcatatttccaggccaatctccttcaacatttaaaactttctgtaggacaaataaattgttatcctctctgagaaaagaaatgacagggccaggcacagtggatcacgcctataatcccagcactttgggagaccaagttgggtggatcacttgagcccaggagttcaagaccagcctgggctacataggaagaccccatctccacacacacacacacacacacaaaaaaaaaaaaaaaaaaattagctgggtatggtggcatgcacctgtagttctcccagctactctggaggctgaggtggcaagatcacctgagcctggggagttcaaggctgcactgagccatgatcgtgccactgcactccagcctgggtgacagagtgaggccctgtctcaaattttaaaaagacaaagaaaagaagagaagaaggaaggaaagaaagaaagtgacagatcgtgagaaaacatttgcaacttgtaaaattaaaaagtaatatacagtggccaggcatggtggcttatgcctgtaatcccagtactttgggaggccaaggcaggtggatcgcttgagcccaggaggtggaggttgcactgaactgagatccccacattgcactccagcctgggtgacagtgagactctgtctggaaaaaaaaaaaaaagaattaatatgcaaaaatgttttaagtctcacaaattcacaataaacaaaaattcacaatcaaaagaccaataatcaactggaaaaataggcaaaaaccaggaacagacaattcataattaggaaacttgaaaagtccaataatctggaaaagatctcaacttgggtaataagcaggaaaatgcaaatccaaacaacaataaaataccaaacttggccgggcacagtggttcacacctgtaatcccagcagtttggaaggccaaggtgggtggatcacttgaggtcaggcattcaagaccagcctggccaacatggtgaaaccctgtctctactaaaaatacaaaaattgtctgggtatggtgacaggcacctgtaatcccagttacttgtgaggctgaggaaggagcatcaattgaacccgggaagtggaggttgcagtgagccaagattgcgccattgcactccagcctgggtgacaagagtgaaatgacgtctcaaaaaaagaaaaagaccaaactcgatccatcaaattgaatgtatgtcaaaattctgtcaccatacatcaacaaagagagtggaagtagaagtgtacactcttggtgaatctgtacatttattattattattaattaatggattatttcttacagtagttttaggtttacaaaaaaattgaacagaaaatacagggagttcccattattctccatctccccaaccagtttctcctctaattaatatcttgcattaatgtggtacatttgttacaattaatgaaccaatattgatgcactattattaactaaagtctatagtttacattaaggttcagtctttgtgcatataattctgtcacttttgccaaatgcataatgtcatgtattcatcattattgtatcatacagaatacttccactactctaataacctgccatgttctgcctattcattcctccttccctcactcctcagccctgggcaaccaccgtctagatctatagttttgccttatctagaatatcttacagttggaatcatacaacatgtagccttttcagactggcttctttcccttagcaatatatgtgattaatgattctctgtatcttt

SEQ ID NO: 585659 - DNA, 4001 bp, Homo sapiens
gccttatctgattataacattttatttccttctcatccttctagttagatattctcagatacatggaagaaatatgtagaaatcagcctccagttagcgggggaaaggatatggttacgaaacagcggaggagctttactctctattcaaataatacacagaaaaaatgtaatcagccgagcggtttccatggaagcgctcattgaccagggctcaccagcgcctggcgatgcctacccttccgctttggagactggaaattcggttaactgagtttcagggatgtctaataccctcaacatttttctgacttgggagaaaacaaaatcacgaatgtaggaccgggtcccagctctgcaggaggccaccgtcgcggccacccacctgggccatcgcccaccgcactgtccagggtgcccggcgccggctgagggtgacaccacggggcgtgcagatgtagccctggggaaggcccgcctccaggcagagggtctctgggacctagacgaaccctgggggtcggggcaccaagaggcattttctcagttgcttaattccccacgaactgcatggatgctcggcgatgccaagaggaggccagagtgggggcagaggcaggcatctggggtagataccaccggtgtgaacgagaaaggcccgggctgccggctggcgagggcaggaggggggccgtggccgtcgggcgagtctggctgcgccccacgtgggccagcttgcgcactggtgtcccgaaagtgggcgctggcggccagaggagcctgcggtctcccccgagggcccctaggcggagtggcgcgtgcaggaagtgaggtgggatcaggcctggcctgtccccgcaggcccgctgggctcacagcgtgctcaggtgccgccgtgagtccagggcccccgcccggccccgcgcggcagccgcggactccacgccgcgcagccactccgtgcacttgcgtaccaggccctcgtccaccgcctctggctcctcctcgtactccacgtcgtcgtacctgtgccgctcgttgagcagcgacaccttgagcatcggccgcagggccccgggccgcgggctgagctggggaacctgcaggccgccgtgcagcagctgggcgccgggcggaggcgcgcggcggccctggccggcggtggggggtgcgtcggggtcgctggcggggccgcccctccgcgggcccgcggccctagccgggagacacggggcgagtaggcgcctgggttcggccgagggtgaggggaagggcctgcggggccgcgccagcagctgcttctccagatgacgcttctggatgaccaggacggcctcgggggtgagattcaggcagaagcgcgcagcggagtctggacaaggccccgcccccgaggaggtgcccgcggcggtggtccccgtccccgccgaggtcgccgcataggtggtcctcgctgggctgtggccggagcctgccggccggggcggggcgcacgtggctggggcccgcgcgcggctgggcaaggcctggggggagacgcccggaggggccggcggctgcgtcctgtccaggccggggccgcgccgggccggcggcctcttgagcgtggcggagggccaggagctggagaggagcccctcgggccgctgtgggggcctcttcttcttgtcccccgcggcgcagggcctccggggtaactggcgcgcggcttgggcccccggggcgggggcgggcggcggcggcatgggcgggaagggcatagtgcagccgagccgccggatcctcagcccctggaaagagaggcgggcgctcagccactgtgcgcggagcgggtccccgcagtccgggcggcccctccacacccacctgcgtccagccgcggcctctccggcttcctcacatcccagcgaccaaacccggggactcaaagagaggcgctcccaccctcccctcctcctgggggtgctcccgggactggaccctgcaggaaccgcctcccgccgtccgactgtgggcgagtcgcggcgcccccgggtccccacagctgagacgcgggccgggccggcaggaggaggagcccagcgcgctcgctaaggacgcggccctgccaggccccgggctgtgcccggctggtgtcacgaccgactgttgaatgggagcaaagtgccaggacagcggagggcggagcgcgcgccaggcatcccggggctcccccagctggcgctccggtggtccgaggttaatgtagtccgtcgaaagccaggagcattcccctgggggagccggcagccttccggagtcacaggtggaggccctgcacgtttcagagaaaatcccctgtagcctctccgtgccttcgagacggcgggaaaggcaccgccagtagatgcagctctgcggccccggacacatcctgcttcacagagaaaagcgggctggagctgagaggggagaaatgaccctcagtgaatcttacatagtgttcatgccaccccttgaggagtcactttcaaattcaaaacctaagtatctatgaacaggcaaaatagttcagtttcagctatataatgctgattacatggcaaatattagacatcaagtccctttaataattcttatgagcaaagcaatatatttatcactgtagcagagattcagaattaatgagataaatcttcactgtcaatttacattctagtcgtagacacatgaagacatcctacaatattcaaatgtttgtttaataaataattgaacaattgcaaagtgacggatcaaaaagtcaacatttcatgtgtgcagtccctgcattacttaaggataatcatcagctgcttagatctccacaaagtactttccatcagatacacttttctgatggaaaccaggtgtgtgatggttacggccccaggttagctccagagcacattcaactgtgggtaaacacaaatgtgccctgtgccaacagtcacagcaggacagcatggccctcccccagccgcctcagtctccgaggcagcagcaacgcctccccttgttgactgttggtggcctcagagaactgcgctgtggatacatgggagcgtcaaggaaacctggcaggtggtgggaaacacttctcaccagagcttgggttggggtgacaggtttgggccctgtcatctctaccagcacctcccaagccaccccaatacagctctgaaacaagcctcccagctcacaggcactttccctccatccctgccagcctgtctctgccggtgggctcaggctgttaatcggcttgacaggtgaggtcctaagatactgaaacctcctcctcaatatgttttattccaggttttagaatctctggatgggtgtgggaagaggcacgtcagtggcggcaggaggcccacagttctgtgcctggaaagtggagaactggaagagaaggtgaggcaggagaggatgggggtggggcggggggcggtatcaaatatcatttatgggggcacagctggagaggcaggctatggagaaaaatcagcaaacacttggacactcagacatctgagtttggagccccgcagttcaaaagctgtgacggtgctggtggggtcttctctccttcctgtctccttactcttaggatgcttcagaaggaatgacagttttggggtgagaatgggttggtggcctcatagtaatgctcccgacttccactgctgtctccattctgctgggacactggtcgtacagaggcgaggtagctacgcaactgccatcacacagctctaacgggacggaggagataagactccaccccaggagtgcgagtccaaggccagattgcaacttttacactaaagctgagagggaaaaagtcttggtagatcagggtgattggattaagtgacctctcacccacaaactagtagcgatttgggcctttttaagccaagaaaagtgatagtttatcagattaatgcacgtgtctgaccagacaagaactgggattct

SEQ ID NO: 585660 - DNA, 4001 bp, Homo sapiens
ttgtaactattgtagctttatagtaagtctttttttcttcttgtatttagagacaggatctcactatgttgcccagagtggcctcaaaaactcctgggctcaaaggatcctcgcacctcagcctcctgagtaactgggactacaggcgtgtgccaccatgcccagcttacaaatcttgatattcatagtaagccctcccacttcaagattgtcttgatagtcgccttgatattttgcatttccctataataatgtgtatttccacaaaaacattatgggtgttctgacttggaatgcatgaaatctgtttatcaatttgggaagaagtgacatttttacaacattgagtttttaaatcagcaaatatacaacttctctccattcatttagggatggaatccctgatcttttatttttaagtccttcctgggttttatcccctcccttgctgtcttctctacgacctaatacaaggatcagggccccttcctcctcacctgacttagggtcgccaggttttccattggccatggggggagggcccagaaggctgggtggtcctaagagcagacatgaaaatatggtcatcagaatggattaaaggactgatgattctgttcttaggtgtttttcttgtattacttatttcttaattcaaccagtaaagtcaggtatattttcagcagtcttgggagttctcaccccatctatctgcccttttttctgcaaagctgtttcagggtttgcaaaaagtagatattcaatcaaaggggataatgcaggaaaagatactgacaactttttttcttcaccgtaccgtcgctatccaaaacaacctaagtgtctccagacatgaaccaatccctcaccttaactgctggccagaggactagtttagagaaagctgcacctgtaccttttcagtcaaagtctggatacaaactgtcatcccagtcatcgcaatctgcaacatctctactacccctttcccctactgttctgcggctgcgcaaaagagctctttattctctccacccccgccttctccagaaaggtctggggccgtattgaggttgatggttccagtaagagaactcctggttcaaggctccatttgggagagccccacttccatccctccccagcgcgtgcgcccttcctccttccgttacagccccctccttcgcaccttattagcccctagccccttgcccggacgggcttgacaggcatgtgcacatccctcccagacccctcaccgatgggactcccatcctcctcatctccagtctcttcccgctcgggcagcgggggctgctgctgtgtcggtggctggtgatgattctgcttctttcgtttcggcatcgtgtctgcggcaatggctgcagcgggatttggagggtagtgaggaaggggcacgcggggattctgtttccgcttccggggggtcggtgggcagcaatgctgaggctcccgccattccacttccggaaggttgcggagaacatctgcggcggccgcattccggagccaactgcctccctccgtctctgccaggcatggcggcaacctcacaccttccctttgctgcgtttctataaatgctttgaaaaaattactcttttcttccctcgctggaaaacaccacaaccagctcctcagagtgtgtcacagagtcaacaggctctcgggccagagggcctgagaagaggactgtcgcaccgtaagatcgccacatccggtcctcggttactatggtaacagctgcaggcacaacttcgtgccctttgacctccccccaaaagtccttgtcccgcttgggtttcccttctcgcccgcttttgcacttatgatctgtaaacctgctccttatcatcgttcccacaaggaatttgggtcccaacaggtcggcacccaggactctcagaccgccgccctcccctaaagacctctgaccgtgcccccggtgtagtccagcaacctggacgcagtctcggctttccactaaggtcaagcccggggctttgtagtatagcctcagcgtgtccacgccccctctcccctaggtagtaggccccgccctccgctccgccgccccctccaggtgagtggtaggttctcccgggagcgcaaggtagtgatgacacgcgccccccctcctccgaacgcgagttggtagcgtccgtgacggagttagcctggtcctcccacgcgcgcctccttcctcgccgccggggcgccctctcggtgccactggctctcacgtgccagtagcccaccccgcatcatcctctcgcctcgctcctggagggaagtgactatatctcccccgtccgccttccatcgccgccgcggcggtaattctgtcgggcccgcccgctgacgtcacctgctagccccgcctcctctagggtcccgggcccctgcggcgggggctgccccggggggcagtcagttgaggcggcgggagctcggcggagggcgggccaggtgactggtccgggccatgccgaggaagaagccattcagcgtgaagcagaagaagaagcagttgcaggacaaacgggagcggaagagaggtcagtgcgggagcgggaggagggggcggggctcgggcttccgcacatctggaaggaggggtgtgcccgctgcacctctggggatcgtgggagggggtcgtgggaccgcgtcaaccctcgcggcctatcgcggaggggatcccccaccccccctacatctggaaggggtggggaaggatggagagttgggggaggggaatccctccagctagcacggggcgccgtccccactgctccctgaaggagtgactccccccacgcacatccgggagggtcccaaatagggtgtctgggaggactgaacatcggaagaagttgagtgggatgaaagggagtcaggccgatgggggagagggtcttatggcccctgagagctggccagcactggcgtcaccggcccctccccgcagggcttcaagatgggctgcgctccagttccaacagccgcagcgggagccgggagcggcgagaggaacagaccgacacctcggacggggagtctgtgacccatcatatccgcaggcttaaccagcagccttctcaggggctgggtccacgaggctacgacccaaatcggtgagggtgggagggggcgctggtcccggctttcccgcctacccggaagtcagagctttgggggaaagcgggctgctactggtgaagacggtgggcctgggatgccacagttctccgctagccactcggctccccacagcgggccacagtcttcctttccagaggggctggagagagttgggcttttagaaggagaaggctgagtattgcctgaaagaaggacttgggggaagtctgacttgagagaggagacttgaacgactctggagagaatggtttgcgaagttgattgtacaagaggggagaaaataggagtttgtggccacaggattgctctggatgtctcggtccctgttcccttagataccgactgcattttgagagagacagcagggaggaggtagagaggagaaagagagcagcccgggagcaagttctacagccggtcagtgctgagttgttggagctggacatccgggaggtgtatcagcctggctcaggtgagtgagagcaagacaggcattgggctggggaaggagtttggaaaggtaaaagccgactgtgaggaaggaggggtctgggatgtactcttgaatcctgaagatttcctcacacttggactttttcctgaattcccagttctggactttcctcgacgtcctccttggagctatgagatgtccaaggagcaactaatgagccaagaggaacggagcttccaagactatcttgggaagattcatggggcttactcctctgagaaactcagctactttgagcacaatctggaggtgacagtgtactctagggacaggagtggggcatagtgacctatggtcaaattgg

SEQ ID NO: 585661 - DNA, 4001 bp, Homo sapiens
agaaacttaaaaactccattgcattatcattagggactcagatatgaggccctctggtgtcttttcctccagtctatgtaaactgcccactcttctcaagcaaccatgatctacttagctccctcatagctcaaatgccatgttccctcctttcccccagacacctttgtcaaggaaatctaagtaaaaatccagcatcctcctagtataaacactctgccctttgtgcctgtctacaaagagtaattccctacaagtaataatctcttctctctccaccaaaatcgtttcagagacttacaacaggacaaattcaagcaagagaaaactaaaaaagaagcatacaattccatcagagaagaagaaacaacactttagattccctgtttattggacacaagctccctaatcatgcccccagggccctgtaccccaggctcccagcccagcagcctcgtgtccatctgggaaggtttgcaggaaggtatgctgggagtttaaggattttatgagcttgctcagccggaatgggggttggtaccagagaaatcctcatagaacaactagggctgtacatactcccaggctataggaacctcaagtatttgaaatatcccatcttttcctaaacttgctcctgtattggctcctggaaaaaatcgcctccagatgaaatactgttttaccatatgaagaactgagaaaaagcattatggagccaccttagcaccctgtaaccatgggccagaaaacagagggccaaggccagagccatcttcgttttcctatcctcattaaaaatgtccatcaccagtgtttctttactcgatacctccagctccctaagcaagccggacgacaggtctctcagtccattccagagtgaccaggcattcgtttatggacgggaacagtgtaaagagatgagaaatagtggggaagaaagcagggaaatccagacaggcccagaatgaaagctaaaattggggagaaagaactttatgacaagctagagataagatggatgttgcttcgtaggtgtttgaggaggccaatctgtgaagataaatatatgaagggaaaacgaatacaagagtcatgtagcgaatagaccaaaactaacagaaaataatgaatacgaaagcaggtggaaaatatatggaaacaggaatggcaaaaaaaaaaaggatgtagacaacgaagtaagggggcagaggcccaagaagaaaaacggggttgggggagaaaggagacgaggaacaggaaaaatgaaaaagcagacatagggcgactgagcaacatagaaagcaaagatgctgggataaaagcaggattctagagtgggagtggctcgacacgaagaggggcgtccagaggggggaacacagcgctggatgataggagggggtccaatatggaggaaaagcgcccttccgagagaaccgtcgggcgcggcccaccaccacggggcggcagccggggagggggcccacaaatgggggtgaaaagccaggagcgcagcggagggtagggagttacggacccaggcgcaggggtcaccccctgaagccaagacggtgggtggttaggggcagactacggatcctgaatgaactgccggaggtgcgggtcccggagtagaggtaccggagggggaggggcaagcaggcccggcagcaggaggacaaaatggcggcggctaatggcagcttctcctccccccggcccaccaccgccgccgccgccgccaccgccaccgccaccacctctcccgcgccggaaaagggcgtcagcgcacggttcacccagactcacctggccgggtgcgcggggatccgggacccgggcctaggggctccccgggacgggatggcggtggggcgggggaggatggcggcggatggcgccgggttcggctcctcccgtctccctcgctcactccgcggctgagccccgactaacggcccatccgggcaaccgccgcccccgggagcaccccctcccacctcccacctccctccgcgcctagacacgccccttaatttgcataaagggcggggcactttctaccctaaccctctacttccagggctgtctttagtttaaaaaaaaaaaaaaaagggccgggcgcgcggagcatgcggaggttatttgcataaagaggagggacttaagggcactaggaccccgattggctaaggaggcgggcccccagcgtcggccgttgagccgtgttgagggggcgggaatgcggtgcaggtcggctgggcggttgggacgcagaatttacacgacgaatgtgggagaaagaggcggagcgtgcgtcggacgttagtagaaagatgggagcggagagacgttgggacgccaaaagtggaaggcaacgacacacggcccgtggcgccttcagctagggagaaagagagagaggacgggggctggcgggcgggattagctgccggagggctgagtttccgcaggcctggtaagagttccagctctcgcatccctttgccgtgagtttgaggaggtggttggagcggggaaatgcaccagaggggcggggccttccagttattatattacgtcatgcaaatgaggtggctagacagaccaatccaaaggccccgggaagcgtttcgtccgcaccacgcagcgtaggcattcttcgggcagttctacctatttgcataatgtatgcaaatcatttgaacaaagataggctaggaatgactcgttcatcaaaatatgggcaaccatcgactaagacggacatttaattttataacctataattttcatgaataaatttttatatttgaaattattgggaatttgtaatttcttaacaatgggtttcattttgtgaaatgcagtactgttaccctcctttgtctcttactacccgattctagaactctctgctcccatcagagttatacccattcaacagatcattcaatgactatgatttgaaggcgctggagataatgcacaggatattatagaagtagagaaataaggcctggcgcggtggctcacgcctgtaatcccagcactttgggaggcctaggcaggtggatcacgagatcaggagttcaagaccagcctggccaacatgatgaaaccccatttctactaaaaatacaaaaatttgccctacgtggtggcgggcgcctgtaatcccaactactcgggaagctgaggcagagaattccttgaaccagggaggcggaggttgcactccagcctgggtgacagagcaagactacgtctcaaaaaaaaaaaaaaaaaaaaaaaaaaaagaaggatgggcgcggtggctcacgcctgtaatcccagcactttgggaggctcaggcgggcggatcacctgaggtcacgagttcgagaccagcctgaccaacatggagaaaccccgtctctactaaaaatacaattacccaggcgtggtggcgcatgcctatgatcccagctactcgggaggctgagtcgggagaatcgcttgaacctgggaggcggaggttgtggtgagccaagatcgtgccattgcactccagcctgggcaacaagagcgaaactctatctcaaaaaaaaaaaaaaaagaaagaagtagagaaataaaatatgattatgcctggggtgattgagaaatgtttctagaaaaactcttattaagagatatgaggccgggcgtggtggcttatgcctgtagtcctggcactttgggaggctgaggcgggcagatcacaaggtcaagaaatggagaccatcctggccaacatggcaaaaccccgtctctactaaaaatacaaaaattagctggactggtggcgcgtgcctgtagtctcagctacttgggaggctgaggcaggagaatcgcttgaacctgggagacggaggttgcagtgagctgagatcacgccactgcactccagcctagcgacagagtgagactacgtctcaaaaaaaaaaaaaaaagaaaaagaagaaaaaaagggc

SEQ ID NO: 585662 - DNA, 4001 bp, Homo sapiens
ctcccgcaaggtatggtcccactggggctgtcctggcctcaggtcagaccttctttcttccctccagacacctaccaggcctcccctacccccttagtcccaggcttctcccacatccctcttggttcccagcttccattccccccgtcccccgccaggcggtttcctactttcagacctcctctgaacctctaggctccgatccccctcccaggccctgactctgggcaccagtagactcctactcccgtgtctctccctagtccttcctgtctcaggctcccttctttctagggcttgtcccgggaacactacctgttccctgcccttgttcctctatcctaccagcccccagcgtatccccaatttcaagtcctgtatcgcgtccccctctttcccatgtccctgtctgcccggcactcaccgtgcccaccgggtagaccggcacgtaagcagtgcaaggctgcagctgcagggggtatccgggcgctacgtagccccccagcggcagcgtgcccacagtccccgcgtgcgtgggcaccacgaagccaggggcctgggcagtctgggctggcgccggcgggggcggggcggcggcagcgggcggcggcgggggaagtgggccctcgaagcgagtctcctgcaggtaagggtcgggtggcatgcggggcaaggtagcgcagccgggtgggggtgccccggcagcagggccgggaggggcgtggtgggggggcctcggcagcgtggcagaggaggagggaccgcgctgagcggtggccgcggaagaggccaggccccctgcccctaagcgcgggagggtggcggtgccagactgatggtagtggtggtggtggtgatggtgtgaggaaggggctgcctgtggcggtggggctgggggttcggctggaggctgaggggcattgtagggcggcggagaagtgtgagggactgagtctgggagtcctgggggaggtgagtggaggagagtataagaggaaagatgacacagtgatgagttgaggagggggtaaggggaaacacagccggtcagggatggagaaagataatgggagagacacatagagagagacgggtgagaaaccatctctaatttgaggggcaagagaggggctgtatctaggccatctgcccccctccttcttccttccaatctagttttgaggtcacaactctggtctgcttcttttctgtctttttcatcaccatgcacccagctctcacctgcagacctaatcccctctcctttgctatagctgcctttgggctggcctatccgagctagtcctgtgtgtgcgtatgcgtagacatgcaaccctgtgttaatatgtgctcaattcaacagttgtataaacacatgtgggatgacatgtgttccactctgctgttccttcagtggggggaggagtgccccagcctctgtgagaatctcgggacctcttttagggcagattaagaagagccctctggattttgctcccttgacaacccccatctggtcatgtctccatatttcctcacaggatgtctccatgccagccagtgattgtccatctgtcactcccaatgatgccatccctgcaaaacctggctgtacctccttcaccctctcaacctacccccctgaccatgttgttggcaaggggcagaggctgccactggaaagaggaaaggaagagaaagggggagacagaaagaggagggggactgggggagtgttgagagctggagagaaggggaatgaaatagaaccacagctgaggaggggtaagggagggggttggggcaagggggacggagagtctggagacagtggagggggtgggaggttttgttattgtttttacctgacttttcggatgacatgcctgcggtctcgctgggacagggtccctgcagccggagtgggggtcctcggccggtgctggagtctgggtgctggatggcgcagccggcagcagcgcagagatggagagatgaaggcagcggcggggggggggggcggggggggcgggcggagggagagcggggagggggggagcttaaagggaccgaggcgagggagggggagcgcttcagatgtttcccactcggtctctctctgctctcggaccacctctctcctcctcttaccccggcattcaagcccccagtttgggttcctttggagttgtcatggaaacacggaggctagaccaggcgaggcgggtgggactaaggaaaggaaggaaggagaactctctggagtctcccccaccaagactcagtgattgtattgtgggaggaagtgaacaggttctcagtggagttaataacccaggtgcctccagaggcaggtcgtctccccctcttagctccctgcaaggtgccagggtcttctcccaaatccttggccccagtttcctcctctttagaagagataaatacttgtgtgtgagagagaattgtgcagagttcagaactgcgatggtctgaaaagttcccagggtttggtgaacctaccaacctagcagtaaagagggaggcccaggtctgtaaatcagggggagctgggccttggagggaaaagggagagagagtttgggcggtgtgcatacataccttcttcgtccaggactaaggagctgaagctcttttggagggggtagggggtatgacttaactgctcatttctggcagctctgttggtaatgtgtgcttgttcccccactttccctttgcttttgaggctgcttagagtctctgggctggtcaatgttcagatccattccctaaacccccctactcccacccaccacctcccaccaagacgcatctccagctcctgagtcgacctgcagtacagcgttattagtctttttatttgcttattgcatcttgggagcgcgtgggtgggtgaagggagcgaggataggaagtctatggagatttacaccagtttttttttttttttaaacaaaaacacagccagataattattattcttcccttacgtccccccagcccccacctggggcagtcgctctcccggctgcgtcccttttcgtccatgtcctagcagagactacagagcagtacagaggctctcgctgaaaccagtcccaggctccacagagtcagatcacggcttcacaccagtcgttctggtcacttaggcgttcgcgtgagcgctcaaccccttaccgccacctcatcgtcactctacaccattctgagcgcaaaaatgttttgattgagacaaatttagaccaagcaatgaccttgtaaacagagagaggggctcagacatgctgagaaatccttatctctagagaaacgtctttaaatgctaagtaaaagccctagcaagtaaaagccctgaggcactagggtgtcggttaggggtcacaggcggagaggtggggcgcctgggggtttcggtagggagccacccacagataactcagacagccagattctgggggtcgttcaggttgaaagactggtcgaaattacgcgggcatgagtcagcgcatccctacgcgccctccgccccttgagggtgggtcgcttatagggaggggagtagagtagggcaggagaaactgggccaggctgcacttagctcaaggggcctcgaggactctctgcgtctctggagacaagggcactacacgcacttcagaatgaagagttgtaagtcgctgacctggggcggactggagggtggggtggggtgggtgttgaggggcacgcccgggctggcatcagccctccaggccaccctgccactcacccagcacacggcaaaatgcagaggactacctttccctggtccgccccctggccgccccttggggaatgcaaacttcgtgttctgctgcggagccagacgcctgtattgggaagtggggagaatcaaggcggggaaatcggacttttgggtcgctgggggcaacgaagcctggagaggccttctttccattcccagaatatgtttgctg

SEQ ID NO: 585663 - DNA, 4001 bp, Homo sapiens
ctccatggcgactgtaaaagctttgactttactctgaagtcaaatacagtcaaaattgctttacttctgaagcaatacagaagatgtctgagggacttaagccagggaggatcatgtcctggtttatgctctaacagaattactctgatttccacctggaagtcaagggcagagcaggaaaaatggtgagaatgctgtggccgtaatccaggtaaggaatgctggtggtctgcacagtgatacagtggcttacttcagacagagacgcagaaatagaaagaacacaggataagagaaagacagatagggagagtcagagacccagaaatggaaagagaaaaaacaagaccctatgaaacacagaagaaaacagagggaaccagagactcagaggttgacttcagacagtggaggagagagacacagatgcagagatgccaaagcacagacattcctgtcctttgaccataaacactttcccttcctccactcacgcaaggcggctggacaagaagcggagctgggccatttccaggcctccagcaggtatactcaggccataaaatctgtgttccaggcttatcaccagggcgccccaggctggggccaaggctgcgggatggcctgtgaagagtgtatgggtggggggtggggaggtgagatgcaagttgagtttaagccctttcactcctcaggtctcacagcattgcaatatgcagctccccttcctggtccccaccagcatcccaactcctttcccccaacattgcctcttacctctcatcactgagccaggcccaaggctgccctcaccccctagatgcaggaatatgggtccatcctggccaacccaatgttggtcattcacccagtaacgctgagaggtgggatggggaagaagaaatggcactgtgagagtcctgacttattctcaattcctcatttgttccagtctctcttcctaatggatctttccttatgtacttaacagtgtctgaaatgagcttgtttatttacttgctcacttttcccctgttcatctcctcatctagaatgcaaaatatacaaaagcaaatttttgacctggtttttcactcttatatccccagaactgagggagtggctctcacattgaaggaacttgctatttcttgaagtaataattgtaaaataagaaataaatgcagatggatttaggaataagatccaagtgggatgatatttggagactaaatacagaggaagcactgaaaaatggcgaatttgttccttctttcgatagatatctttgagtgcctgttgtgagctaggtctgattccaaagctggttcaaatttctgctacctactgagacctggtggtaggttttgtgtccagtctggacagggacaagggggtagggaggagcagtgaatgtgaatgacagagagaaagaaatggtgaagggcaagatctgagggacaaaacgagtgggaccccgaggagaggagagagtaaggccaaatctacaaagggcaggaaaagggatactgacagcaagcataacatgagattcaagcagagggatggggagaactgaggtgtggagagagaaaaaagtgcagactgaggaagagatgagggagactgaggagagggcaggatggttagtggactccccgtctcccggcctcacctgtaggaaggatcgtctgtcggacacgttgaaggggtccagcagttgctccagccaccccacttttgggagggctgcagcacctggccccaggctcaggcccaggccctgggcagagctctcctgaaactgctgaatgtgctcacccaggcgcctaagaagggaggctgtgggacatggagggaaggaagtcaggctggcccccttaggatgccctgcttgaccctcagcctcctcttacctggagccaagagtccccagagggaaaccaagagcagagggcccagccactgggcaagccagacggccatggtgttcgggactctgttctcccccaggaggacctttatcttatcctcagcagccgggccttaaatccatcacctttcagcagaggctcaggtttctttcctttcctggcaggtcaagcgtctgtaggaactgctaaagcggggcagggacgccagagtctgtacacagaggctgctgatgcagcatcggaactcccagtttcttctctctgggcctctcagtctgttcttccctcagctctcagtagccctcgctgtctcagtctcctcctctccgctcttcggtctaccttctctttatctcagattcctcctttgcatgccttattgtccttcaacctctgtctctccccacctcagcacctcctctggaaccccagttgcccacttattctcagtcttttctttctgcccctcagcatatcttcagtacccctcagttgttcccacactcagtctttccgtctcttttttctcagtcccccatctctttttcagtctttctctccatactcatctctttgtcccccaatctcaccttgtctattttccagccccctcactttctgctctgcttcactgtcccgagcttctctgacccacaatctcacactgtccatagactccttacagttctttgaacataccaggcttgcttctgccttagggttcttattcttgttgttcccaccctatggattgtgatttccctatatacccacgtggtttgctccctcacttcaactggatctttattcaaaggtcattcattcagaaaggtcttccatggtcagctttttaaaaattgccaaacctatggccctcttctattccttttcaaactttattcctaattctttttcatgggacttatcactatgagaaatattgtacatttaaaaagttattcccataaatttaaaaaatatatccagaatctgatgacttctcactaccttcagtgctaccactgctgagccaccatcatctctgacttgggatatcatggaaggcttttagctggtcaccctgtttctgcctcatgatttattctacactcagcagacagagagacagaattaaatattagcccaatcattcacaatcattcactccctggtttagaacacttccctgatgccccatcttactcaaagtaaatctaaagttttgaaaacagtttttaaaactctgtatgacctggccccctgttgtatatactgtcatgatttcatctcctacccctcctgggttcactgctccaactgcattggactatttcatatttcacaagactcactccttccttagaatttttgctctccttaggatgcttttcctccaaatatctgcaagtcttattttatcacttcctatagttccccattcatatattttatcttaccaaatgggttttacctgaccacccttataaatggcacaacacctgagaccctgtcccctgatccttctgttgtcactccctgatagtgatgacattttattgcacttctctcccaaaccattccccaggaagtaagcttattctgggaagcaattttgtctgttttgttcactggtgtacccataacacccaaactacttcaaggcacttgaaaggttctcaatgaatatgcagtgagcaaaaggctatatggataaattgattaattaatgaattagttttctgctcaggaaagaattccctaagaatgtgacctaagagttgaggcaagggagtgagtggggagggaggaaggcagggaaaaaaatacttgaggtaagaatgaggagccagggggagcatgaggttatctggagtcagagggtttctggcccaagaaagagcaggtgcaaagactctgagtcacaaacctgcttggcaccaccaaggaacatcaacagttagtgggctggaaagtcaatgaaggaatttgaattagatgagaagagagaagtaatcagagattcaaccctgctggcaagccatagaaagggctttggcttttatttaa

SEQ ID NO: 585664 - DNA, 4001 bp, Homo sapiens
ttggcagtacttgagggaaaggaagatggtaaagttacacagttgattattttacagtaacccacaacttctgtttctcatcacaataaaaaacaaaacctccctttgtttgggggctatttttccatgacctgtacatctcaatttgtgcaatcctatggataaatcaaattttgggtgaatgacattaaaggaaccccaagaggactctttcatatgctgccttatgaagtgcacagcatatagctctagacttatctgtatttttcaagttggcctttgagagcaaagaatatctataaataggtatgctacttttcaggttttaaagcatctatggtcacaatgtttttagctaacccacatcagttttacctatacgaagcttaacgttttttagttataaaataatagcttgcatactactaacttaactttactgtttcctaacctctccatctcagatttctcatctgcaaagttacctcagtgctaaggtaaagtagctctatcctcccaaattctgagtctgatcctactgttaaaatgcaatatgcttgtttgatatttgagcattgggcagaggaaaatcatttacccaatggagaaaattaactcacactagcaattgcttattttaacatctaatgaacacatactgtatgccaagtatatgctaaacagtctcacattttaaaacgtgaaaaagcttcttaaaagcatgcagttttcccagctatctggaagaaaaatggggtacagtatccacatctaccacttccctcactaaaggaactcctctaatatttcctaataaaaataaaattccatatgatacttggcctctaccttcaagcctacatgtcttatttggcagggattttaacattctctcttctaaattataaaccagattctaagtataattctccagccagcaaaatatgacttttataatcctctgtggagacaaatgtacttcggataaaataagaatgaatttcagaagtcagaagggttaataaggggtgaaagccccctagacacagcaagcagcttcttttcaaatcaaggacagtgtaaaaatgtcagagcaatcaagcgggagtgtttctacaactttttaaaaaaccttttattatagaaaatttcaagactacacaaaagcacagagaaaagtattaagttgagagaaaagtacaacccccatgtgcacatcaccagcttcaactattgtcaatattttgccaatgtttcatccaccatcaccaccccacacacttttttttttcagctagagtatttcaaagcaagtcaaaagcttttctacttcatttcgccgcctcattttctaaacgttttcctatgctccttttgctgacctccgcagccaagttgataaaagggtagaggggagaggctagctttcatagtaaccccgccaaagagacttttcaggaatgcgtttcatacctttctcaatggcatctgttaacaatcataaaaataaagagggtcccctctggtactgcttaagcagaaagaattccatttatattccaatgcaaacattgttgtcgttaatattaaactgtgcagaggccggcacacagaattgcctatgggaagggtggttagtttctttgaggactgaaagaaagtgtcaagtttgatccctttcttcaaagtccttcaaagaagctctcctcgggtaggtcctgcctttctcagggaaatttctaagttctaaggttgttgggtttggggagcttcatctttacctgccaggcttgtttggtccccgagggcactgtcagctgagatcagagctcccgaggaggcgggcggggacgctgcagctgggagcctctcagccagcctgagccggaggccgccccgccaaggccgggccacagcacccagagctcgccactgagactgcggagggggagagagctgcgccgcaccacggccgggagatgggaggggaaagggggcgatgacgaggggcgggcgcggtgggatggagtggggggaggggaggaggaggaggtgggcaagaggagacggagagggagggcggagaggggagttccctggaggaacggggcggacctggccgtgtctcaccccagcatttctgcccccaagctgaattaagcattaggaaaaattcatgagtaggttcacaggggatgcctgtccctgtaatagtatgcactcctttaacagtctcaggagttgttcagttaagagtctcattcctcactgcttgctgttgagaccccaggcatctagaagaacggagggcgtctccccaaccttatcccaagctagtctccaccggggacctagcttctctggatgcacaagcctcagggttaccccgacttgtaccaggcgcccaggctgcacacgaggatggggacctcaggctgggacgcctggacccccgggagcatcctgcgctgcctccagggggagcgcgtcagtttccgtctgcagggaaaaggctggttttcctctttgggcgagtaacctttaaggtcctttcccatctcagtcccaccagcattctaacctcatccgttctctcgaccttttattctcctttaggagaggggtgggggccacatgagaaaggaagcttcatttgtttaacaacaaattctagtgggtgacaggtctggggcaagatgaactgatacaacgagagaatacataaacaaaaacaaaaacaaaaacaaaaaaactcggtcctggccctaaagcagggagatcgagtaagtgcacaagtacttacaacacaaggtcttagcatgtcttgtaacacttggttcgttagtaggttattgcgtatctcaagttctgtgtacttttaatgagattataacatacttagcattgtccctcgttatactcaacggactagttccaggccctcttcccctccgcccccccatactaaaatcatcccatattcaagtccaagtccagctgtgggccctggggaacccgcgtataggaaaagtctgccctctgtttaagcatttctgcctgaaaatactgttttctatccgcttttgggtgaaaaaaaaaatctgtgtataagtggacctgtgcagttcaaatatgtgtccaagggccaactatatatacaatttcattgctgttttctcatttagcattgttaacataagcatttacccatatattaaaatctattggtaatttttaccagttagaattagttctgaagctctctgtcaccaattagatcataatagtcatatgcatctttgaatcaccaccatctaccacagggcctggcatatagtagctgctgcattagacgtggaactaaaaagtttgctagtcagatggagtgtggagaagtcacagagaaagtccagaactcagaatgggaattccgcctgacactaaatagctgtgtgccctgggcctccgctttttcatctgtaaattgagatggttgagctggaggagttccaaggcctgcagctctcaaacatttttgggattctaacactgtataaatccagaaggattcactgtggacccaggtctgcttccttcactttattcagcattctccactagcatcacagaaagcaaacttccagggctctttcattttcatgccccccttcttgagcctttgaccccaagcccttttgtaccctatttctggatctattccaggttgtcttatcattaatttgactgttttcaaaatttatcgctttacttcatctggtcctgatgcttcgtatttactatttctctagttctaggtttctggcttcttatttttaaaaaattttaattcattaaatttttagagacagggtttttaaattatcactctgtcacccaggctggagtgcagtggcaggatcatagctgactgcagcttcaaattctgggctcaagcaatcctcccacctccacctcccaggtacacaggcacatgccatctc

SEQ ID NO: 585665 - DNA, 4001 bp, Homo sapiens
tgagacatgaaagagtgctgagcgataaacaaggcggctaatgacttaactacatttaaagacagagtaggaaaagagaatgaggcctcattttgcggaagcgaaggctgcctgagagccagctgcagtaaacactaaagaaaaagaacaatgactgagaaaaagtaatcagaaagatctaagtaatttttagggcagtaatggcttaaactggattacaagggattaaaaagtgagtaacgagtagggcatactgaacactgaaaattcttatttatagagaatagccttacgaaacgggtccaataaccctccctacaatatacaacttaattagtcatcacaggaagtgttaaggtgtataatggaaaagcatccataaactcagtggtgaaatagctatgaattaagtcctggctcaacttcacaccagctctctgaccctgacagtttaacgtctaatataaccctaggatgctaatatcatctaacattcacttttcatgaggattaaataagatgacagcttgcaatttacaaaatgcatctctcttgattctcaccaaaaactatgaagctactaaggaagataaggaaatttaggttcaagaagttcagaagtacccaaagtgtcctttagtggcagaaccaaggctaaaatcagactttcgttatctttctaacacactcccaaaatgtgcatttatatttcaaatttatgaggaaccaattaacatttttgctttgtttttaaaatttatttttgtagagatggggtcttgctatgctgcgcaggctggtcttcaactcctggcctcaagcgatgatcctcctgccttggcttcccaaagtcctgggattacaggtgcgagccacactgcccagccaatattttctgttttaagaaccatcggttcgttcaaattgcgtgtgtatattttaatgtacaaggcttgattggtaactataaccactgtttcaatttacagctcttccctgtcaagagtcttaaacagagcatctttctataaccctaaatctctggcgtgccaccacggaaaattatactactcaagataaagctggtaattaaaataaaaaccaaaacttgaacataacatacaagaacacacatactaaaaggtccatcttctgagtattttgttttcctgaacttaagctaaacgttaaaaaaaaaaagcacttatctatgaaactaagtttgctcagccaatcccaccttctatttgaaataaaacaaaatgattaaactgctacaattagaaataacagaaatcaggcggctacaattagacatctcggctaccaacccagctatgcatctaacaacacagaccaaacaaccctaacttttaagtttcagacgctaaccctctaccctcgccggctggcataagaaacgtgtacatgaggtccagttttaatggtcttccacagagcagaggctatgtttcaatttctactttactgtcttacagcagcaaggagcacggagtggcggtccacataaaaactcaaatgacatgactgtaatgggaaaccctaaaaaccaaggctgtatcgcaatcaccaagtaaacttgagcaaagcgagcctgaagagggaaacacagggcatgagaggacggcagggagaccggccttgtgcggaccccctcagctcagggttctgaggcctgcaggagcccggggcagcgccatcacggcggtgactcctaaataggcttcagcagatgggggaagggcgaaagtgaaagccgcagctctctggggtttttaccctccgttgaaaacgtagggcgaaaatcgcagctgcaaagggcccgcggctctgtgcggttccatccccaagtctctgccaggagccgaatacatggctgtagaggacaacatcgcacggctgcgcctgcggatccgacacttgctgtctcacggcgagatggctgccttgaccggacgttacgccacttccggcttctcctgaagttcgctcccggcctctctatctcacgctagtcgttgctcctggagggctgcacggcggcttgtccctttggtagttgaatcccgcccattccaaaaagcgctgacagggatgtaaagggttttttttgtttgttttttgtttttttccccctcgaagaaaacattggaattcaccccaatggacaaaaatttaagtctgaccatacaaaaaaattgtcagaactatggcgcaacggcaactcgaataacggtgggaacgttaattgtcctggctaataaaaaatgtatataacatttcctatccttaaagagctcacaacctcactgataataaaaagtacaaagaaaacaagcagtataacatatgattacgccacaatgaactacagaagggaaaatcaaggcgtgctgaagtcccactaagaaacaactgcggaaagagccatgtgacaacagtgcatgaactgggagtggcagaactgaatataaatgcatgtgtaaacacaagctgtttgttttgcttagtgttccttgtcattctacacgcttgaagatcagctagcgttcttgctgacaggtaaggaggacgcgcttactgagtgccaagcactgctcaggcactgattctgtcaatctctgtcaatctcccgacagcccaagggtaagcactgttatcattattcaattttacagaaaaaaaatgcgggggagaggtcaggtaacttgtcgaaggtaacgccgctagttgctttaaacaacaacaacaacaacaacaaaacacactcacacatatacacacacacgccatttaaaaatcgatctttcctacgtccagcaagggccaattagagatggctgtggcacggcggccccgccccggaactcctcaagagcttcgcccctccttacctatggaaacacaggaagtgacctatgctcacacttctcatggcctcggccctagtgggagcaactcgctgaagccgagggcagaactggcggaagtgacattatcaacgcgcgccaggggttcagtgaggtcgggcaggttcgctgtggcgggcgcctgggccgccggctgtttaacttcgcttccgctggcccatagtgatctttgcagtgacccaggtaacagattgtactcttttctgacggttcgggcgaaggccaccactgcactgaggcctgggggcaatggtggggaagagactaggaattggcgcgcgtgcaggcccctcgggggacgttcctccctttcgtgctgccgccgttccggcctgtaacggccactcggccgccactcccgcctggtgccctactctgctgtgtttcgcaggcagcttcccatcgtacgattgtggggctcagggtactactggctggctgggcggcggcaggcgggacaggacagtcccttgcatcgaagaccctaagtttaccctgccctgtcctgccatccgcttcttctccatgttagaagcagattcacccagatctgtgcccgcctgttttgctgccaacattgagacttaaatattttgtcagaagcctgagacagcgggcacggtagcgcttaagatataatacacaccactttatttgcagggtctcccgtctctcggttcaggccatcatggttttccaaatctctaggtagacttttctgtgaaaagactgtgcttcatttagttatacagacactagaaggctatgcagaattaatttgattgcctccaaaaaatatcggatttgatgtttcaatttccaggagatgaagatacccagcaaacaactcttttctgaggataaattagtgcagtaatcactgtgcggtttcttctgtagacttacttgcaaaaagtggcctgaagccaccgaaggtcctggataaatctctaatcatacttataatggctttaaatcctgccgtcattatctcttgcctcaaccttagattcctgaaacgaaacttccgtcctccagttttactcctct

SEQ ID NO: 585666 - DNA, 4001 bp, Homo sapiens
actcactaatgtaggacccagctgaggcccgagaatccactgctgcaatcactccatgctggaacttgaaggcgagcgtggtggtgccatgggccatctcaatctgaacgttcctttctccgtccccacccagggactggaagaattctgtgggctgataagagaaaagaggttgagaaaggcaatgaaaaattctgtagtaagaggctccaggaaaaggttttagggagtatgagggtgaggagatatgcagaaatgatctaaccatcaataaatgaaacagttaataaccaatctctagaaggaaatggcttgggagaaggaaaagaagaggcatgccagtatcaaccttttccattttccagcacaacagaaatgaaagcaagcacatgttaccattactaaaaaattttgagagtgacttaaagggtttcttccatgcataaagcattcaaccctcacaaaacacgtttagtaacagtatcctcactttacagaagaggggcttgggacctagactaagtgacttgttctaagtcgcgcaacagtgagttgctgagaggaggccagcaggcaaatttcataggtttcccaagacaccacacacctcctatatcatgtgataaccccatgaaaaaggctccaccatttgtgtgtggacaagggcaggaaagttctcttgtcttcctttgggagcccccacctcacctgtaactctttgtcctaacttgcacttcctcctctcaggccccatccccatgtggcctcttctttgggtctggcgctctccgggactgaaggctacccccgaccctgtaccccgcgctcccgctctcgcctcctcctctcaggcgaccctccactcctcagcgcccgcctccctgcatccctaggggcttccctactgccccgacctgcattccccggggtaaagcgagctctggagatcgcatagagaaactgtagtgtcctgggtccgagcgacgcccgcttcccgcaaccgggagagccgattccggccgctgccctcggggggctccgcatacatctagtagcgccatgaccgcccagcacccagagatctgtccgctctcggaggaggaagtgaaagcgaaagccacagatcgaaggggagggaacaagactcttttccacatccccctgccttttccgagaaaaggacagttagtgcctggaccaggaccatcacactggggaccggcttctctgctctcccgttatgggggtcgggggaatgatgggtcaagggtcttccgaagaaagcgagaaaggaacaggcgccttcaaaagcccacttggcgatgggttacagtaagaggtacctccaggcccgggcatccgctggaaacaggggtgggtagggtcgtgtcatctaaaggcgcagcttcaaccagaagactagaagtcagccaggagctgggagtagtgtcacgcggggtgggggttcctatgagcatcactttacaaaaccaggagggacggaagtgcgagggggcagagtcttggaaacaggtcctgggccaactgcaacagaatatacccgccgcgtgtaggggaaggcggcgccagggagagggcgcagtctctgaatctttccacggggtccatcctagggcccctccaggttcaacggtctcctaacctgtagtcacccacaagagcgtgccctttctgcccgcccttcctagcgttgctccctgcttggctgagcactgcggagtttcacgcctctaaaccccgcctcttcttgcaacctgtgttggcctcatctacccagcaactgtcgacgtcacacgacctgggcctccctgaatgggagatatttactaggcaatcccgcctactgttctgaggtttcccctccaggtgcagcttcagagccaggcgagccaggaaggaccagcgggcgaggtggtgagttgtgaggcgcgcccagtccctctgttcccgcctggcacttgctctggccgcgcccgccccatctgccacttcggagaggccacggctctgagctgcggccgctagtgccctgatgggccctgtggctggggtcttgcacattcttgggggtgggcctaaggggataggggaagtggaaggggcctcataggaattaaaaagcttaagggaaaaggtgatgcagttagggggtaaaacattgaggatgataaaagaggagacatccgcagctgaaaagtgcgctgcaaaaggcagtgggccgtttggtgtgccggaaacataagaaaccacagtacaaaacaccaattttattataaatatcaagaacctacagggtgtttatgggccagcatatgccttcagttatgttgaaaatagctgatcatctttccgtacattctgaacatttctcagtttcagagtgctggccacaccaaagcatcagccctggctctaaactccgttacagtaaggaattacaaatcctgtgtttgtactccaggaagtctgcattatcacgaggagcttggaaaggaggtaacacactcaaggcaaatttcaagtaactcatcctggaggcagctgcctactctgcagctgtggttctccaccacagagagaagaaaagggagggagatggagtgcgcaggtctgagaaggctttcattctggagcatctgcaggagcctgcaccatggcccagtagcacccctttttctccatgagctgctggtgggttcccccctcccggatagcgcctccttccagaaagaggatgtggtcagcctgctccaccaggctgaggtgctgggtgatgagaagcactgagcgggagtaccgctcagggctttcgtacaggagctgctccacctgaggaaagacatcggaccgtcagagccggggactaccctcagcccagggagacacctgtgtttccagggctgggactgacctcacaggatcactgctggctctgctaacaaccccaaggacaccaacgtttcccattctgagtacttctccgcaaaccctttgtttcattaaggactgttttacatgaagggtgcaaaagtaggataaaaatgagaaccctagggtgaaacacgtgacagaagaataaagactattgaatagtcctcttctctacccatggacttggcatttttatattcgattttaaggaaatataacttagtagtaaagagatgagcattcaagtcaggcagacctgaatttgggtcaaggctgcgccactcaaaagctatatgacctctatatgagcagcttattcaacctcttttaacctccattttgtcatctgtagaatgatgataaatgcctagctcagaaggattcctaatgaataaatgagtgacagtgcatgtaaacagactagcttaattaatattaatatgattaggatgggctgggcccggtggctcatgcctataatcctagcactttgggaggtcaaggagggaggatcacttgggcccaggagttcaaggccagcctgggcaacatagcgggacgctgtctgtacaaaaaataatttttttaaataaacgatattatgaggatggtcttttccttatgtttcgctttagaaattcagtctataggactgggcgcagtggctcacacctataaccccagccctttgggaggctgaggggggcagattacctgagctcaggaattcaaggccagcctgggcaacatggtgaaacccatctctactaaaaatataaaagtcaaccaggcatagtggtgtacacctgtagtcccagctactcgggaggctgaggggagaatcgcttgagcccagcaggttgaagctgcagtgagccaagattgtgccactgcgctccagcctgggcaactgagtgagacactgtcttaaaaaaaaaaaaggaaagaaagaaagaaattcagtctgtagtttgtagatagtctcttttaactgattctaggtgtctttgcctcgtcttctatctctactccttggggaggcatccaat

SEQ ID NO: 585667 - DNA, 4001 bp, Homo sapiens
cttgtcagggagggagtaggagtatatgatgggaaacagatctgtcatccatagggaacatggtgggggaacatgaagaatggagagcacccaccttcttatcccagccacagatcatactgcccatagagaggcccatgccccggtactggcacatcatgttggacagcagcttggaggctgccgacactgaaatacgttctccatttcgcagatagtacagcctgggtgaggacaaggtggagtgaggaaagagaggttagctctttccaacttgatggggcaggaaatgattaaagagataagcattggaaaggaattattttgtaggatctaaagatcagagaaagatttggaatttaaagtatctgaaacatacaaaggcagcctagtaaatgatactgtcccgccagggtggatgtgtcagtgctaaatacctgacgtactatctggcttatgagtggagcacaggctgagatttgggagaagggtcttatcaccaaaaagctgttttgtgaaatatactattagcactaagatggaccacataggacaagagtaaggagcaatgatctgagagatccagggattaaccactaggctaagaaaggaagatgagaggcctcgcttacctgcattccttggccagcaggcgctcccagtactgacagtctgctgcacagccagacatggtgccaagcaggtaagggttaatctcaatcaccttgttcacccgtaaggcacctggaagaagatggagctttgggagagaagggatgaccccatagatcccccagtgtgtcctaaatcaatatccacttccactttgttgcagagttggcctcctgtggaaaggagagcccagctccccagattctgcctgctggagcgtatacactcactaatgtaggacccagctgaggcccgagaatccactgctgcaatcactccatgctggaacttgaaggcgagcgtggtggtgccatgggccatctcaatctgaacgttcctttctccgtccccacccagggactggaagaattctgtgggctgataagagaaaagaggttgagaaaggcaatgaaaaattctgtagtaagaggctccaggaaaaggttttagggagtatgagggtgaggagatatgcagaaatgatctaaccatcaataaatgaaacagttaataaccaatctctagaaggaaatggcttgggagaaggaaaagaagaggcatgccagtatcaaccttttccattttccagcacaacagaaatgaaagcaagcacatgttaccattactaaaaaattttgagagtgacttaaagggtttcttccatgcataaagcattcaaccctcacaaaacacgtttagtaacagtatcctcactttacagaagaggggcttgggacctagactaagtgacttgttctaagtcgcgcaacagtgagttgctgagaggaggccagcaggcaaatttcataggtttcccaagacaccacacacctcctatatcatgtgataaccccatgaaaaaggctccaccatttgtgtgtggacaagggcaggaaagttctcttgtcttcctttgggagcccccacctcacctgtaactctttgtcctaacttgcacttcctcctctcaggccccatccccatgtggcctcttctttgggtctggcgctctccgggactgaaggctacccccgaccctgtaccccgcgctcccgctctcgcctcctcctctcaggcgaccctccactcctcagcgcccgcctccctgcatccctaggggcttccctactgccccgacctgcattccccggggtaaagcgagctctggagatcgcatagagaaactgtagtgtcctgggtccgagcgacgcccgcttcccgcaaccgggagagccgattccggccgctgccctcggggggctccgcatacatctagtagcgccatgaccgcccagcacccagagatctgtccgctctcggaggaggaagtgaaagcgaaagccacagatcgaaggggagggaacaagactcttttccacatccccctgccttttccgagaaaaggacagttagtgcctggaccaggaccatcacactggggaccggcttctctgctctcccgttatgggggtcgggggaatgatgggtcaagggtcttccgaagaaagcgagaaaggaacaggcgccttcaaaagcccacttggcgatgggttacagtaagaggtacctccaggcccgggcatccgctggaaacaggggtgggtagggtcgtgtcatctaaaggcgcagcttcaaccagaagactagaagtcagccaggagctgggagtagtgtcacgcggggtgggggttcctatgagcatcactttacaaaaccaggagggacggaagtgcgagggggcagagtcttggaaacaggtcctgggccaactgcaacagaatatacccgccgcgtgtaggggaaggcggcgccagggagagggcgcagtctctgaatctttccacggggtccatcctagggcccctccaggttcaacggtctcctaacctgtagtcacccacaagagcgtgccctttctgcccgcccttcctagcgttgctccctgcttggctgagcactgcggagtttcacgcctctaaaccccgcctcttcttgcaacctgtgttggcctcatctacccagcaactgtcgacgtcacacgacctgggcctccctgaatgggagatatttactaggcaatcccgcctactgttctgaggtttcccctccaggtgcagcttcagagccaggcgagccaggaaggaccagcgggcgaggtggtgagttgtgaggcgcgcccagtccctctgttcccgcctggcacttgctctggccgcgcccgccccatctgccacttcggagaggccacggctctgagctgcggccgctagtgccctgatgggccctgtggctggggtcttgcacattcttgggggtgggcctaaggggataggggaagtggaaggggcctcataggaattaaaaagcttaagggaaaaggtgatgcagttagggggtaaaacattgaggatgataaaagaggagacatccgcagctgaaaagtgcgctgcaaaaggcagtgggccgtttggtgtgccggaaacataagaaaccacagtacaaaacaccaattttattataaatatcaagaacctacagggtgtttatgggccagcatatgccttcagttatgttgaaaatagctgatcatctttccgtacattctgaacatttctcagtttcagagtgctggccacaccaaagcatcagccctggctctaaactccgttacagtaaggaattacaaatcctgtgtttgtactccaggaagtctgcattatcacgaggagcttggaaaggaggtaacacactcaaggcaaatttcaagtaactcatcctggaggcagctgcctactctgcagctgtggttctccaccacagagagaagaaaagggagggagatggagtgcgcaggtctgagaaggctttcattctggagcatctgcaggagcctgcaccatggcccagtagcacccctttttctccatgagctgctggtgggttcccccctcccggatagcgcctccttccagaaagaggatgtggtcagcctgctccaccaggctgaggtgctgggtgatgagaagcactgagcgggagtaccgctcagggctttcgtacaggagctgctccacctgaggaaagacatcggaccgtcagagccggggactaccctcagcccagggagacacctgtgtttccagggctgggactgacctcacaggatcactgctggctctgctaacaaccccaaggacaccaacgtttcccattctgagtacttctccgcaaaccctttgtttcattaaggactgttttacatgaagggtgcaaaagtaggataaaaatgagaaccctagggtgaaacacgtgacagaagaataaagact

SEQ ID NO: 585668 - DNA, 4001 bp, Homo sapiens
aaactccactgccatgatggtggtctgcagagacacagaatatggaatgtcagggcaagaacagccttgatgccctcatgttagagaagaagaaacattcccagagaggcgaagtgactggctcaaagattacacagtaacaggccagagctgactgtcagtacaggctttttttcccttcatctttccactttctctattgcttcatccggctgcaggggaatgccacagcccagctgtgatacaacacagaaagaactgtgtccctaagttccaacttgcctagtggaatcctctccactgtagagaggtggagatgaggctcctacaggtagaagtgaagcagctccgcaagtgaaaattatctccaacggaagggctcatagtatgtgcagatgtggtgtagacccaacacagagtaattgactatgatcttgggaaacaaggtcagtctatttttttttttttggtccacaatcctccactctcaccccccatttcatcagaagtgagctcttccaatttactgaacattggaaaaaatcgaggagggcagtggttagcatggccaggggcaaggcaggagagaagcagcaaggaacacatacagatggttgaaaataaaagtttcagttatggaatttccgatcaagaggtaaatacatatctcagcagccagggaggtaaatttgtaccaagagataatttgactgagaagtttaagctgacttttccaggtcaagaaaagaatcaagaagaagtgagggaagataaagctacatttattctactattgagttggaaggagccttaaagatcctcggttcaaatgaggaaaccaagtcacagaaaatgcaaacgacttatgcaaagtcacacagagttaatagtagacctgggactaaaattcaggtctaactcttatcccttgtttccacttctacttcctacttgccactgctcatttggcagtgaggggagatttcccaaattataagtggtttcactgtgtctttcttaccaggccgtaagttactctggccccaaaggacgctcctctgagtatgctttccgacggaccgacttatcatgaatagagggtcaaagaacagggttaacttcaagttagaggctattcctctctaacaaagccgcccccaagccacgagtggtggcagtagtccagagcagaagccagccagccagtcttggggctgccatctgccccaggcgcccatcctaagcaaagtccccccagtgggcacatgggagtgggcagggaagacacagggaagggagtaaggcagcatctgggccaaggagaggccttcctgggtcaagctagggaagggcatcactagttaacacagaacgcccattatcagtgcttgggctaagagttgcccagtggcaagtttatcaaaagtctgtgtgatgagttggtccttctcaataagtgcctatatttccttctcccaagtgctgttctacttcacccagggcaccatttcctcatctctttgcaccatccccaaccccctttcttgatttaaccagcccccactgtccgggaccagagtgaaagcgaaagcgctttagagtagcttcccgttgacgcttccagctaagagtcaaagcacccgctttttccaccagcctcgcgtgcctgttcccttcacggacactctagacgacccccctcagaaaagaaatactctatgctcattgcgggttgcaagcgctggctgctacaggcgacctccctgcgctcccgttggtctctgcattcacttctccgcgcgcgcttccagggtcccctggccgctgcatctcctccacccctctgccaaccctcaagcccagacccattaccccggtgtggacttctcccgcccggggtaagtccccggttggtgctcccgcccgcagcatccctgcaaggcaccgctctcctcgccgcctggggcactggtttccaacctgggacagcgcacaacgcgcagccgacagccccgccccttcgcggcgccgccaggaggcgcctgggtgctgcggggctgctttgcgcgcggcgctaacgtgtgtagggcagatctgccccgagacaagtgacgaggcagccccgccctgaggctggggtgggaaaactggtgcaagtggaaaggcaggaggcagggagaggcgagaagggtgtgcgtgatggagaaaattgggcaccagggctgctcccgagattctcagatctgatttccacgcttgctaccaaaatagtctgggcaggccacttttggaagtaggcgttatctagtgagcaggcggccgctttcgatttcgctttcccctaaatggctgagcttctcgccagcgcaggatcagcctgttcctgggactttccgagagccccgccctcgttccctcccccagccgccagtaggggaggactcggcggtacccggagcttcaggccccaccggggcgcggagagtcccaggcccggccgggaccgggacggcgtccgagtgccaatggctagctctaggtgtcccgctccccgcgggtgccgctgcctccccggagcttctctcgcatggctggggacagtactgctacttctcgccgactgggtgctgctccggaccgcgctgccccgcatattctccctgctggtgcccaccgcgctgccactgctccgggtctgggcggtgggcctgagccgctgggccgtgctctggctgggggcctgcggggtcctcagggcaacggttggctccaagagcgaaaacgcaggtgcccagggctggctggctgctttgaagccattagctgcggcactgggcttggccctgccgggacttgccttgttccgagagctgatctcatggggagcccccgggtccgcggatagcaccaggctactgcactggggaagtcaccctaccgccttcgttgtcagttatgcagcggcactgcccgcagcagccctgtggcacaaactcgggagcctctgggtgcccggcggtcagggcggctctggaaaccctgtgcgtcggcttctaggctgcctgggctcggagacgcgccgcctctcgctgttcctggtcctggtggtcctctcctctcttggtaaggggaacgcagggcaagaggggaggacacaaggggactgggacaggaatcaaaggtaattgtcagtaaggtagagtagcgtgggttctgggaaatgtggagcaggagaaggactcctagcgtgggtcttggaacaccacttcggtgtagaagaaacggcactggactggcgggggccagaggttctgggctccattgctgaccgggtcttgattctttgggccacgccggaagcggggaaatcctttgctctggggccgaagggcggggcatcctcatctctaacaggaggcttttctacttcatgatctccagccttcctaataaaatcctgaaagttctggtagagcaaccacagggtagtgagttccagggcagcctatttaggttcgggattgagacgtcagtgtttcctttctgctgatgccctccaggataatggtgagggggaggaggcgtggtggggccagtctgactggaactgacctacttagacttaatatttgtgcgtgacctctcttctctttctccaggggagatggccattccattctttacgggccgcctcactgactggattctacaagatggctcagccgataccttcactcgaaacttaactctcatgtccattctcaccatagccaggtctgggggctgaaaatggggcaccctgcaaatgagggagttggaagttggggctgctgtccgaaatgcacttatatggggatacctgggaccttcagtctgttccctgaacacaccctgatcccctttttttccgggttctttatagtgcagtgctggagttcgtgggtgacgggatctataacaacaccatgggccacgtgcacagccacttgcagggagaggtg

SEQ ID NO: 585669 - DNA, 4001 bp, Homo sapiens
cactgcccagctcgaggacaggcaggagctctaagaggtaacagagcccgaaggtcactggagtcttcgagtgctccgagttcacctcgtgaaaggttttgagcagagaaatgaaaatatccaacttcagtcttaaaactatcattctgttgccctggttacaaggcagtgttgtggcctgaattgtgtctccccaaaaaatatgttgaagtcctaacctctgggtacctatgaatgtgaccttgtttgtaaacagggtctctgcagatgtaaataagatgtaatttagaccaggcgcggcggctaacgcctataatcccggcactttaggataaagattagcataaagattctttacttccaaagggacttgcttgcctttgggaggccgaggcaggcggatcacgaggtcagaatttcgagatcagcctggccaacataatgaaacctcagctctactgaaactacaaaaattagcccggcgtgatggctcacacctgtaatcccagctactcaggagggtgaggcagaactgcttgaacctgggaggcggaggttgcagtaagccaagatcacgccattgcactccagcctgggcgacagagcaagactttgcttcaaaaaaaaaaaaaaaaaatatatatatatatacaatttaagacaaggttatactggagtaggatgggcccttaatccaacattactgatgtccttatgagaagagtcgggctcactgaggaaggaggatcatcacttgaggccaggagttcaagaacagcctgggcaaaatagtgagacccccatctctacaaaaaaacacaattagccaggtatggtggcacatgtctgtagtcctagctactcgggaggctgaggaaggaggatcacttaagcccaggagtttgaggtgacagtgagctataataatgacactgtaccccagcctgggtgacagtgagagaccttgtctacagatctttgagaataaacctctgttgttttaagccacgcggtctgtggcactttcttacagctgcctcaggaaaccaggagaaaccaggcggcgacacgcaaagccggaaaggcgggagaggaggggaaatgataatgtcccaggcttggcccagcgcggcagggtgaaggtgagggcggcttgggttttgtctgctttgactggcggcagtgcctagggactcagcacgtggagtgtgaagaaagaggaatcaaagacaactgcgaggctctgaacgcacagccaggaagatggagctgccatcacagcgccagtcaggcggaggagggagcaggtttggagaagagagcctgatgtgtgcctagtgcgaaatgcctgagacatccagtggagacgcaagagtccccaaaaaattatcagtgtgctcaaaatccagatggcaggagagctacgaggcagacgcgtcccccagcgagcgtgtggcgaggacagacccaagacattctgacctacagagaccagtgcgggacgcagctgcggggcggcgggacaaggagaggggcccggggcccgcgcgcagctcccgaggtggtgcaggccctggcgcccgcgggcttcctaagacatcccacgggtgggcttcgggggagtagggcgccctgtggacccaagagaagcctggggggctgcagctcgcgcaggcccggcgcccccgcgcccccgccccgccgcccgcaccctcggccgccaggcactcacgtagcggctgcacatggccacggcgaggttgcgcaggtgcggcgtggcccccacccacaggaacagcgagtccgtcagccgcatgacgtggaagtggaccagctgctcccacagcctcgcgctgaagttgtgcagggagacgtccccgccggcggcgacaaccagcccctccatgccgccccacggctcccggcccacagcgccagacccgggtcctcgccgctgccagccccgccagacccgatggagcgagcaccgagagaccgagcgcgctttcgctttcggccccggaagggcgggggtgaggggcgtggtcggggaggggcgatcccgggcttgggttgggggcgtggtcgaggcggggcggctgccggccctgggcggagtagctgtccctggttgtcttgctggcctctcccgcacaccagtacctctctggacgggctggggaaacccacttgagtagcagagtgcgacagtgacctctaggagtccacgggcgcccagcagaactcaccctcgctttgtttccccccaccccctaattattactgacgcggggcattcaagggctgaagccagccgcaccgtcctcccaggccgtgacacttcgccctacagacattaatttaattaaaaatttaaaaagactgatttttaattagttcttcaagcactctgagaacggccacctcccgtcccacctcctcctcctagcagccctttaactccaaggaggcttcgacggcacccagccctaattaagaatggcaacggtattgggagaaagcctttagaaaggaaaattgtgtcaactaagttggcaggaggatgggcaggcacccttttggacgccgagtcccaagctgcagtcatgtacatggcctcgggctacccccttaacctctctgagactcagtttcctcatctgcaaaatgcaaataagaacaggtgcctttcggagacgtggaaaggatctcaagagagattaatgggaagcaccaacaatcatccaatcatcccattgtcatacctatggggagaccccttgaacacttcaggacattacagagttgagaaaaggaagccttgatgggttaagagagaaggtggtaaaagaaaacagcccattttgtcagattctgttacaactgactttagagatttaacttggaactataaaaggtctgctttaaaaatctctaatagatctaagttgactaaattgaaatttaagagggcattttccatagttctatttgctaattatcgatgattcaataatacagttaattttcaggtcaatattttaacagctttattaaaatgtgattaacatacaataactgcacatatatagtgtacaaattgaagtcttgacacgttatagccagtgaaatcatcatcacaatccacaaagtgaacgcgtccagtactccctcctgccctcagtaatgactcctgcccccaaccactgatctgcttcctgccacacagattagtctgcattttccagagttttgtatcagtggaatcacacagtatgtactgttttttgtccagcttctttccttcatcataattatcttgggttcatctgcttgtgtgtcaatggcttgtgtctttgtattactaagcagtgttccattgtatggctacaccataattgttttatccctttactttgtgatttgaggcccttcaatcagctaggaggacccaaagattaaggaaacaaagttaccgaccggtggagagttcaaggcctggctggcatggcaaatttctcaatctggattgtaatgatggtttcactggttatacatgtctcaaaacctcaatgctcctctctctctccagctttgctgtcactgctcgggaaacacacaggcagagggtcacagccagtcatgcccaacatcagcggccctggaacactgccctgcagtccctagacagcgtcctctctcactccccttgactatgctccccaaaccctgagctgacccaaacccaagttcagcagatgcccttgcttctgatgttatgcagaaaatagaggtgacaaagccagattttcccagctccttgtccctctcctaaaatgcttatcttcattggaccctatctttccttctgctcactctgtgacagtgaaagataaagatgtccctccttgtacagaaggtcaatccatccacctgtgctctgaccctgtcctttcacgtcctcaggaacccccctcattatctgtgatgcgtctccaaag

SEQ ID NO: 585670 - DNA, 4001 bp, Homo sapiens
tctggtgcccctggagtggttcaaggtcccccctgtagcaatggtggccttccaggcaagccctgtcccccaatcacctctgtagacaaatcctatggtggctacgaggtggtgggtggctcctctgacagttatctggttccaggcatgacctacagtaagggtaaaatctaccctgtgggctacttcaccaaagagaaccctgtgaaaggctctccaggggtcccttcctttgcagctgggccccccatctctgagggcaaatacttctccagcaaccccatcatccccagccagtcggcagcttcctcggccattgcattccagccagtggggactggtggggtccagctctgtggaggcggctccacgggctccaagggaccctgctctccctccagttctcgagtccccagcagttctagcatttccagcagctccggtttaccctaccatccctgcggcagtgcttcccagagcccctgctccccaccaggcaccggctccttcagcagcagctccagttcccaatccagtggcaaaatcatccttcagccttgtggcagcaagtccagctcttctggtcacccttgcatgtctgtctcctccttgacactgactgggggccccgatggctctccccatcctgatccctccgctggtgccaagccctgtggctccagcagtgctggaaagatcccctgccgctccatccgggatatcctagcccaagtgaagcctctggggccccagctagctgaccctgaagttttcctaccccaaggagagttactcaacagtccataagaagtcaactgttgtgtgtgtgcatgccttgggcacaaacaagcacatacactatatcccatatgggagaagtccagtgcccaggcatagggttagctcagtttccctccttcccaaaagagtggttctgctttctccactaccccaaggttgcagactctctcttatcaccccttcctccttcctcttctcaaaatggtagattcaaagctcctctcttgattctctcctactgtttaaattcccattccaccacagtgcccctcagccagatcaccaccccttacaattccctctactgtgtggaaatggtccattgagtaacacccccatcagcttctcaactgggaaacccctgaaatgctctcagagcacctctgacgcctgaagaagttataccttcctcttcccctttaccaaataaagcaaagtcaaaccatcatctggaaacagtggccacttttcactgacctttcttcgacatctagtcaacccacccaatatgccactgggctctcgctcccaattccaccccaccctccattacagagctcaccacgccctcctagatcaccgtccccaacacacccattgcctctcaaggcccttatctcagccccttcctgtggccacttccctcagtgctcagatgattccctgggtgagggagacactggggcaccctcagaggttgaagcaggctccctgctgtccctggatcctggacagatggctcagtaaactgtggggactaggtgcagactttttgccttcttggagtcctgggtctcctctgagagtctgggtggtgctcttcctacgcctctagaggtctctgtgttcctcattttccttcaaaagcgggctgtgtttctcttctaccttccagctgctcccacagaggaggaagacaataaatatttgttgaactgaaagcagagattgcctggcctcccagatccttccgccatttccctcctctctcattgctccaggaaatccattctcttcccattcctcattcaccgtggggtcccccttccccttatttagggccctcagtgtttcctctccctcccctcccctcccctccccacccaaactccttttcttccaccattagcattcctcaccttctagatgccatcctctctgggagtcatgagtctcgatttcctgggtttctgggacacctggaagcttgggaaggctgggacacaacaactccaaccagattcctgtcagctgagtaggaggccagttgggcgttgttcctggagctgggggtggagagagtaaaggactgagaggatgggagcagggcagggagtgcagccaagcagggtgactcactggcctagatcaagaggcccagcctgtggcagaacagagctgccggtggtctctccatcttcacactccctgctctgctggggtccagagtgagagtgtgagcaacatggctctcaggtgagggctgagaaggcagagtgccccagtgggaaagaggagtcgcttccactggagaagagagagaaagtggagtgtgtggtggggtccatgcgacttaagtcctgagacaggcagggagaggctgaggcggacgaagttcccgcatcccaaggagggcagagtggattgtgcttgtccctgtaggagccccaccccccaccccaggccacctctcagagcctctgcttggctgcaaaggaattcacccctactgtagcacttaacccattccctcctatcagggtggtgctgtctggtcctgaatttagaactgttgaaactccaagtctggaatcagcaaaaatgtattacattgaccagaaagggattgaatcacccttggtccagcatctggcccctgatctgcagccaatggcaggaatcgaggtcctcagatgcttcatgaatgggaattgcagggagagaaggctctctgatgtggtgtttcctcgagtctcctgctgtgctccaaattaaaagcttgtgtaaaactcatgcatgtcatccaaaaaggcctctgggctccatccactgccagttctggagaggagctcttcactcctccagtggttaagccagcaggggcaggtggggaggacacagcagtagaatcagccaacagctcatgtttagaccttgggcagccagggaagcctactcctggggcctcccggaagccatggagagaacaaagccattgcatttttataataaaatttgcaaacatatttaaaagccaacaaactgttaatgaatctctacattctcatcgcccagcttcaacaaggatcaagtcctggccatttgacagcagcatttaaaggctctcctctactgttacttggaaatagccactttctcccaaggtttcttatactctatggcacatctgaccaccagtagcaggcagaatgatgtcttcaaccccaacaccatcaaagatgtccacatcctaatccctggaacgtaggaattaggttacatggcaaagggaaattaaggttccagatgggattaaggttgctattcggctgacttcacagagattatcatggattattcaggtgggtccagtgtagtcaccaggtcccttaatgtggacatgggaggcagaagaggaagtctgagtgatacagtgtaagaaatggctgattttggctttggagatggaggaaggggaccatgagccaaagaacacaggatgcctctagaaggtgaaaaagcagggaaagggattttcccctgaggcccccagaaagaatcacagccctgctgacacctttattttaatccactgagacctgttttagacttctgatctccaaaactgtaaagtaataaatccatgttgttgtaagccattcggttcatggtaatttgtcactgcagcagcaggaattagtcagtatctcataaggatggcatccaggtccatttccctagctagatccagggtctcatgtaggagcagctcctcagatggggccacttctgcaccccagaacctcctgcaggttggggccaaggtgaaggagatatgaggatgcatgagaaaggggtgctgggaggaaacaatccagctcccaaaaagaaacaagtgtttctgttgctgagagaggcaattaagagagtgggaccccagggtggaggtccttgtgtatagagaagcagggctggggagg

SEQ ID NO: 585671 - DNA, 4001 bp, Homo sapiens
ggaggctgaggcagaatagcgtgaacccgggaggcggagcttgcagtgagccgagatcgtgccactgtactccagcctgggcgacagagcgagacttcgtctcaaaaaaagaaaaaaacaaataaataaaaataaataaaaaagaccctaagtgttagttaaagcagcagcctagattcagaattaagaaaacatgatttttatttttccgtttcatggaagcagcagctgtctactgatagttcctgccgccggccaccaggtggcagaagggaacacagtaccatagccctgccccagcgatcgcgcgggcaggaagaccgggtgggaggtaggtgcggccgaggcctggaggcgaggtaggagagtaggcttaggctgtcagaggaaaaaacgggcgatgtgaggactaagtatggatctcaggaggggacaggaaatattgagaacaccaccttacgggttcagaataaaaccgagggaatgaggaagaggtttaaggagacaggctaaattgggaagaattcacggggaatcagagggtggagagggcgtgggtgcctggagatgcctgggaacagaacggctgaggggactccattatctgtactcttcccggggtgggtctaggtctggctcctcctgaggtcggttgtccacctcaggggcaggaggccaggggttttctgggggctggggtcctgccggccaagggtcgtcaggccggggaggttgaggaggatccgttctaggcggttcagggagccagactccagtttcaggcaggtctctccagggacgactggggcgggtaggcggaggatcttcaaagagagggggtgcccctggccaagggtcaccggggactggggggccctgaggcaatgttggggagcctgcctcctctcggtcctctgcgggtgggtgagaggggtggccctcgctgcctgagatgcctgtaaaggaggaaggagaaaggtaagaggtggtgagggcttctctccccagccccacccagccccagccccaggaggaggagcctgtctggatggacgcagcctgaactgacccacaaacagaccaaaaaagtcactctcaaagagctctcggtaggtttgtaaatacttaactgatggtaaaatgtcatgaacccctacccccgatggatctgaaccgttcacttgacccactttaaactgaccagacttctccaaataagctccatccacccctggttggggtaccccactagctttgtcctcaggccaacctgcaacccaaagtgggttacaccttggcccccaggcacacagaccccagctttacaaggaccccagctccttaacacagatcccagctccgaggaaactcgtcccccccacgttaatcctgaccgactttgccacatggagccagcaaaccatttctggtgagagccaaatgcaccttctgcaccatgtcccccacccaatgtgtccagaaagccatttctggtgagccagatgcaccttctgcgtcccctgaattcctgtccccaaccccatgcgtccagttcacctccgccatcttgagtatccctcatcaccccaaactgcagtccctgcctctgttcccacctcacctctggtgtgcaggcaaaggaccaggatccccaggagcttccagttgaggatcatggctatgtactggcccccaaagctggggtgggctgagtctgggtgcctgggaaccccaagaggctttataggggaggagtggaggagggaccagcccagtggcacaggaataccatcagaacagaactggtcaaacccgttgggaaggcctgggctgatgtgtcacccctgaaggtggcgtcccttattttagtcctccagcccaggacccagctgcctgctctccctatcatgacccagagcctgcgtcaccccaccctggttttcacaccctccatccacatcctggagcagtcaatacccacttggcatctccgtaatcacagagatgtccaccttcatcccttgcaactattggaagccaaagaatgggagcaaaccacgcgatgggcgttgggaagcaccgtaattacagggttgggaggcaggatgcctgcgctgagggaggaggtgcttttcaaacctgggatgcagctgggacagtgtcagctactaccccagcctccccactcacccccgcactgaaagctccccctggggcttcgtgctttcctgggcacttcccttcccccatgggatccaggcatcctgctctccaccatgtccttcttcaggcatgcaggggacctccaagcaatgatatccaaggaattccatctggcagccacccaggatgactgcagaaaaggaaggacacaggaggatatcctggttccctcttcccacccagagctgtttgcatcagtcctgccaatggctccggaagaagctgccaggctccagcaacctcagccccttcctcctccctcaggaatccacctatccgcctctaggaccttggctccaactctattgtactcgtctcctccctcccattctccttttggtctcagctccttgatctaagcctcccagagagacccctagaacgtttccctcaaggacctttctgcctggaagtctgttagcctttcagaagtaacatgtccaaaataaaatttgattcctcccaggttgttccctgcctggtccgctaccccacagtaaggaacaccttattatgcaatggcgtgatctcatctgttccctccagggctcacccagaaaccttcgttacactcctccaccatccacctgcaagcccctccacaccctgtccaaacccagcccatcatcctgagccaccatctcccctgagcctccccaacacccttctaattggcccccttgctcccactgtttatccctccccctcacacaaagcctgtcctccaccagcaaaagaggtcttaaaatatacatcacgcgggcctggtgtggtggctcgcgcctgtaatcccagcactttgggaggccgaagcgggcggatcacctgaggtcgggagttcaagaccagcctgaccaacatggagaaaccccgtctctactaaaaatacaaaaatattagccggacatggtggcacatgcctgtaatcccagctactcaagaggctgaggcaggagaatcgcttgaacccaggaggcagaggttgtggtgagctgagatcacaccattgcactccagcctgggcaacgagtgaaattccgtctcaaaaaaaaaaaacatatatatatatatatatatatcaggccaggcgtagtggctcatgccagcactttgggaagctgacacaggaggaccgcttgagctcaggagttgtgtgcgctgcttcacctgcagcaagactgtgggcaacacgtgggaggcctacctggggctgctgcagtccaagtacgctgatggggacgccctgggcctgaagcgccacagccgctgcctgccgcatgctgctggcccacgtggacctgatgcggaaactgctcaattatgccctcctggggaagtgacctggttagacccacccatctgctgcgctgggtgccgggagcaatcgctgaccacagtgcgtggatatgtgtacctcactctggaagggaccatccagtaagtccctcaggaaaaaaaatgtacaccaaatcatgttgcgtcttccctttgtttggggagtgaggacaggttctcgctctcttaggctggggtgcagtggtgcgatcacagctcattgcagcctcaacctcttgggctcaaacaatcctcccaactcagcctctggagtaactaggaccatgggtgcacgccaccatgccctccaatgttttttatttttattttttatatagatggagtctccctatgttggctggtctcaaactcctgggctcaagcgatccgctcacctcggcctcccaaaaaagtgctgggattcagctactccggaggctgag

SEQ ID NO: 585672 - DNA, 4001 bp, Homo sapiens
agctgataaatcatctgtttcgtttcactaaacatcaaggggctgctcagctttgtaaagctgaaacccttgtcagcctctggattcatttaaatggggacaccatgttaagaaaaaaaaaaaaagcaggttataaggtttccctgaagaatctctagtttctaagtgcattaaatcctccttcaatttaggaaaaagattttttctctcaaaactcctgaaaaaggtttttttttttaatgtatagatgccgactatatcaaattagtgatttcctatattaggtcattcatttattgaaactggggtcctttctattccactatctccacagatgcacacacatatcttcacatacattaaaaaaatttttttcttctttggaaacacctgtcttgggagttcttggctgtgcagcttctgggcatgaacagggtcaagcagacaaatggtgcagtgactcttttggaagtcacatttgtccctgaaacttcagtcacctggagactgcatgcctcattgcctgcagcagctcaatcttgacagtgtagaatgagtttagaaatctcatttgagagaaaaaatttaaattgagagtctaaacagcacaatatatttaatgctgaaatgaccgttctttgtaaattttgctgactgtgatttttttttctttccttttgttataaggctgttgtaataatcttgctctcatttggaattttttatgggaaaggaagatcactggactcagttatctagtacatcagttaggtgcacattcctatttttatacacagaaaattcctgcttcgtttgctatgcaaacacccatacacatcattcctggaatccctactacattcataactcactgctttcagacacacactcacacggcaccaaaacacaaactccccacatgttaacaatcaagccaggctgaagatgtaaataggtggatatgacaccaggtggatgtgtaatcagtaataagaaatacattgagccccataatgaaaagaaatcccacaaattgttgaggattccccctcccccttccattcactgatttattaaccctgaacaaagatgtaattgcagggtctcagaaataacttttgttttcatttttctttttttttttatttttggtatttgttttgtttggccttgaatttcttaatatctagtcataccattcattgcctgttttcttcactcagttgcccatcttttccccccagaaatgaaagaagcattagcttctgagtcttaaggatgagacctctgcattttctttgcttgtttagggcaagaaatgaagtgctgcctctttaattggcagaagcatgcagaaggagcatacctttaatttagtgttgggatacctcacttgcaccctggctgttgtcttattggagacggcagcctgcctgagatcctctagcactgaaataatatcatccagcacgcatttcttatcctgatttctcaacacacacagatgggaaaaagtataattatagcccttgtggttcaccttcatttccagcacggctcggtgggtctgcaggatcccctcagcctggagcaaaatattgtccccggttggggagaggaggatcaccctgccatacctcccaggggtgtgtaagtccgaatagagctggcttttggactggtccagggggaaaaggctgctggccaggctgcgctcgatcttggccaggctgtggctgggagcgaccaggcgctccaggtcgccctcgggctggaagcggttgagcgcgctgaggccgaaggtgattgtcaggactgcgggcacggtgaggaaaaagaccgggtgccggctcacgcacaaacccagcctgtggcagaacgactggagccctctgcgaagcacctgccgcagcatcctccaccagatccagctcgcaggcgctcccggccgtcttaaaaagcacatgtgacatgtgtaagcgccgggctaccccgttctcccccatcccaccccctggggccagtcccccctccccaccgccgccgcctccccacccactccgcgctcaccccacaaccactccgcctggtctttccccggccccacctccatgcgctcctactactctttcaaacactgcagcaagttgcagcaaggcgggcaaataccgacagcgcgcgtgggggcgggcggcgggcgccgcggggcccaccccctccccggtctccccgcgccctcgccgcctcccgcgctggctctcaccgcatgagcagcgttccctcggtctagcccttcatctcggtgctgcagtcccctggcctccctcgctggaggtggttccgtgtggagcgtcccacagatgtggatttcctctctgtcttggtggggttcggtgcctaactggaaccatgtgcctcggtgttgtaagaagcagacatgtgccccataaagggggggggggctgagggggggagaggagggagaagggcgggagcacgttgggggtgggggggcagataagcttttttctttttttaagatgctgacagttatttttagagttttgtgttccctcttccctccccgctggagtgaattgaagaggaaataaatggtgaaggtgctgctggcccattggagcaagggcaattagagcccaaggagtggggcatggagggagacagccccagggctccaggagacagccttctcgcccctccagtttccctgtgccctcgaattctgcttttcagcgaagaaaaggagcagagaggatgatgctgcatttttaacacaccacacagcatgcaagggatttcctcgcaacaccttcctcgctgtgattccacagaccagtccgctgcagctgagggctgcggagactccatctatccctggtgcgttgggaccgtctggatagcttctttcctctgatggctggagaggaggcatttgccaatagcagtagcctgtgtgcgtgtgcgtgtgcgtgtgtgtgtattgaaagtgaagatctacaggcaatatgaggtttctcataacatgttacattcactttctgtattcttgagattaaaggacagaaagttcctaaagctgatttcagtccccttttccagtgtctccttccacccctcacccatgaggactgtttcaagccatctggttcaggctaattttcccctgtgagtggaattccagaaacagacacttccagacacaccaggtagttttgcctgaaaaaaaagagagtcgggtgggtagagggaaacctattggagtcacttgtaaaaaacagtgaacctccttcactgtataagaaagaaaacccccaccagatacaattcctccttcagcacccaaaagtgtgaagatgaggatctcagcttcagatcaggtcaacttcaaaaactaatattaataagtgtgtgtttgtgtgtgtgtgtgtgtgtgtgtgtgtgtgtgtatatatatatatgaattttttagggcaaactctaaagtgtgattgtgaactggagatttgctttccaaagtttctgttctttttggaatgacttcatagaaaagattgagtttcaagagatgttctgtgcacaatttcttaataacagtgaaagtgcccatttttaattagatacttagaaagggaaccatctatgcatacaaacaagctaaaggactccttgtcataatatataccttttatttttttctactggaattgattcttcagttaagagaccaatgacacagcagagagctcagaaacagcgacaatgcttaaggaaaagtgtctagaagaaggtgtcatatataagattaaataaaaattccgccctttctaaattgaaagtgaccttggcggccattctgtttgaatttctactgagtgcaggaatagcttctatattatctctggtagttctccatctggcccatgctacaacattcccaaattcacaaatttttctaggaagcccattctattgttacactg

SEQ ID NO: 585673 - DNA, 4001 bp, Homo sapiens
gccaccgcgcccagccaattttctgactctttttgtttgttttgttttgttttcattatgtatgtatttatttatttatttaggttgaaggaacaatattttttgtgagtcccaatggtctcatcaatataatggtgttaggccgggctcagtggcttatgcctgtaatcccagcactttgggaggctgagtcaggtgaatcacttgaagtcaggagttcgggaccagcctggccaacgtggtgaacccctgtttccactaaaaatacaaaaattagccgggcatgatggtgggcggctgtaatcccagctacttgggaagctgaggcaggagaaccgcttgaacctgggaggcagaggatgcagtgagttgagattgtgccattgcactccaatctgggcaacagagcaaactctgtctaataataataataataataataataataataataataataatataacgggctgggtgaggtggctcacgtctgtaatcccagcactttgggaggctgaggcgggcggatcatgaggtcaggagttcaagaccagcctggccaacacagtgaaactccgtctgtactaaaaatacaaaaaattagctgggcgtggtggcaggtgcctgtaatcccagctacttgggaggctgaggcaggagaatcaagtgaacccgggaggtggaggttgtagtgagccaagatcacaccattgtactccagcccgggcgacagtgcgagactctgtctcaaaaataaataataataataataataataataataataataataataatataatgctgttaataataccagcccagcaaaattgttgtgaagagtaaaggccataagtgtaaaatgccctggcagataagtattagtgcaattgttgatattaatattaataaggcattgcaaacaaaggtagtagagaaggctgggcacgagctccaggactcaacctccagagccttttcagttatatagatagagacattccccaagttgagttcagcttccacttcttccatgaagcatcccaggattgtccctgcttaccctggttacttccttcccgagctcaggcctcctgccatgggctccctgtgttccacataggtgtggtttatctccctaatgaaggagtgcctgtgagatacttggggccagctctagatcaaggagacccccctgactcaaaagtcatggaccttcccccaccacgtacatgcacacatgcacatgcttctagatgaagctggaattttcccctcaaaacatgagtcctttggctccagccttgatcatgggagggctgggggtaaataccctgggaagaggccttgggtcctatcctgagcccactgataagcgtgagctgtgagtgaacttgagacaccctgagtcctattgaactagggcaggcatcctgagggcaagaaggacaggacaggacctcacactgttacccatatgacatcattgcatatcacatcacacacactggctaccctaaccccaccttctatggatgtccatccagtttgttctcatttctctatacctctaagaggggcagcctccctatcaacactgtgggctccagggcaggaggacataggagccccagagcaaggtggctgggaggaagagtacaatgggaagagtatagtggggaccctctatatagggtcccctccccagaggtcccctccccagagggaccctccccagaggtccctaaatatctcttgtcctgcctccctgcagcccatcagtacccagggaggtccagagtgaggggatgggcttcggcagactgaggagggacagagaggaaggcaaagagggggctcacctgtgggtagggctggacacccaagggccaggagaagtagcagccatgtaccggccatggcccactcggaaggaggcaggacccagctgcagacctgagttgcggctgggggaggaggcacccacaagactgccttctaggccacaggcccagctgcacctcagctgctctaccacgagccgtttcccctggtgacgggcccctactcctgccctggcccccaaacccaatcttgtctcacgggccagggagcacagggtgcctctcccacaccaggagccggacacctgcactccctctgaagagacagcacttcagtctgcaaagtcccgcttcagggcagctaccatccacaggacacggagcaccaggtggcttgacaggggcttgacatacagcccttcacttgatccactcaaccactgagttacatttcacaggtgaggcaactgaggctcacagagagtgagggacccgcccagggccacacagctgacaggtaccagagccagggcttgaactgtttttagatggctggctttattataggcaaaaagatacccagggccaggcgcagtggctcacgcctgtaatcccagcactttgggaggctgagacgagcggatcacaaggtcaggagatcaagaccatcctggctaacacggtgaaaccccgtctctactaaaaatacaaaaaaattagctgggtgtggtgacgggcacctgtagtcccagctattcaggaggctgaggcaggagaatggtgtgaacccgggaggtggagcttgcagtgagccaagattgtgccactgcactccaacctgggcgacagagcgagacgccatctcaaaaaaaaaaaataaaaaaagatgcccagtaaactttttgccatgttgttacagccctccttttatttatttaatttttttttttagagatggggttctttctttgttgcccaggctagaatgcggcagtacaatcatagctcactgcagtcttgaactcctgggctcaagtgatcctccttcgtcagcctcctgagtagctaagaccacaggcatgcgctaccacacccagctaatttatttttattttgattttttgtagagatggagtcttgctttgttgcctatgttggtttcgtactcctgggctcaagcgatcctcctgctctggcttcccgaagtgctgggagtactggtgtgagccacatgcctggcatttattataccattttaactttttttttttttttaagagacaggcttttactctgtcacccaggctggagtgcagtgatgcgatcacagctcactacactcttgaaatcctgggctcaagcaatcctcccacctcagccttttggattttttggagacagtctggctttatcactcaggctggagtgcagtggcatgatctcacctcaatgcaacatctgcctcccagtcccaagcgatcctcctgcctcaccttcccaagcagctgggaccacaggcacatgccaccacacccagctaaatttttgtgttttttgcagagactgggtttcatcatattgccagtctggtctcgaactcttgagctcaagtgatccacccttcaaagttctggcattacaggcatgagccactgtgcctggcgtccttttgtttttaatcagacattctgttacagcagccattcctttattgttagacatttgggtttccagtttgggacaatggccatctttgttcataaaagcttttccaaatttgcttttttttttttttttggagatggaatctctctccgtcaccaagctgtagtgcagtggtgtgatctcggctcactgagacttctgcctcccgggttcaagcgattctcctgcctcagcctccagagtagctgggactacaggcgtgcgctaccatgcccagctgatttttgtatttttagtagagatggggtttcaccatgttggccaggatggtctcgatctcttgacctctcaatccgcccaccttggcctcctaaagtgctgggattacaagggtgagccaccgcgcccggctactttttttgtttttgagacagggtcttgctctgtcacccagactggagtgcagtggtacagtcaaggctcactgcaacc

SEQ ID NO: 585674 - DNA, 4001 bp, Homo sapiens
cagctgactgtacaagaggttggggttaagaatccatagtttcaaacatcaagcctcctcctcctccaccatatttattacaacagcatctcaaagtttggaaagtaactctgccatttatggcataattacccagactttaaaatggtctaatccacaaacctagccagcctaggttccttactccagccttattaacagtgggatctcactacaactccagttaattacacaattaaacaatgagatgcaaacatctactgtgatctattaaaaaaccgttgcccctgaagtcatgcgtctgggggtgggttgagtcccaggatttcactagaagacagcaggcgcctcggcctccactgaaattgtttacagcacatggacaggttccacaacaaggcacatttggtggaattgatttaaggctctcattaaaatgttcctttgttgagcacaagacatccccccacccctgaggagactacagacctcctgtcctaagccctcagcctgccctaacttcccccaacaggatcccccacacacacgcgcgcacacacactaaacaccaaccagtcaccagattaagtcaattaacatcagagtcatcttctcatggaaggaatttaggaattcagcatttgttgagcaagagccccatcttcaccagaaactccccttgactctagtaccctgaacagcagcagtgaaggcagcctcattgggcagacccacacaccaaaacccaaccaggacagccagggggcctgtgagcttgggctgctcgcccagatggctgggcccccatcctggctgtgcaaaaaaacttccatacttcctctgggagcagatgtggattctgccacgagcaataaccaccacacacatcacaagaaaaacggggcaactccagaaacacctcctccaaatccctggagattggtctctttcctgggttacatttacctctccttttacaactgggggcaggggagatgttgattccaccagcaccaaaacccctccacagctggcaggccagaaagatattagaaaggcaattccttacccatgcccttcccattgccaccttcaaaggagatggaaggtgatcacctaggacaggtctcctcgacagagctccccaagagaaagctgcttcgaggaccaccaaggagtgttgtggagggtcgggggctttatttccagtccgggctatttgggatgtgcgggtggcttggtgctttcctgtaaggcacttcaacacctcagtgatgactcttaggtgtgaccaagccaggaaataaaagctgcgggagttgggggggcggtgctgtctgccctggtgatgagggccacaccctcgttaaaatgctaaggcccccccccaagaaaagccagaatgagctctttttgcctttcttcccttagaaatacttcctttcctctgtgaggacagtcaggatggaaatccaggaaggagcagaacaaaccccgtccgcacctttgcagccaggccatgcccgattttggcagcggccttcacacattagtcaccgcgacagcctgggaccctcggatccccggattcggccctggcacggagtgggcgcagggttccagaccagtagctagaggccatggatgggggcggcccctaactcttcccttcttccgccctcacccgcagggccatctggggtctcagctttgcccaggaactcggaggagggaagccgggaacgtcgggtcggcgtaggtaacaaagctccgcgctttgcgcgccgcaggtctgtccggcatcgggccccaaaccagcaactcttacctgggccgaccctgccgggtggggtggggaattcctttttctccatcgcgctccccacggtgggtgcggatggtcttttctcccccgacaagaaactccccatctgggcccgagagccagcaactctcggcagttctcgagcaaactctcggctcagaccagaaaaactcagggaggctggaaatgcgtccccgcggcgcgagtgggaggggtaccctgaccgcgtccctggaggcttcgccagcctcccgacacccgggctccttgcgcccttccgccgcaagcctgcacccccagcgagcctctccactactccagggccgttccagccgcccaaacccaccgccccgggcgcagccttttgcccacgggactcccgcgcttcccaagctctgtgcccccaactctcgggtactcaccgcccagcagcggcagcagcaggacgctgagcagaggcaaccggcggggtctggccggggatccccgcgcagctcccatcgcggcgggctcaggaaaaggagctgagggcgcacggcgggcgcgcagactgcgctccgcggcgggcacaggaggcggagcgcaccggagcgcgggcgccgcagcagcagccgcagccggagcccgaccccgaggcgtcccgaggcgtcccgagccggagccgcgcgcgcccagtacctccgagtccccgcgcgccgccgccgccgccgccaagccccgccccacgacgccccctcccctccggcccccgcacggcgccccgccccctcgacgccccctcctcgccgaggcggggaggagctcagtagggggaggggtctggagagggatggagaatagagagagcaaggctcagggaagtgcaggggacctgagtatttgctgtacccaccaccgactctgcagggatccgggagaacctaagtgacttgtgcgattccgtggaccctggggagaatggtccattctgggcatacctggaggctctggccaacagttcccccagaattctccaggtgggggcaggggaagaggcgggccccgccaactcttcagcaacccaaaatcttaacggcagacccagaacagcagggtgtccttaatgtccccaagtaacctgaagatgctgtgtagcccggagaggggctgaagtgtgcatgactggggtctggtttggctgtagaccaatctgaacccaaaggtagaaacacgctgggctctgaaagccaggctgaagtctgctaactgacaaattcatcccaagtccatctccaggcagtctgggctgtgtcagggtatggccaagtctccagctgtggggaggcccagcacaacccttgttccaggcacccccacccccagcgccaccacccccacattctttctttgttgtgaaagcagcaaggggtgtaggaggcgggtcaggaggagtcaagctttagaagatgggccccagctgctgctcaggcctccaagatatgctgagaggggatggatagtgccttgtctcccctctggttccggagggccccccaggcctgtttagacctcccttcccccaagcagctgggaggaggaatggcagccacagagggcctcacagccaggagaagtggcgccaggactccagggtcctgccacatggccaccacatgtccctgacaacccagtccacagcaccttctccttgggttgtgagcctccttcttccccatcccccagatgccttcctacaggccctgctggagatgatacaaacaacgggaggaagagaggagagatccaagaatcaacactcctcctgctgctccatccatcactgcccctcaccttctgtgaagggccccaacacaagccctgcttcataccctcttcaatcaggactcaagtcacagaaaggttacctgattcttttatttaagaaaagtgaaatacatggacctgaagtgagacagcagagggagggagtaagagcggccagggcaaggcagcttggctggccagcccccaaccctctgactgaaaagccagcagcaggctgcatctctgagggccatacctgctttgtacccaccttggggcctcagagctagctactctagaggaccacagggtgcagagagggtgtcctgagggtccttcctaagagggattcctgaggagggagctgagaccc

SEQ ID NO: 585675 - DNA, 4001 bp, Homo sapiens
acgcgcgcacacacactaaacaccaaccagtcaccagattaagtcaattaacatcagagtcatcttctcatggaaggaatttaggaattcagcatttgttgagcaagagccccatcttcaccagaaactccccttgactctagtaccctgaacagcagcagtgaaggcagcctcattgggcagacccacacaccaaaacccaaccaggacagccagggggcctgtgagcttgggctgctcgcccagatggctgggcccccatcctggctgtgcaaaaaaacttccatacttcctctgggagcagatgtggattctgccacgagcaataaccaccacacacatcacaagaaaaacggggcaactccagaaacacctcctccaaatccctggagattggtctctttcctgggttacatttacctctccttttacaactgggggcaggggagatgttgattccaccagcaccaaaacccctccacagctggcaggccagaaagatattagaaaggcaattccttacccatgcccttcccattgccaccttcaaaggagatggaaggtgatcacctaggacaggtctcctcgacagagctccccaagagaaagctgcttcgaggaccaccaaggagtgttgtggagggtcgggggctttatttccagtccgggctatttgggatgtgcgggtggcttggtgctttcctgtaaggcacttcaacacctcagtgatgactcttaggtgtgaccaagccaggaaataaaagctgcgggagttgggggggcggtgctgtctgccctggtgatgagggccacaccctcgttaaaatgctaaggcccccccccaagaaaagccagaatgagctctttttgcctttcttcccttagaaatacttcctttcctctgtgaggacagtcaggatggaaatccaggaaggagcagaacaaaccccgtccgcacctttgcagccaggccatgcccgattttggcagcggccttcacacattagtcaccgcgacagcctgggaccctcggatccccggattcggccctggcacggagtgggcgcagggttccagaccagtagctagaggccatggatgggggcggcccctaactcttcccttcttccgccctcacccgcagggccatctggggtctcagctttgcccaggaactcggaggagggaagccgggaacgtcgggtcggcgtaggtaacaaagctccgcgctttgcgcgccgcaggtctgtccggcatcgggccccaaaccagcaactcttacctgggccgaccctgccgggtggggtggggaattcctttttctccatcgcgctccccacggtgggtgcggatggtcttttctcccccgacaagaaactccccatctgggcccgagagccagcaactctcggcagttctcgagcaaactctcggctcagaccagaaaaactcagggaggctggaaatgcgtccccgcggcgcgagtgggaggggtaccctgaccgcgtccctggaggcttcgccagcctcccgacacccgggctccttgcgcccttccgccgcaagcctgcacccccagcgagcctctccactactccagggccgttccagccgcccaaacccaccgccccgggcgcagccttttgcccacgggactcccgcgcttcccaagctctgtgcccccaactctcgggtactcaccgcccagcagcggcagcagcaggacgctgagcagaggcaaccggcggggtctggccggggatccccgcgcagctcccatcgcggcgggctcaggaaaaggagctgagggcgcacggcgggcgcgcagactgcgctccgcggcgggcacaggaggcggagcgcaccggagcgcgggcgccgcagcagcagccgcagccggagcccgaccccgaggcgtcccgaggcgtcccgagccggagccgcgcgcgcccagtacctccgagtccccgcgcgccgccgccgccgccgccaagccccgccccacgacgccccctcccctccggcccccgcacggcgccccgccccctcgacgccccctcctcgccgaggcggggaggagctcagtagggggaggggtctggagagggatggagaatagagagagcaaggctcagggaagtgcaggggacctgagtatttgctgtacccaccaccgactctgcagggatccgggagaacctaagtgacttgtgcgattccgtggaccctggggagaatggtccattctgggcatacctggaggctctggccaacagttcccccagaattctccaggtgggggcaggggaagaggcgggccccgccaactcttcagcaacccaaaatcttaacggcagacccagaacagcagggtgtccttaatgtccccaagtaacctgaagatgctgtgtagcccggagaggggctgaagtgtgcatgactggggtctggtttggctgtagaccaatctgaacccaaaggtagaaacacgctgggctctgaaagccaggctgaagtctgctaactgacaaattcatcccaagtccatctccaggcagtctgggctgtgtcagggtatggccaagtctccagctgtggggaggcccagcacaacccttgttccaggcacccccacccccagcgccaccacccccacattctttctttgttgtgaaagcagcaaggggtgtaggaggcgggtcaggaggagtcaagctttagaagatgggccccagctgctgctcaggcctccaagatatgctgagaggggatggatagtgccttgtctcccctctggttccggagggccccccaggcctgtttagacctcccttcccccaagcagctgggaggaggaatggcagccacagagggcctcacagccaggagaagtggcgccaggactccagggtcctgccacatggccaccacatgtccctgacaacccagtccacagcaccttctccttgggttgtgagcctccttcttccccatcccccagatgccttcctacaggccctgctggagatgatacaaacaacgggaggaagagaggagagatccaagaatcaacactcctcctgctgctccatccatcactgcccctcaccttctgtgaagggccccaacacaagccctgcttcataccctcttcaatcaggactcaagtcacagaaaggttacctgattcttttatttaagaaaagtgaaatacatggacctgaagtgagacagcagagggagggagtaagagcggccagggcaaggcagcttggctggccagcccccaaccctctgactgaaaagccagcagcaggctgcatctctgagggccatacctgctttgtacccaccttggggcctcagagctagctactctagaggaccacagggtgcagagagggtgtcctgagggtccttcctaagagggattcctgaggagggagctgagaccctaagggcagcagcaatcttctggttaaactgctccccttcactgtcccacctaggggtggggaagagccaggagcaatggggaatgctgtgagggctgtgggggtggggggacccagcagacctgggggccgggttgaatgtcagctgcttgaagagaggtccatggtgctggcactgaggccccgggagacctgaaacagacaacactaccccatcagctcagggacctcggcctcccaaagactggctcctagagtccatccatcccatggtcacagtgtatctctggacctaggatcacatctgtctctggaccagtctatctctggacctgggactttgtttagcctctgctagggttttccagaaggccacaatctggtggagaagctacctggaagaaccacatgaatactggcatatacttgtgtgttgatacaagaagtcatttgccattaaaatatcactagtgttttctcagatggggattatttaatacttttctttttccattctcatctactactaaggcggctgcaggatga

SEQ ID NO: 585676 - DNA, 4001 bp, Homo sapiens
cgcggacagaagataaaaaaccctcagaattccgtctctggttggctactgctgccacaaaccaacaggaggcaacaacatattacaccacagagctcagggatagttctaaacagtccccgattaaaaggcgccatccagggcccttccaaaattggcaggggaaatgtatgctggtgcccggacgggaagtccttcgcgtcagtgtaactaacagtagccctgtcagtttccaagacgctccgaaccaggccatttctcgacgactggcccagagaaaggacaagactagacttgttcccattatcacgagcccgaggtggggcgataaatccggaacagctcgaattaccaggtggagcctgggaggagggcggggcggacggccgaagttctcacctagcagaaccccactctggcccgggcaggggtgcagctcgcggaatgccccagagggccgccgccccgcgcacgcggctgtgtgcgcccgagcacgcccgctgcgccccctctccgcgccgcaatcacgggttcgcgccgcgccttcagtcaggcgcgggcgccgaggccattttgtctgaggctcgggtcccggccgtcgagcacaagagtgtagctgcacccagtggctgtcccgcgcccaccccggagctccgagaagctctggaaccagatcgttaccacccgtgcctggctgtccggcctaccccacgcccgcccggatctggaggcgaacccgccaccgccgcgccctccccgtatccggctccgcagtgacacgcgcagccctcgccccaccccgggccacgtctcccgctcccagtgcagccactctcctccggccgaacaaagaggccccgggacgccgcggagcctgccatgcccggacgggtcgcgccagaccaaagggccaagggcggaggcggcggtcacaaagcggcttttgtgccacccacccggcccgctgcggaagccgaaactgcccccggccgccgcagaagccggaccgcgccgcccccgtcgctccgggctcgggagggactcaaaagccggtgcctccggcggccaaccgccaccccgcagccccgaggggcccggcatctgcctccgcacagccggccgcaatcggccggccacagggccataacccgcccgctcccacccgggacccaccggaaccgcaacccggggcaacctggaggagacgccgggctccgaacaaaggcgacagcggggatggggggccggtcgtggattcccagcccgagaggcgacgatgcgacggctactcacaggaatatgtttactcattgaagattgtggcctaatcatacagccggtcccgaggcggcggcgacacaggcggtggcggtggctgcagggcaggaggcggcggtggtcgtggcggagcggcggtggcggcgatgcaggcggcggcgggggcaccagactctaccatgcagtgagcggctcggagcagagcgcgtagccgagccggcccgcagccgaaggagccaatacacgcgccgaggcgcccttgcgtcacaagccctcccctttatagccggcgcgacgtgcaaccctccagccaccaatcgcggcctggaaccgcgggccaggagccgacaggcgggggcggaggcccgccccctccggacgtcactccgcggcggccgccgccggtgtgaaccggttgatgaatggctaagcgccgagtcggagcatccccggggcgggggagggaaggggctgccgggagtgctccgggatgcaggaagcctgaagttaagaaggggtgggagcgagagagattccgatttatcgactggaaggaatcatgctgcaaaccacgtttctcataattaaaacggtccaggagtgcacacatgtcacatgaggagactcgaagtttgcctgaatcgtaaaatgcaatccttctagggctggaaccgcgtctcagtgtcgagcctgctttctactgccttaaccacggtcatctttgccagtggtttaccttggcacctgggccccgagtaccttcgtcatcaaataatatttatgtcgcaagaccgctgtacccggtgactcaacaccttgcatgccacggccttaggcttggtcaagatgaattcttgtccctgggggcgctttcaagcggggagaaacttaccttcgcaaaacttaaggctatagaagatggggagagtatcttttgatgcagacgaagccctatgctccctatattctttttttgatcacacctctctatactacgtacgcgtgcaactgcagttggctcaattgtggcatttcgaaatcacatgcatcctttgtactgctgctcacttgatatgttgtctcagataatgaaaggttaggaagtgcttaaagaaagcgtttttagaaattaagaatcctcggttttgtcaagcactgatgtaattctttgcgtcaaagctaaagctcttctttatgttcgttttcagtcctcttttactgacttcattatttaagcccctaagaagtaaagtcttatcgcaattctgtgccatacaagggcacctctgttatttataatctgaaaaccctttctcctcagctctggagaaggaccaaacaggacctttacctgctttttaagaactcagttttccactaacactgaagccttttgtttgttattttcaccgagtatgagattggagagggctttagggatcaaattttgtcctctttcagtgccctgcaacatcttaggatttattagaacttctatttagagactggttgtatagttattcaactttcttaactctgtaagtaaaataagaactttaaaaaaacaaaaacaaacaaaatcctgggccagactttcaaaggaacaaaaactcttcgtcatttggaagaaaatggctcacctacgacacattttaatccattaaaatcaaggaaaactagcacacttgagaaatatgtccctttacaaataaatgatttaaaaaagtaaagactttaaaatcttaaattctaagaaaatatagaaagcttaaaaatcttgggtggtaggggcaaagctaagcaggctggggaactcatgtcgaaaaaaagggacagatttcatatataagaactaaaaacttttatatggcaaaaggcttttgacaaatgtcaatttcacactgggggaaatattggtgatacttcatgggtagggttaatataaaaagcttggccaatgtatataatagtgtagttaaaaagcacatattcagtcagccactcttactccacaagttggtaaacacagataattggaatagtgaaactttttcatgtaatggcatttcaaaaaatacatttggtgggacaagatataaactcagcaaatgattaacagagccaaatatgtgttagccaattttcttgtagaacttgtgatacaagttgtgagccttgtgatccacagatcctgtaattaccacaagcagtgctgacacgaagtatccagtcagctatgctcatcaagttctaaaagctctcaaattctcaagtggcctgggggtcttagcctctcagacaaggtaccatcttatcctactatgaaagtaacatatttaaaggatgaaaaaataaggcttttgctgttgagagaaacgatgcattttattttatgtatttatttgagatggagtcttgctcttttgcccaggttggagcacagtggtgcaatctttgctcactgcaacctcagcctcctgggttccagcaattctcctgcctcagcctcccaagtagctgggattacagccacctgccaccacacctggctaatttgtttgtacttttagaaaactccatgttgactaggctagttttgaactcctgacctcaagagatctgcctgcctcagtctcccaaaggaaaggacacattttaaacaagatataagtgtggtcttgctgaccaatccattaaatgttcctgcttgtcagctgccattg

SEQ ID NO: 585677 - DNA, 4001 bp, Homo sapiens
gtcagaaatgcatgcagtaatgcttactccagaaagaattcaattaaaccattggattattttttgcatagagctgttaccctctgcgtacatcaattatatacagggcttttcctctgcgtgctgccatttcataatctctgcctgaatgtacgacacatgctgccacctgaatctgttgtttaactccctttacagagttctaaatggggcgggggtaggagagcaatggaagggaaataaacgattactccagaaaacaacaatttgagtttatttccaggaaacagggcctccacaacaacgtgagaaactgtcaggtacaaagtaagttatttgcgtcctgcggcttcagccaggagcgtggctgtcgcttttcccgtcttctccatcaccctctggccaccactgcgtctccatctgcaccgcgaaccccagcagcagatgcgctcgccagccaagcgaagctgggtaggttggccagaaaagttgtcaggactggcgggaggtagacaagtgctcgggagcccgctccccagcgtccacctggtgaaacttcagagcccccagaggagagaacgaaagaagcaaccaacctacacgaaggataacaaaactggaggggaacagagggcgggaccgggagagccagggttcacggacttctctgagcggcttgaccgagaacccccagggctacagcgagacgctccacttgtctccttttgggttctccggcagaaggcagacatttacagtccgcttccagccccaggccggatccggggagcgcggggccagagccccaggccggatccggggagcgcggggccagcctggcggtggttttgcccgaggagcgggctcccacgcgcgagtcaggcttcctccaccaggcgcccagacctcgatgcccatgaacgctcagagtgggtccttagaaccgcatttcaacacatcttacagggctccgccaacacacacacagaacatgctccaagcagtgcccgagcgcacagggcaagcccgggagcaacccagagctgggggaggagaaaaggggactccgggagggacggggaagtagttagacaatagtcaggggaggttattcccgggacaaaaagcacctggcaaagcgcgccgaggtcagtcccttcgaatctccacatttctgacaatggcttcccagggaatttgtttaaacacccaagtggcagacagcaacaaacccgcaccacaagcaacagagtgccgtcacgggagtcgtaactactttttctttctctcttccccactagcccggcgcaggccacgcgagacgccgaagccagcaggtccccacactctccggctagaccgtgccagcctgagccccgagcaagcttcggagaggaacaatgggtgccccgcgtcccacctggcacgaactctggggacagccctccctctaccctgtgttccccacccccggacagagagagctccccacgatccttgtccccagccctagcggggacctggctcacccctcgtgagcccaggactccaggcgttcgtcggggacgccccccggccactcacctgcggagaactggccttgggccgatcccaggagaggccaaggagagaggagcaagagcgccacaaaagcaggcagcgccgccgccgcagtcgtatccatgccgagtttgggagaagtttcaagcagctttgcaaagagctgccggggggatcgccgcgaaatccacgacggaggagcgggccgggcctcgcggggtgaggacggtgagaggacagccgcccgcccgccctttttccttcttcgcggtcgccaaactacctcaggggcgaaagcgtcgccagcgtcgccggccggccgcggcggcagctctccatgctcggcggaggctgctcctgttagtcaagagttactttgctcggggagggacgggggcggagccgggggtgacgtcgccccgcgggctccgggcgcttctgaggaatgcgggctcgggcgcggcgccgccaccgcctcctgccggagagacgcgcgccagccccggccgcgcgccccgcgccgcctttgttcgcagcctgggccccgccgccagccgctgctcggagggagcgagcgagaaaggggagccggcgcagctcgctgccctgttccagaactcagaatttgagaggcgagagttcggtaagccgtgcgaccagacgaccgaggacgcgcgcagagaaacccccgccgtccgaggagaggcgtcctggggttccgtcccaaggtggaggtccccccgagcggttgctgattgaaaggggagtgtggaagcgccctgaggaaacacccgcctgccttgaaaactccccgttccttattcttgtaataaggaataagacaccccacccccatcgaaaacttgtcccttattcatagaataaataaaacttgaaccagaataaacgatcagtaactttccagcgtgaacagctggcgtgtctcctttctggtttatttgtcattggccaagtatttggatttactctgcttcactgactttgcttgttgctctgaaaccctccggcccctttccagttctcacctaagaactgcatcagggcttattatcccttccttgcacctaggtctggtgtgtgtgtggttttgttttttttaatatctagtaggtagttaagacataagtatttaacaaaaggacttttacactgaccatgaaaacagcttcttcggaatgattcatctggcagaaaataatgctatattatgacagtaaaatatttcacagttaactacttcagcagcttgaagtggtttcgccatatgccaccctgccttacttctgtggtaagactgtatggtgcatactttattcatttttgtaaaatgtcacaaaaaataggtatggtcacaattgaataacataataactttgattcagaatttttatgtgttatgtacaattgctaaaacaatagtctgttgattgacatctctcagtttctcagacatcttagcctttgtaaatcaagacaatgtgaaattcattttaatataacattcacataatttaccaagccacatattcttttaatcaaatatatgctattaatgaccagacttatgacagagcctgtggaaacaaaaatgtaataaatatacacacaaatatatacatatataaatacatattatacacacatacatatcaggcagaaaagacttttaaaaattctatgagaatagtagcctgctcattagcacactgactagctcaacccttgtcaattcagttcagcatagttaagttcatccttccttagggtgcaatgtagattttttttttttaactcattaacctatacctttcaacacaccatcaccattccatttctttaattagagaacattcctagatcccaggtaacaaaaaactgagggacatatttttctttttgaggacagcagaacttcctaaaatttagcagcaatttttcccagtaaaaacaaacaaaaccctactgtctgtatactaattcatctgttctactcttgtaagaaatgtaaaagaagttcatgacgtggtaatttgtttgtttaaacacacaaacaaaaaacttctttaaatattttcacacagtgccaggacaaagtgcacacaattcttaccttgcccattttgggggacagctgatagaagattcatttcatgaaactttattaatttctctatcatggaagtaataataatagcaggtaatgtttagaaagttcttcaaatgttctaggcactgtcttagagtatacaatgtcacactgagacatcaagattttcagtgtttcattgagttcagtcaacaattccgtgaagactttggtacaattattcccatttgacaaataagaaaacaaggttatagattaagtaacttacccaaagacacatacttaagtgagaagtgggggaggcgatgcaaag

SEQ ID NO: 585678 - DNA, 4001 bp, Homo sapiens
ggagaacagctataaatgtgaggctctggggagcagagggaggcctgaaaggcgggccttctcgctcagggccccaactcgctggctgtgggagcccttccaaaagatgtgtcatgagaactaagctaattatccacgtaattctcacactggggttggggccatcgccaggggaaagcacaggttatctcaagaacgcagccagataggaggctggggagacttggacgggccaccttctgcttcagtaacttggccccaagctttcaggaggtctctgcttagaggaggactgcagaaaagaaggctgctgggccactgtcccaatgttccgagctacaggtggtcacccatggaggggggtgggacctgctcggaagtcctccagtcttcccgccccttctcccctcccggccctcccaggcggcccctctcctcggcctgccccctccaccccgcaattcttcccgtctcaattccagtccctctctcttgcgtcctcccggcttccaccccctcagcctggcctccaaaagaaagatcgggcagagcggtaggaaaagggaagccaccgcggtttctgaaaacaagaattcccgcgagccaggacggtcacgaggccggggaggaggcggcgcagctgatcaaacgcgaatggggaccagccctggcgggggtgcgggggggccctggctgtccgcggcagccgcgggcggggcggccgctccgaggagggacggaagggctgcgtggcacctcgcgctcgaagaccaggggcgcgccctccgcggggagaactcggggcggcggccagacccgacgcgacccccggctcggaccctgcagttaactgctcccagacgctttcccagtgcgcccgcccgccggccctcgggaggtaccgggcagggggctagggccgggccgaccctgtgagccgctcagccccgggcgcccccgccctcctcggaagtgactcgtcctcagggagagtccggcgcccgccctgccggcctcggcccctttcccgccccatttggctcctccgccgggggcgcccccaggctgggcaggctggctccccgtccccctaaccccgccgcccgggcacccctcgtctgcgggcgcggggtccaagtgtcccctgtccagggcgggcagaaaggagaagtcgcaatctcggttgaagtctcttccccgcctccttcgtgcacttcaaggctgcctcggccccgcgcccctcccgcgtccccggccccgcaccttgccgcagcggcccctgcgccagttcggaccggtcctcgggaaaggcgtcgcgcaggcgctgccacaggcggcccaggtccgccaggctgcggtgcaggtagagcacgctgcggtccgaccactccgtgcggatctcgaagaactcctcttcgtcgccgcgccggctgacgatgagcctgcggatgccgttcacccagcagccgcgcacgaacatgttcacgagcgacgtgccctcaaacaccgccgaggccatgtcgcacgcatgcccccgccaagggctccccagccccgccgcccgcccgcccgcaggaggcgcgccccggccggggtcgtcccgggtctgtccgtggccggggtcgtccggggtcggcccgtcactccaaggaggctgcgtatggcccgcgttcggggcagcggggcggcgcggcggcgagtggctcgggccggccgggcgcggctttataaggcgcttcccatcgcgggcggcgcggtagtcgacgtcgaggttaggccgcgtccgcctcccgcccgcctcccgcggaacgggcgccgcgggccgctctggaaaggaagaggtccggctggccgcgcccccgccgcctccgcagagaccgcgctgccgcggccacgagaacccccggagccgggagccgggccgagtcccaagcgctcgcccccgcctcgcgccccccgcgcctcctccctcgcggccccggagccgcaggtcggtgactggaccagccgggaagggaggcggggcgggccctgcttgccaggcgctcggcgcagacttttttctctttccgtttcgcgatcctcgggacctcccagggctaggagctgcgcgccccacccggcccgcgaggggatggcaactacccggggtccggaggcggggctgcgagtgtcggggcggggggcgcgggccgggtcgagcaccgccccgacgagggcccaggccagtccggcccgccccgggttccctccgtgcctcaggtcccctccgtgccccgcgtcctcccgcgcattccggtcatgcctcagccgcgccaaggcctgggacacggccggacagaccgcggggcagccctcggagaagtgggaagaggggagaaaacagtggcgaaaagaaggtctcctgggaaggagcgccctgggaagctggacgcggtgggtgctcttgaggggcctcaggagtggacttggggaaaccgcccgccctgaaaactgactcagcggcgcgttactgaggccgttcctagttggaagagaattaatagcacttgtttgagaattacaagttagttccagaaatgaatcgagtgacctcacagcccgtaggcaggggtgggagagccagggtgagcccctcacctcaccccgcccccgccccggcagcgctctggaaagcctcaaagcccagcgctgcgcggaaatgttagaggcccaaggcaggtggcctgtctggactcagacccgacccagatgtccccccaggtccctaccactcagtcccacctgcctcgactcagtcccgacccagatgaccaccccccccccgcccccaccacgaccaacttttattccgactgcgccagtgacttgcagatagcatagcttcaaatttcctcacctggtctggggcggtgaacaggtcaagatggagagtgtcaagagagacttttgctttgtctatgatgtttttatatacacttgctaattaaatgaacgcatatgtttcctgtgtaattttgtataggggaataggggccgtgggaactggaagtaaacagccagtgtgccagcagctcttgactctaggtggtgggaataagtgccgttgtaaccacagtaccagcccaaacggggcttactctgtttgtaacaatgttgagttaccttgcaggtataacagagccaaaaactcttaagtcacaaagcccaggcatgcaccatagaaaaagatttgatctctaacaaacatccagaaccaactattcgtctccttggaacgaagaagactgggacatgactggaacccgaacattcgaactctcagaagggaagggtctcttggcccagaagataggggctaaaatccacctcaacataccgtaccataaatggccaaatttgaaggccttcaaacagatcctgcccagccaacatttctaagtcctttcctttgccctctgcttccttagaacttgccccagaccccaaatcagggaggaagatttgaacctgcctcctgtctccttgctggctggtcttgcaataaagtctttcttttctcaaaggcagtaccatggtattgcttccgtgtacattgagcagtgagcctgaggcaggaaaatagggtcaggaggcagggaacataaggccaattcacacttcggctgtaacaggaaatatccactccatagggcgtatgctgtaagtgactttgtaactttacttcatcctctgcatttacgtagagggtaagtgaagtaaacaatggaatcatctaggggatatttaaacttccaaaaattctgtaacggggcctttgagcccctatgttcgggccgctcccacactgtggaatgtaatttcgttttcaataaatcccttcattccttccttgctttgtttgtgcgttttgtccaattctttgttcaagatgccaagaacctggacatcctccaccggtgacaagcccatttgcttaataagattattattttcttctc

SEQ ID NO: 585679 - DNA, 4001 bp, Homo sapiens
ttccaaaatgaaagtgtttaaaaaataataataagactcggtagttagcctgattctccaaacttcaggccagatttttgtataccacaaatctgcagccagtgcagtggctcatgcctgtaatccccaaacttagggaggcagaagcaggaggatagcttgagcctaggagttcaagacctgcctgggcaacagaataagaactccattctccacaaaaagaaaaaaaaaaaaaaaaagaaagacaatatacaaatctacgggaaggaatctttccagaaaggaagaatttgtttcaagaactgttttgcaggaatatcagaaggttttttatttttctttgactcaaaggctgtaacactgtactttataaaaatggaaataaaggcattagtttgaacaatcctctatgctgctactgttgtaaagtttggagcctataactcactcaaattggtttatagccatgtgtttactaaatcttttttcatattccttttctccaggcatacaggaatttatatctcacagccttcttagagtcagtcaggttgagcctggtgactagttcaggacagtgaaacgtcagcagaagtgaaaaggccactcacttctggcagaggcaaaggagagcccttacaggattctccaatctagctcttctgccagcccggaagtgctgggagggcagagccactgacgcaagcagcagggaagctgagtcaccatggggacgtgagactgacttacagatgacgagtgcagcctcacagcctagtccatgttgagataaacacaatacagtcctgcatactttatagtcataaacgagggagaatagaaatggaaaatgaccctctaggcctctaagaccaaattataatgaaaaaatttatgtcttcagttttgaaaattaaattttttgaccctgataaaacaaatttgctatacaagtatccgttaaccgtgtgaaacctactgagtcaaactattttcttacattccttccacttcaacaccaattctaatccaattccaaattagttttcagagagtctcttgtaaggaaaaggagaatcgacttcgaattttaaaatttgtgctattattagtttatagagctttcaacaatttacaaatagtttgcataatcagtatatttaattagtatatatagacatatatatatatatttgagagggaacttcactgcaacctcccagttgcctcctgggttcaagtgattctcctgcctcagcctcccaaacagctagggttataggcgcccaccaccacgcccggctaatttttgtatttttagcagagacagggtttcatcatgttggccaggctggtctggaatgcccaacctcaggtgatctgcccgcctcggcctcccaaagtgcaaggattacaggcgtgagccaccaagcccggcctagtgtaatttttaaaagtacaaaagccactagaaaccgtgacaataagaacttccttttgggttttccagcatttggttcataggacatggaccatatatagatgttttttgaatgctgaaatcttttactcataacacagttttcccagtaacttgcttccggttgatttaaaatttgtaatacacctttgtaatagcaggtaccttcatgaaactcagtatttgagaaaaatgtggagtttttccccctttcttttggccagaatgtatatccagggtagtgactttcgagcaaatgcgtttaagcaactccagtattcttactacgctacctccaacctcgctccacgcatggggagatcagggttccacattttcgggtaagcattagccgtcctggcgctgcacgagcgtattctacaattccgaaaactactaacttttccgtctgcaacctttaataattgagagggtatgcgcaactcagaaaagtgcgcccgctgaggttgggtgcagagtggactggaggaaaggcgacacccatttacggtgcggccccggacggggtccccagacacggccttcccggcgtgccacgcgcggaggggactcttaacgtgaagcgctgggtgactcagccgcgtggccgcgcggtccggggcggggggcgcgcgccgctgcggcacagccggtcccggctgcggcttctggctgcgcggcctgcgcgcgcctcccgggcggattccagccccgagcgggacagcgcggcggggagcgacgagtaagtggcggcgcggtacggtttcgggcgcgaagaccgggcagggagagtgtggcggcgggcgtggcccgagtcttccctttgtggccgagggggcgtctcctccggacgcggcggcggttcggacccccgagtcgaaaggccgcggggctgagctgggcgcgaggaacctgtgggcagcggcttgatgggctcctgtttccgcgcggagggcagagtctggtgatcctggggagggaggcgacgctgcgcccaggtggtgggcacagctgaagtgtaacttgactgcttgactgctttttgcaggcctcgggtggttcatcccgccggagaggaatggcgagaacctggagtgttgactggcaaaacatttgcagacgcggtttttctggcaattaattggctccattaaaaattaggtagttggtggggacttcctcctgaactctggagccgagcgcattttgctcggtcttttcagccctgtttccgcgtcttccttccctgccacccgcaaattgccagctttcatccgtggctctgagtgcaaaagagctggggaaagccttaaccagcaattttcttttaaataaaactttgctttttatagcagtgtcttcaggtttagaagcccagttctgcactatgagaaaactcttctattttggagtttgtgattctttctgaaaattcctcagttgaagagatttatttttaaataagaatctagtgaacaaactaacatgataaacaaggctgtgaaggaactgtttaaccagcttatgaaaatatgtcccagagtccttagttttgttcctgttcgctgtgcgagaagttgaggtagttttttaatggtcttcaaaacaaagtgttgtagtagtgtctgtcggatgtgatgaatccagagtcagaggacttccgctcaaggcccccacctgaaaccccaattcctaggccatagttctgaaacagaagattgttccttagtaataaggttgcagtaccctagcacctcttccataaatttgattctagagatttgtgatgggtccctgagtctgggatttaagcaagcacctgcactcttggtctgttactgatgatccagggaccgaccacacgttgacagacaccacctttaggctgggctgggaattttaaaaactgcccaacagccttaaccctttgtcgatgttttcctcccctgccctaaaccagtcgtaggacaagaagccctgactctccagaagccaatatgagaaaagatagtgctttttttgaccctgacacggggtaggaaatgattttcatgcatattccgatattgctctgatggtttagagatagcccattaatcttttccttctgagggctgcttctagtatcatcagagcttaatgccattaggccaaatctcctccgcccagctcactcaagtctccccatggaaccagggcagccaatgccatataattcccatggccttgactgtcatattatctggtatgtagcagtactagtagcattatgagggctttcagttcagctggacgttaatttagtcatcaaatacctgcgtaatgcctattttcctcaaagcactgtagtaggctgttttatcaacagcattgcaatatagacacatatttctggcacagagttgcattcctcctttgaggcagaaatgagggctggataaactccactgctgccaaaaggttctctttattcatccacaatttgttccttcctgttatgccagaaatacacgtactattc

SEQ ID NO: 585680 - DNA, 4001 bp, Homo sapiens
ttttctttaaccattttttatcatggaaacatttccggccttttgttctctagtgacattccaactccccaagcttcaaactcctgttccccgactctatttttaaaatctcgaaattcttgcgaaaaatctaaactccattgttcatctcttcaacctgtagttttcagtttcctttacacagtcctccggtggtgcctctaagcaggaaaaaaaaacaaacaaactcctggccagtcgattttcgaaacagactttttttgtggtcttttttttctctaggcgtccacagaaacccacagctactagaaattaatacttcaggtactgctatgagaacttcttaaggaaattccaaagttggtcaacattaatcttcttgtcattcttcactccccacagcgctccatacagctttttggaaactttggctcaattttatttcgccctttccaaacgtctcgaaaccctgtcctacaaactcaggcggctgcgtccccgggagcaaaccctccgcccaagttcttctaactcaggctgcgctccgatctgtcatcgcgttatttcgcactccaccccccccccccccacccccgaaaagtgaagttcaactccctaacagttctcgcttccccaaacaaaagggaaaaaagtgcttttcgccgtcacttagtcctccttgtcggctacgccagcataatttcggtctcctacggaatttctttaaactaacgagccccacactgacttccacttagtattgaacagctgcaccaactccccaaccacgaaaccccgctttagtcctcacgggaggggagagctcccgaacgcggggcggtgggggtccgcgcagagcaggctcgggaggccgagcggaggagcggggcccgcgccgggcacacgcgtcctccaggccggcggcgcggcgtgggcctgctctcgggagggctcggcgaggaccaccgagtccgcgcagcccccgccgacctctcggaaatgtgaccgccgaagctagaggggccgcagggctcaccccgcagccctccgcaacgcgccaacttggacgccagcggcgcggggtcccggccgggcagggggcgtccggcaccggcgggtccaccccggcccgcccgcccgccgcaagcccggcccggcacctcctttgtgcgccctcctggcctcccagtccccccggcgctcggtcccgcccggccgtgaccttcccgccctccccaccatcccaagcggggaaaggggccgccccggcgggggtcgggccggggccggggccctggagacgctcaccttcgtccagcagccgctcgaggtggttgaagatcccgcagaagttgggcaggctgctcatgagcttcttgtcgttcatcagctgcatcaggtaatctggggtgggcttcggcttctccttcgtttccatttccccgaccatattccaggctccgcagctcactccgcccgccgccgccgccgccgccgccggagaggagggaggggcgggggcgagccccggccgcgggccgctcgggacccggcgtcccgctccgcgccggctcccgctctggctcccgcgccgagccccggggcggccggcaccgcgcgctcgcccgccccccgcaggcactttccgcccgggcccgacgcgctcccagccgccgccgctctcggccgcccggctcggcgcgtccctcacgaggccggcgggcgggcgggaggcgggtctcggctggccgagtgcgggcgcggggcgcgggctgctggcgccggacgaggaggagccggggccgccgctcgctcggctggtcgagcccgctcagcgccgccgccgcctgtgccgcgggctcggggggtctctctgggctggtccccgccgcggcgcctctgccgctgccgccgcgctccgactgcgctcctcctcttcctcctcctccttctcctcctcctcctcctcactcacttggcggcggagttcgcctcagttcaggcggcgctgccagcggcggcggcagcagcggcggcggcggggggaggggcagcggcgcggggagggccgggggcgggcggcgggcggggccgcgcagggcggccgttagcgggtcccggccggcgcgctcccgctgcctgctgcccgccgccccgcgaccggggcagccgccggcgccgcgccccctcctccctgcctccccggcggggcgggcgacgggggcaacgggagtgtgacggactgcggcgctcggcgggcctgggcgcaaggactgggtcgccgccgtgcggggcgcccggggcgggtgggtgtgggctgcggggccgacggccgcggggggggcgcggggctttccacggcacggggcgggtggggctgcgggcgcggtcggggctggcgcggcaggcgagaggaattccagcgggacgcgccagcgctgcctccgcctcgcctcccgttactatagttttttcagaacctcttatccaccccgcagaagagaaatttttttttaacgtcctgttgcttcacgggggactttcggggtgggcatcacgtggcccgacacgtagccgtggggctccagagcgcgtgcgcgcgtcgagcccggtcgccacgccccttccgagggtcgctccgcccccgtcgggccccgcgagcgcgcggtgggggaggggagggccccggagcgcgcctgcgtggggcgggggcggcagccgactaggggctgggtctggccgtttagggccgggtcttggcccgtcgcccacggtgcggagggctggtgggctttccttggccgtcgggcccgccacggcgcgggtcttggctgcggggcggaggtggggcgggagagccgaggataagagtttgaggcttttcgaggcgcgtgccgcggcgtccgcctctgcgggactctgcgccgggcgccctcggccggcgcgcccggctcccgctttgtcgccgagggaagcacgcgcgacgcccctcccgtcgccgccgtggcttctttcggtgttcgtgatttgctgagaggctggaaagcagcacggcggagaggagccttgcactcgccaggcgggaagcctgcgcggacacgcgtgcgcacccacggggcggcgggcgggcgtggggggtccgggccacgcgggcgacgcgcctctagggaagcgatcttgttgcaccttcccgttattctgaaagcaaatcgtagccagacccgagcgcagcggcttagcaaataataaggggagcgtcagtcgtgctcgaaatgcttccttcgcgatggcgtcagtgttccgtgagggaatgaagccgcagtaggaaataaagaggctgtgcgcgtagtctgaaaagcagaagtcaacatttttacagatgaagaaagaatacggaggcaagaggtctttctctgcagtttggtggatttccaacatttagacttgtttggaagaatttcctcagctgcaccaatgaagtccttgatctatagaagtcggcagtccctaaatctacgtctgcattttgttgcaaatcctttataacattccattaaaataatgcagagttatttaatatccagttggccatcgtgagagtaattcgcggctgagattttgttaatcattctgtcttctgacttaacagtgaacgtaggtgattttttttgtaaaatgttgcttcacatgaattgtgagaatcacctctaagtttgaattgtactgaaggcactataagaatttcaaatgaacgctgagtagccagtagccttctggccttttcgtttaacaagcacagagttcgtttttaaaattaagttactttgacagaggaaatgtaatagccttggtagacaacattaaaaatgtaactgtcagatgttttaaagtctccaacagccgtatctgttttagagccatagaatatttacttactgaattgcctgtttaaagatgaactttctaaatgcagggaatagtaacttgcaaaaaagctatgg

SEQ ID NO: 585681 - DNA, 4001 bp, Homo sapiens
actggccatccaaccttggactgatgccacctttgtgactgatccttgtggccaaggataactgattcaaaataatttaagtaatccttctcattctgtctttaaaaacatcccttgcctcaaccttcttgaataggcacatagtttacaatattacacatattcccattgcattgctactccaaaataaatattttctttagagtctctttctgttacttagattgacagtggaaaaggcagaaaaaggaaataacatatttttataggttgtatttaattttaaaacaagttttgggtgttgtctgtttatttatttttattttatttatttattttttgagacggagtcttgctctgccgcccaggctggagtgcagtggcgtgatcttggctcactgcaagctccgcctcccgggttcacgccattctcctgcctcagcctcccgagtagctgggactacaggcgcccgccactacgcccggctaattttttgtatatttagtagaaatggggtttcaccgtgttagccaggatggtctcgatctcctgacctcgtgatccacccgcctcggcctcccaaagtgctgggattacaggcgtgagccaccgcgccgggcatatttattttttaaagaacaaatttgattcgacgcaatttaaaatgataacataataatgtattttgggggaagaactattatttaaagcctgtggatttcaatttctcattatatattacagctatctataattataattccacgctgccagctgggaaacaaacaaaacgacaacttctagggtggaataaaaaggaagatggaaggcagtttaggtcatcagcgcctacttcttaccagaaatcacctggagcctccattaaaccatactcccgaacttaccacacagctctaattaagtctagagtggggcatagttttagtttcaacaggtgctttatgtgactctgatagcaatgggcctgcagacagttctaaggttgagtgacgtgaaccaggaagcaaaaagacccgaattaaagctataacagcagaaataacgtaagagggcagattccagccatatctgcaagatagaatgaagagggcttagtgatttattggatatgaaagatgaggaagaatctaaaggcaaatgagataatagttgtgccattaaaaagagtctattaagaattcagaaataccagagcttttttaagacgggggttgagaggtaagtcctgttacaatgattacttcaacaccgattaaagtgaatttgagggtgcttatgtgacatttagaagaactgcccagaaagcattcacaaatacagtctagaattcaaacacgacgtccaggacatggagacacgggttaggaaatcactggtatcttagtggtaggtaaatcctagagaacgaattctttgaaaaaagccaaaaattactcatttgaattttgcaaactacagtttcgccgggcttcttagcgacaactgcagctaagtgtcggggacagaagagagactgaagtggccccgcaagccccctttggcaaagcccactccgagaccatccggatcccgacctacaccagagcaaatgtctaatggtgagaagccgcttcaccaccctacagatccgcggtgcagagatttccctgctaaggtcctaactcctgaatgggtacggcgagtacacccgaagaatcgaaaggtacttatcccccactcagttctagaggaagcagcgaggtgggccaagatgcgtggtaaggcccagggactctttgtcaacgaagtccgttaaactttccgccctcccgggggcctcagcgggccaattccactcacttctcggaggctccggcccagcatggtcctcgtgcccagcctgccaccacaggagccaggcaagggggaaaaagaggtcaccggtcgctagtgatgttacatgggcgcagccatctttaattgtcactgagcccttcaacaccgagtacttggattggttgaattgcagcccgaggaaatgatctttgtaggcgattggttggcgccgcaaagccatcccggcggctaaggagagcgggcaggcaaggagattccgggccagggtcgcggcggcagtcggcaagcgttcgattctctggcgttggatcgcgagcggtgtctgcttgtcccgccgagggctcccaggacagggcagggatctagggggtttgcgcacctgctttttaatgccccgcccccccttttttttttaaagtggagggggtgaaagtgagggaggagaatggacagaatactgactggaacgttaattcgagcatttcatatgcgaagagcggaataacagttccgtattcttctttcagtttctccattagattagcttcattttcgaatgctccgttttgcatgcttaattttgaaactagcccgtggtttggcagaatttgactgaattcaggggtgagagtttgatccagtccaagtgtatttgaatttgagcacgcagttcaaccagtgtttacaatggaatttctgaagacttgtgtacttagaagaaatgcatgcactgcggtttgcttctggagaagcaaagttgtccaaaagccttcagttagaaggattagtactacctctcctaggagcactgtcatgcctgcttgggtgatagataaatatgggaagaatgaagtgcttcgattcactcagaacatgatgatgcctatcatacactatccaaatgaagtcattgtcaaagttcacgctgccagtgtaaatcctatagacgttaatatgagaagtaagttttcaaaagacattgttaccttttttaaaaaaatcactttcataaggtatgccgttttaaaaaattgactacgcttctttggtttacataaatgaatcatttaggtttttaacaatacctctgcaaatatttccaaaatttttgaaattgcaatggccagggaatccttctggccatttgtattgacaaaatataagcttgattgttttcatgcgtccttaaatatgtaagttcagacttgagaactgtgtctgtagctaacttttttttttttgagactgagtctcactctgtcacccaggctagagtgcggtggcctgatctcagctcactgcaacctccgcatcctgggttcaagcaatttctcctgcctcagcctcccgagtagctgggattacaggcgcatgccaccacaccgggctaattttttgtatttttagtagagatggggtttcactatgttggtcaggctggtctcgaactcctgacctcaggcgatcctctgcctccgccccctaagtgctgggattacagacgagccattgcgccctgcctatgtttgtagctaaatttctgtccagggaactttgtggtattctgagatccgtcacaggcttcggaagtatagttgtttcctagtcagtttagaatttatggggttttttgtttgtttttgagacagagtctcactctatcggcaggctggagtgcaagggcgctttcctggctcactgcaacctccgccttccgggttcaagcgattctcctgcttcagcctcccaagtagctgggactacagacatgcgccgccacacccagctaatttttgtatttttatagaaacgggagtttcactgtgttggtgggaggctgaggcaggagaatcgcttgaatccggaaggcggaggttgcagtgagccaagaacgcgcccttgcactccagcctgccgatagagtgagactccatctcaaaaaaaaaaaaaaaaaaaaaaaaaaaagcattgaaatgactttactgtgattgtctcatgaagtctacgtttgtattctttgttttgaagtagtaattgctactaccagttgggcatgccgttttcctttattctttttatattaggcttgaagagaattcagttttttataagatatgtcttttagtggtaagttttactcaat

SEQ ID NO: 585682 - DNA, 4001 bp, Homo sapiens
aatgacacagatactccagaaaacagtttaacagttttttaaaagttaaacatacatttaccatatgaccctgcaatccactcctagcaataccctagagaaatgaaaacatgtccatgcaaaaacctgtacatggtatttatagcagattgattcataatcacagaaaactgaaaacaacctcaatgtccttccatgggcagatgttgaaacagactgtggcatatccacataataaaatagtactcagcaataaaaaaagaaattatccatacatgaaacaacttggagaaatcttaaaggcattatgctgagtgaaaaaaagctaacatcgaaagattactaactgttatgatttcatttctagaaaagattagtaattgccaggggtaaggagtatgatataatgggatcacattaggttttttttctgtggcgggggagcgatagatttgttctacatccttactgtagtggtggttacatgagtctaaaattcgcagaactgtacatcgaaaaaaaatcaattttaccatacactttttaaaataataaattaatttccttaaaataaatttaaagaaaaaagccaaattaaattttaacaggcagtcggactcttgcttttcagaaactatagacttaaagcactagatcaaaacaattacgttcctagaaataagcatacttctgagtacaattaaaaacctcgacaataatactttatataaataccctttccccaaaacttttaacattttgctaatgcggtctaataaattagagaagcaaagggtgagttaactcactaatcaaaaggttgttttctcataacagcctttatttaagtagaagtacaggttatatttgtaaaaatactgaaaaacttcttagggtcaatgaaattacctagatgttaggagatacataaaaacctagagaagttaacagcccttttcagaccctactgccacttcactagctcctgataatgaagttcttactctcacacgctctcaggttcttactcctgggaactgccgatggctcctcggatctccgagtaaagttaattctgtagcaaccagtgtcaatggaacagcacaatttggctcattcatattccagcactctatgaacaagaaactagggaagggtggggtcgcgggtaaagagtggtcgcactgcagggaggagtctaaatgccagggtggagctgaggactctcttcgccatcaaacctaacctgagcacttcacgcccttactggtgtctggcccagcccgggtcgccccttccccagtcgggacttggggcaggcaaaaagccgaacgttcggccagactggggacgcagcgccgccctcgctccacccctctttcccgcccaccaggcaattccaggtacccaccgctgggagctgggagggggcgccgggctggcgctgccgcccaccttctctagctggaacttgggatcggtgctcagggaggggagagccggcgctcggcggtccgaaccgggggatgggggagccgggccgggaggcccctgccctcgatacccctgcccactccggagagtaaggcacaacccgggaccccggggagaagctgagtcttccccagtggagccggacgaacccccagcccctggagagggcgagtgagtgcagcgccgctgcaccgcagcgcgagccgctactcaccgtcccccaccggccgcggacccgccgcccggcgccaccggctcctcctggtcgcggcgcaaccgctgccgccgctgtctcctcccgacgcgccagctctccctgcggggccgagcggctagttcgcaccctctttcgctctcttaagaatgattatgatttttaaacgaactttattagtagccagggctcagattgagtggctcagcagcagctccgccgggggtggtggggcgcgggagtctcgactcccctcatctgtggacccgccgcgctgcggagcatgcgccgtgcttcgtctgcgcatgctctgtgcggacccgcggccctgccccgcccctgttctggcgggtggctggcggcggctcagctttccaggcgcctccaagggagcccgggagggcagtggggagatcagagacgagcaggatctcctagatcgtgaactctagaaaagagaaatcggccaatgacggtccgcatgagtttcgcctacagagttatcacacttccagtgtcctcaaagggcttgccccgcttcggacacctaccttattttcttgaccagatgacatcttaagtggccaagtgagcaaaaaaatgtcgagcaaagtcgaaaacgcactcacacagcctgcaggacaaaatagaagcctgagatggttaattattcagagaagcgaaccaaaaacgaaaaggttccgcaaaagcaatctcaactttgcttcagttgtttttatatttcaaaataaaatagaatagaaaaaaaagatggaaaataccaagtgttggccaggatgtagagtaactgcattcttctactttgctgctggaatgtaaactggaacaactcctttgaaaaacagtttgggactgtctgcaaaaggtgcataccctatggccccgcagttccacgcctgcatatagagcaaagagaaacgaatacttagggtgcacggacaggcaggtatcagaatgttcgtagctgcatttattgtaataattccttaatgagaataacccaaaagaccatcaacaatagaataaattaatgaaattacacagagttcatataatgaaacactatacagcaacgcaaaaaagcatctgcaattacaggcaataacgtgaatcaactggggaaacctaatgcccagcataaaaagacaacaaaagtacacatggcataagtccatttctataaactacaaaaacagaagaactaagaggctcaaagttagcataatggttaccttggtgggcaggggatagtgactggaaggagttagcgactagaagaggggcttccagttagcaactggaagaggggcttccttctagtgaggttctctccgttgattttggcgctagttataaatgcgtgtccatttgtgaaaattcaagctgtactcttatgcacatttttctgtatgtgaattataattcacacttaataattttaaaaattagtggagattattttacctataatagcaatagtatttgtaagaaatttaatatcaagtagctaacagatttatctctaggatttggttggcagtatctcttaaacttgagtaacgtactgatgccctttctgagaaaagaaaaaaaacaattaaaaagttggcaaatgacttgaatagacatttctccaaagaaggtatacaaatggccgatgagcacatgaaaagagactcaaggtcactaatcatgagggaaatgcaactcaaaaccatgagatacaacttcacactcattaaaatgatgattataaacaaagcagaacagaaaataaatatgagtgttggcaaggatgtggaaaaattataacctttgtgtgctgctggtgggaatgtaaaatggtacggccactatggaaaattgtatggttcatcagaacattaaaaatagaattatcgtatgattaaataattccacttctgagtatatattcaaaagaattgaaaacagggactcaaaaaaaaatttgtacaaccatgtttatagcagcattattcacaatagccaaagggtggaagcaacccaaatgtccatcaatggatgaatggatgaacaaaatgtagtatatacatgcaataaaatattattcagccttaaaaaaggagggacccaggtgtggcgaggtatccctgtaatcccagctacttaggaggctgagatgggaggatcacttgaatccaggagttcaagaccagcctgggcaaatcctgtctcaaaaataaaagagagagagggaaattctgacacatgttatagcatggatgaagct

SEQ ID NO: 585683 - DNA, 4001 bp, Homo sapiens
ccacaagctgattctaaactttatacacaaaggtaaaagaatcagaatagctaaaacaattttgaaaaagaataaaactggaggaaattatactacctggttttaagacattataatgctaaattaacaaagtgtaatactggcaaagggaaagctaagtaaatcagtggaacaaaacaggcccaaaatagaccctcacaaataaagacaattgatttttaacaaaggtgcaaaagcaattcaatggagagaagacagtcttttcaacaaatagtgacggaacaactggacatccatatgcaaaaaagtaaaccttcacaccttatacaattaactcaaatggatcacagatctaaatggaacacttttataaaacaatttttagaaggagaaaatcttgacctgttaggcagagtttttagacatgacaccagatgacccataaaaggaaaaactgatactggacttcaccaaaattaaaaacattgctgtctgaaagacactgttagaatgaagagaaagacagactggaagaaaatacctgaaaaacacgtatctaacatataatttgtatccaaaacatataaagagccttcaaaactcaacataagaaaacagcccaatttaaaaatgggcaagagactttgccagatacctcaccaacgactccatgtggcaaatgaacacatgaaaacatgtacatctttagccattagttaaaggcacattaaaaccacaaggagataccactacacacctattagaatggctaaatttaaaaaaactgacactatcaaatgctgggagtatgtggagcaactagaactctcacatgttgcttgtgggaatgcaaaatgacacagatactccagaaaacagtttaacagttttttaaaagttaaacatacatttaccatatgaccctgcaatccactcctagcaataccctagagaaatgaaaacatgtccatgcaaaaacctgtacatggtatttatagcagattgattcataatcacagaaaactgaaaacaacctcaatgtccttccatgggcagatgttgaaacagactgtggcatatccacataataaaatagtactcagcaataaaaaaagaaattatccatacatgaaacaacttggagaaatcttaaaggcattatgctgagtgaaaaaaagctaacatcgaaagattactaactgttatgatttcatttctagaaaagattagtaattgccaggggtaaggagtatgatataatgggatcacattaggttttttttctgtggcgggggagcgatagatttgttctacatccttactgtagtggtggttacatgagtctaaaattcgcagaactgtacatcgaaaaaaaatcaattttaccatacactttttaaaataataaattaatttccttaaaataaatttaaagaaaaaagccaaattaaattttaacaggcagtcggactcttgcttttcagaaactatagacttaaagcactagatcaaaacaattacgttcctagaaataagcatacttctgagtacaattaaaaacctcgacaataatactttatataaataccctttccccaaaacttttaacattttgctaatgcggtctaataaattagagaagcaaagggtgagttaactcactaatcaaaaggttgttttctcataacagcctttatttaagtagaagtacaggttatatttgtaaaaatactgaaaaacttcttagggtcaatgaaattacctagatgttaggagatacataaaaacctagagaagttaacagcccttttcagaccctactgccacttcactagctcctgataatgaagttcttactctcacacgctctcaggttcttactcctgggaactgccgatggctcctcggatctccgagtaaagttaattctgtagcaaccagtgtcaatggaacagcacaatttggctcattcatattccagcactctatgaacaagaaactagggaagggtggggtcgcgggtaaagagtggtcgcactgcagggaggagtctaaatgccagggtggagctgaggactctcttcgccatcaaacctaacctgagcacttcacgcccttactggtgtctggcccagcccgggtcgccccttccccagtcgggacttggggcaggcaaaaagccgaacgttcggccagactggggacgcagcgccgccctcgctccacccctctttcccgcccaccaggcaattccaggtacccaccgctgggagctgggagggggcgccgggctggcgctgccgcccaccttctctagctggaacttgggatcggtgctcagggaggggagagccggcgctcggcggtccgaaccgggggatgggggagccgggccgggaggcccctgccctcgatacccctgcccactccggagagtaaggcacaacccgggaccccggggagaagctgagtcttccccagtggagccggacgaacccccagcccctggagagggcgagtgagtgcagcgccgctgcaccgcagcgcgagccgctactcaccgtcccccaccggccgcggacccgccgcccggcgccaccggctcctcctggtcgcggcgcaaccgctgccgccgctgtctcctcccgacgcgccagctctccctgcggggccgagcggctagttcgcaccctctttcgctctcttaagaatgattatgatttttaaacgaactttattagtagccagggctcagattgagtggctcagcagcagctccgccgggggtggtggggcgcgggagtctcgactcccctcatctgtggacccgccgcgctgcggagcatgcgccgtgcttcgtctgcgcatgctctgtgcggacccgcggccctgccccgcccctgttctggcgggtggctggcggcggctcagctttccaggcgcctccaagggagcccgggagggcagtggggagatcagagacgagcaggatctcctagatcgtgaactctagaaaagagaaatcggccaatgacggtccgcatgagtttcgcctacagagttatcacacttccagtgtcctcaaagggcttgccccgcttcggacacctaccttattttcttgaccagatgacatcttaagtggccaagtgagcaaaaaaatgtcgagcaaagtcgaaaacgcactcacacagcctgcaggacaaaatagaagcctgagatggttaattattcagagaagcgaaccaaaaacgaaaaggttccgcaaaagcaatctcaactttgcttcagttgtttttatatttcaaaataaaatagaatagaaaaaaaagatggaaaataccaagtgttggccaggatgtagagtaactgcattcttctactttgctgctggaatgtaaactggaacaactcctttgaaaaacagtttgggactgtctgcaaaaggtgcataccctatggccccgcagttccacgcctgcatatagagcaaagagaaacgaatacttagggtgcacggacaggcaggtatcagaatgttcgtagctgcatttattgtaataattccttaatgagaataacccaaaagaccatcaacaatagaataaattaatgaaattacacagagttcatataatgaaacactatacagcaacgcaaaaaagcatctgcaattacaggcaataacgtgaatcaactggggaaacctaatgcccagcataaaaagacaacaaaagtacacatggcataagtccatttctataaactacaaaaacagaagaactaagaggctcaaagttagcataatggttaccttggtgggcaggggatagtgactggaaggagttagcgactagaagaggggcttccagttagcaactggaagaggggcttccttctagtgaggttctctccgttgattttggcgctagttataaatgcgtgtccatttgtgaaaattcaagctgtactcttatgcacatttttctgtatgtgaatta

SEQ ID NO: 585684 - DNA, 4001 bp, Homo sapiens
ttttggtttttggtaacaaaaaacaacaacaaaaagctgagtccctggctgattactccttttttctgagcaactgagttgcatacagttattctcctgtctgagggacagaaatgtgctcttaaatgaatgagttataggttacaattatttactactctttcttatgtaacaagctataaatgacaagagcactacctggcagacagacagtagacctgtgatccccccaaccactctgctaccagccaggtagctataccctccatgggcttcagtgtagggactgtagaatgaagggtggcctcaggtgtcctctaaccctaaaccagctcccattctaatgctgtactgcagactgtgcttcttaacacctgtaatgattgaacagagtaattttcgtactttttttttttttttctgagatagggtctcactctgttgaccaggctggagtacagcagtgagaacacagctcactgaagccttgacctctcctagggtcaagtgatcctcctgcctcaggctcctgagtagctgggactacaggcacgcacgaccacacttgtctaattttttgtatgtatgtatgtatatatgtatgtatgtattttgtagagacagggtctcactaacagcccaggctggtctcgaactcctgtgctcatgcgatcctccagtctaggccttccaaagtgctgggattacaggcgtgagccactggcacttggcttggtaccatttctatgaactttccaatagttaacatcatctttaaaacgcccactcccaaccaccacaccaggcaaagttcaagtgttcataaatcagagcagagggaaatgtaccccctcaaacagaacaaatgaaagcaaatggcagagaaacactgtattgaggagtggggggggggcgggggggggcgagggcaccagggatgggactaggtgttggtttagcaagagaggaaggggtgagtgtaaggtttcagaaaagctttcccaaatcttcacggagtgtctgtcctcggcttccgatgagagcaaagtatttgaggaatggagtttccctcacaaaggccagtctcagagccaaggcgggtggtggaaaatgatctggaaaggaacctggcttttggtcttggtggtgtcactaactaggagtgcagcttcgggttaagtcacccaatccctctgaacttgagttgaggctgagaggcgccggcccgctccaaagcagccttctcaactagtcctggtgtatgtatgatatacttgcattattcagagttcaaacttctggaaaaggccccctggcctcctcgcctcccttcaggagagcgagctctggcgtgcaggacctgctccaactcctactgcccatcccatcctctgggccccaccgagtccagccgaccgcgtccatcgcatctcgcccttggattgggcctctctcttctcctaaaggtacccaggcagacgagttcaggcagaaaagaaaaagaaaagaagcagagaggagccaggcggcccggcggggctctggagtgggaaactcgcggccgcgcttacccgcgatgtcccacagctgcaggcgcaccagagtcctgctgtcccagttgaggaccttgagggcgaagtccaccccgatggtggcccggtagtgctgggagaagagctggtggacgtagcgcttgatgatgctggtcttgcccacgccaagctcgccgatcaccagcaccttgaagaggtgctcgcgggtctcgggcgctggggcggcggccgcccccaggccggggtccccggctcctccgcccgccatgagcgctgcggctgtcgggcgcgcctcgactccgagtctggccccctgcccggcctcgcgctctgccgccgcgcccccggcggccgcggaaactcccccgaggccggccagccctccgccgcgcccgctgacgccgcctgaccggtcacaggacccagaacccgccagtgctcgcggcccgggcggggccagacgagggcagggccggacgagggcagggcctggcgccggcttggggaggaccctgcgcgaggcggctcccgccctgcgcctctgaagcccggccgggcccaactggacttcctctcccgggcggcgcctccgaagcccggccgggcccagctggacttcctctcccgggcggcgcctcctggcggtcgcggcgcggagggaggcccagacgcccgctggtgggcctccggggagccggcctggagcctttatgggccccggaggttcactgggggcctgaggaggcgccgaggtcgctgagccccccccggggccggggtcggcgtggggtccgggcccagcctggaagcctctggcctggaaatccacctcctgccctactctccccgcagggagagccacacttgcgggccttggcttgggtcgcgagcagtcccctttagatgggaaaggaagtggcaccgtgactttgaacttaacgaaggacggataacactgggctggtagttctgtttttaactttttgagtgaacctccgtagggttttccataatggctgttccagtccgcattcccaccaccagtgtacaaggttccctttgctccgcacatcaccgacacttattatcgcttatcttttttataacagtcatcctagcaggtgtgaggagatacctagtggcttttccctgttcattagtgattttgagcgccttttcttatacctgttggcaatttgtacttcctctggaaaaaaaaaaaaagtccattcacatcctttgcccgttagttaactgggtgttttatttatttattttggctgagttctgtgaacgtaatgtattttggatattaaccccttatcagatatatggctcacaaatattttctcccaatctataggctgttttttcattttgttgattatttcctatgcggtgcagaagcattttagttggatgaagtcccatttatctaggtttgctttggttgcctgggcttttggtgtgatattgcaaaaatcgttgctaaagccagtgacccagctatccctcttctgggtgtatactcaaaggaaatgaaatcaggatctcagaaatcgctctcaagttcatgcagcattattcacagttgcgaagatttggaaacaaccaaagtgtctgttaacgatgaatggataaagaaattgtaatacatacataggcatgcacgcgcgcatatacacagacgcacacacacacacaatggaatatcattcagcctttagaaggcgatcctgacatttgcaacaacatggataaacctggaggacattatgctaagcgaaataagccagacacaaaaagaaagatactgtgcaatatcacttatatgtggaatcttaaacacacacacacacacacacacacacacggaatacgtggaaacagtggtggttaccaggggcagggaagaaacggaatgatgcaggtcaaagtgtacaaagttgcagttatataggatgaatgagtcctaatgatctaatgtagcatgagcgttatagttaataatattgtattttaaactggaaatttgctaagagagtagactgtaagtgctgttaccattaaaaaaaaattgcagccaggtgtggtggcacccacctgtagtcccagctacccagaagactgaggtgggacgactacctgagcctgggaggtccaggcttcagtgagcttaatcgcaccactgtattccacctgggcgacagagtgagaccatctcaaaaaaaaaaaaaaaaaaaaagaaaagaaaaaatgaaaagaaaaaattgtgtaactatgtgagatgatggacatgttaatttgttaatttgcttaactctagtaactatttcactatgtatatcaaagcatcatgccgtataccttagatatagatatatatatatatacacacacacacaacaaaatagtctattaaaaaccttatcatgctttagcatttaa

SEQ ID NO: 585685 - DNA, 4001 bp, Homo sapiens
tgacaacagtggtgatgatattgataaaggtgaattctatttgaggcacataaaagccaggttccatgcagatacaattgatcccatttgacagatgaggaaactgagggaggttccaagaggcagagtgacctgccccagccatgatgtcagtggtagaactacaccagactctgctcttctggttggtcatgggatggacttccccaaggctacagaggtggctcttccctgggcagaaggcccctctggggatgacaaacacccagtggagtagccctgagtgggacaagggctttggaacggggtgggcgttgacaggcttggctcctgtggtgacgcccaatgtctcatgtacttccggcaatggagctaacacggccaagggagcaagataagattccctgtgcagaagcctccagaagcaaagtccactgtgatgtgagtgtcacatcgcagcctgccgggctcccacaggtgtaggatgttagaatcctggaagaaattccctgcagccacatcctaggacatgtggcattcctgactttcctttctgggagttcctagccaagctacacctccacagcccatttccagcagtcccctggcattttttaagaaaatagcaccttccagacacctcgcctgccccacctcagcatctgccctctctgccagtcaatccttctctcccaggaggggtactcagccacccgctccttgcctgacaggtggcctggggcaggaaggcagcaggtgccctccagccatcgccacctcaaaatcagtcacttgtcaccatcaggtgggatggtgcactcacccctcgtgccttcacattcagatccctgacagcacccccacggcctgacagcacaacctaaaaacagtctgtgtcccttctaggccaggcctggtccctcagagacagcaaggacatccttcagtcaatccacaaatgtacacgtgcaaacgtgcacgcacacacaccctccttggccatcatcctcaccctccaatccctcaccatcagcctctcagtcagacacagcacccctcacggccattccatcattccattctgcatgtgcaaatgccgtcgcccagcacacacatccctccgagtcagctggcagggccaccctgccagcgcccttctcctccaccactttccccttagtgcatcctcatgcctcacgtccttaagagtgggggaccccttcatggctaggacacacatatagcccctcagcatgaccacctctccccacatccctcacctaagaaatcgcataaaacttgaagccaaacatgagagcaaatgaatcccactcccaagcacctgcgggaatccactaccaccgtggtattctgttaggcagcaggcaccacaggctgcccaccaggaagtggaagccagagaagaagagtggggtggggcagcaggcagcagcagattacaacctggcatgggccctgcctggggcctccgggtatccatcactgtctcaccaaagggcgctcagaactgggtctgctctccacttggctggcttcaatagctgtaaataatagccacagtcgctaaaccccagtggtccaagtcagtgggcctgagagaccacctagtgtcttgttccagtctacttatcctcactcctcctctcctaactaacagagaaactgaggctctgagaaaccaggtgacttgccctaggtcacacagccatttacgggtagtgatgtaccccagcctcttgcccaagtgctttcccatcccctcccttagaccatgcagagagctccaaatgcaggagaaaagagggctctgccttttgcacccttgacatagaagttaaacagggaccccagctccctcccccatcctcatccttccaaagaaaaagaagcattgcaaccttgggatggctcctacctctcaaaggctcccagtggaacacacagccctgggctctgggacctggtggtagggtgactgctgccctgcggagcccacgagctctagaactgttaacagtcttgtcttgcttaatctccctttccgttccccagcgagccaatctcctgtgctcatctacaggacttcctgtggaagcgaccactggcggccctttcacaattttgcctggcacccccaggcatccctgccctgattggtgtcttgaagtggagaatgctggagctggcagggaggccctcctaagcagaggctccaaagagtgagatggactgctcaagatcacccagcccttagtggcacagccaggactgggcctcagtctctggttgccaaggcaatgccttatcccagacagcagcaggttgatgggcacagccgtggctgaagctaagtgtatgggatgccccgggagaactgcccatcctgcctcacttcaggccctcactctcagacagtgtctttgagcctcaggggaggctttatatctaaaccaccttttagggaacaatctagtctgataccaaaatacactgtagagctacaaccatcagaacagtgtggaattggagcatgactatagacagatgaatcagtggaacagaataatgaaatagactcaaatatttgtgggacaggaatagactcaaatatttgtggggatttagtgtatcataaaggcaccacttcaaatcattggagaagagatggtttattcaataaactatgttgggagaatgggctaggtatctgcaaaaaacaaagagctctaactctaaaagcattccagatggataaaagacataagcattttaaaaatcaaaatcacataattatatgttgtttgggatttacttcaaaattattgaagagtgtggagaataggtaggacatagatgaaacaagactggctctggacctgttctgatccctgctggagttaatgagggtactgcaggctcattatgttcttctgcttttctgtatgtttgaacaaatgccataagaaatcatggcatagttcatttgccatggttgcagaagaaggaaggaaagaaaaggaaggaaggagggaaggaagggagggagggagggagggaggaaggaaggaagaaggaagagagagaaagagaaagagaaagaagagagagaaagaaagagagagaaagagaagaaagaaaaaagaaagaaagaagaaagaaactaagaaagaaagaaagaaagagaaagaaagaaagaaagaaagaaagaaagaaagaaagaaagaaagaaagaaagaaagaaagaaaaaaagaggaaggaaggaaggaaagatagatctgtcatgggataggctgggtgtggtggctcatgcctgtaatcccagcactctgagaggctgaggcaggaggatcgcctgagcccaggaattcaagaccagtctggacaacatagtgagaccccgtctccattaaaaaataataataataaagaaggagaagaagaaggaggaggaggaggaagaagaagaagaagaagagaaagaagaaaaaaaggaagaaagagatcatgggataatttttaaataatcttggattaggcaaggcctttccagatatatcacaaagcattagaagccacaaaagaaaatattgagccattcaaccatacggaaactttttaaaaataaataaaactgaatggcaaaaaaaggtcaccactgataagtcaaaaggcaaactctgaaaaaatacttacgtatcatagaaaataagttaatttcctccctctgtaaagaactcctgcagatcaatgaaagaccaataatgcattagagaaattggcaccatatgtgaataaacaattcatggaaaaataaatatcaatggatttaaacatatgaaaaatatttataaaagtaaacatttctgtttataaaaatataataagagaaataaaagataaaactacgtaccatcacaaagaagatgagggtaaaaataaaaaataaaactacaccgagacatcattttcagctattcaa

SEQ ID NO: 585686 - DNA, 4001 bp, Homo sapiens
attataatagaggaagagaaggcctggatgtttgcaatgacacagatagacttgggaccatttagcagtgggtcattgtgactggatcattggttaatgggaaggggtttctacactgaggaagaaacagtgggaggtgggatgggaaagggaggatggtgggaaatccttatagccatcactgactctccagacaggaagcccacggagaagtcaatcaaattttctatcgcacacacacactgacacccacacagggaaggcttttgacctttaaagggagctgccacattctcccacccagctcagttacctgtcggttctggcattgcctcccagtgccctaagaattccctgagccagtgatcgcagtctccctttgagagcttcctgaaatacttttccagccctctgtctttcttccatgtctccttgatcttactggcttcatgattaattactgtccaggtcatgttcattgcgtcaaagaggagggatttctctccattggtggcgaactgccaggatgcaccagtgcaccgttctgcttcacgttgacaaaacatctcgacttgcagagtggaaggatctgcaatccaaacacaaagccatcatcctccactctttgagaagtccatcatcctccaataggtcaagtgtttctctgcacatttaggggtctgtattctttctgcccagacttgccctttcctgcccattgggtcccatgtgcctctatggttgggccaatgatcaatacacagatatacctaaagcccctccccatctgtgttcttccctcccctctcttactgcctgcctctgtttgcccaccccattccacacttaccactggtctttatctggggtttgatgtcacaaaggagcatcctgaggtctcgccccacttctcccagcgtttgggtcaattctccccaagtgctggtggcatataccttcttccccaggaggcccagaggtttgaccatgttgttgtcactgttgtactgaaggaaaagatttttattcaagaagacctgcgcttcacaccagggctgtccaggtctggacaatgattttatagtgaagttgaagcaaagagagtgaccacctgtgagacaaagatgcaggtgaggtccaggacaggggaagaggcccattagaacctgcgcttctgtgacccaagactccctggactgggccaggctagcagaggcggggcagctccatcccagactccctcaaccttctggatccctgttcccatctctccctgactgtctgggatgagatacttgatggtaccagggacccctggggtgcacttagtgttaatggtgttaacaggaggattcatgtcacaagtacttttagcaacatctaccaagttctgaggcacaaaacagacaagccagtgtatgacctcctgagacttaaactctagctgaacacacatgacattcaatagaaaggaaaaagaggcatttatcacaggacacacgctgaattcctgtggggtcccagatgttcaggaaagtgacctggagtagaaggcggggggtagcattgtagaactgccctctgtgagccagtgccttgcctagggcctcaggctgtggtctcccatgaactgggtgtaacatcccagggatcctcttcctcacgtcatccttaagagcaggcacccacttgtctgaagcctgcatgaagccccattcgcctaccccctacctttctccctcctccttgtcctcagccagttcttgtgctcaggacactcaccaaccatgatctccaaggctattagtagcaacagcagaaacaaaagaaggcgcacagggctagaagtcagggatattcttcgcatactgtggagagtaacaggcaggaagctgggcgtgtacacattcaccctcactggtatggtgaagaaatgttatccaacagcgtgggtgtgggcactgcccaaattctttaccctggaacaactgaggtcaggcctgtagagacccaattaaagaacaattttgtgaagagagtgttttccaagtattcagaatataatcatttattgaaaaataaaagaagacatttaaaaacaaaattaactttgaataaactctctctcctctcctgtccctgctgcccctgcaaaaaaaaccccctctggtgtgagcaggatggttggaggttatgtgagctccttctcctttcctccagtttcctcttcccttctcctccctgcctcttttgcttttccctttcttcctggtaccccctgcccattcctgtattttctcccatcgccattctcccctctcccactgtccctaacccgttcaaactctttcctcttaaatggttgagattttctctcaccaagcacaccccagtattaattaaactagctgcaaacaggcagcaagtggtctaccatgacagatgggttttgtgtgtgtgtgtgtgtgtgtaattgtaataaaacatattgagtcactcaataaacacagagtgtctactacatgtatcaggcactatcatagatgctaattaacgaaactgaaatggccaggccctcacagtggctcatgcctataatcccagcactttgggaggatgaggcaggaggatcacttgaggccgggagttcaagaccagcctgggcaacatagtaagactccatctctacaaaaaaaaatttttttttattatactttaagttttgggttacatgtgcagaacgtgtagttttgttacataggtatatacgtgccctggtagtttgctgcacccatcaacccatcacctacattaggtatttctcctaatgttacccctctcctagccccccaccccgtgacaggccctggtgtgtgatgttcccctccctgtgtccatgtgttctcattggtcaactctcacctatgagtgagaacatgtggtatttggttttctgatcttgtgatagcttgctgagaatgttggtttccagctttatccacgtccctgcaaagggcataaactcatccctttttatggctgcatagtgttccatggtgtatacgtgccacattttcttaatctatcattgatggacaagttttgctattgtgaatagtgccacaataaacatacgtgtgcgtgtgtctttatagcagcatgatttataatcctttgggtatatacccagtaatgggatcactgagtcaaatggtatttctcgttctagatccgtaaggaattgccacactgtcttccacaatgtttgaactaatctacactcccaccaacagtgtaaaagtgtttctatttttccacaacctctccaacatctgttatttcctgactttttaatgaacgtcattctaactggcgtgagatggtatctcattgtggttttgatttgcatttctctaacgaccagtgatgatgagcattttttcatatgtctgttggctgcataaatatcttctttggagaagggtctgttcatatactttgcccattttttgatggggttgttttttttctagtaaatttgtttaagttctttgtagattctggatattagccccttgtcagatggatagattgcaaaaatcttctcccattctgtaggtggcctgttcactctgatgatagtttcttttgctgtgcagaagctctttagtttaattagatcccatttgccaattttggcttttgttgccagtgcttttggtgttttagaaaggaagtctttgcccatgcctatatcccgaatggtattgcccgggttttcttctaggatttttatggtcctatgtcttatgtttaagtctttgatccatcttgagttgatttttgtataaggtgtaaggaaggggtccagtttcagttttctgcatatggctagccagttttcccaacaccatttattaaacaggggatcttttccccattgcttgtgtgtgtcaggtttgtcaaagatcagatggttgtagctgtgtggtgttatttct

SEQ ID NO: 585687 - DNA, 4001 bp, Homo sapiens
tcgtggtggataagctttttgatgtaatgctgggttcggtttgccaggatttttgcatcaatgttcattagggatattggcctgaaattttatttttttgttgtgtctctgccaggttttggtatcaggatgatgctggcctcataaaatgagttagggaggattccctctttttctattgtttggaatagtttcagaactcctcttcttgaggagtatctttgtgatgttctctgtatttcctgaatttgaatgttggcctgccttgctaggttggggaagttttcctggataataacctgaagagtgttttccaacttggttctattctcactgtcactttcaggtacaccaatcaaatgtagatttggtcttttcacatagtaccacatttcttggaggctttgttcattcctttttattcttttttctctaatcttgtcttctctctttatttcattaagttgatcttcaatcactgatatcctttcttccgcttgattgatttggctattgatacttgagtattcttcacaaagttctcatgctgttttttagctccatcaggtcatttatgttcctctctacattggttattctaattagcaattcgactaaccttttttcaaggttcttatcttcctagcatttgttagaacatgctcctttagcttggagttgtttgttattattcaccttctgaaggctacttctgttagttcgtgaaactcattttctgtccagttttgttccattgctggcgaggagttgtgatcatttggaggaggagaggcgttcttgtttttggaattttcaggctttgcgcactggttttttcctatctttgtggatttatccacctttggtctttaatgttggtgaccttcagatggggtctttgaggggacgtgctaatcctttctgtttgtttcttttccttctaaccatcaggcccctctgctgccagtctgctggagtttgccggtggtccactcccaaccctgtttacctgggtatcaccagcggaggctgcagagcagctaagattgctgcctgttccttcctctggaagctttgacccagtggggcacctgccagatgccagccagagctctcctgtatgaggtgtctgtcggcccctactgggaggtgtctcccagtcagtatacgtgggtgtcaggcacccacttgaggaggcagtctgacccttagcagagctcgaatgctgtgctgggaggtctgctgccctcttcagagccatcaggcggggacatttaagtctgctataagcccctgattggggctgctgccttgtttaccaacatgccctgaccagagaggagaaatctggcagtctggccatagcagccttgctgagctgcagtgggctccgcccagttccaacttcccagcagttttgtttacactgtgaccttaaaaccatttcctcaagcctcagcaacggcagaggtccttccagatgagttttgtaatagactccagcagtcctactggggccaagacctcaaggaaagccaagtctatcattgggaaaagtcttagggctctaagttttgaattctgaaaatttttcttagaacaaaattttgtgtcattttcaaataaagcacaagttttcctcataaaacttagtatctgtagacccccttcccacctcacttttacagctgtcccatttgatcatcagaccctgctaccttagccagttcaggctgctacaacagaatagacaaggtggctgaaacaccaagcatttatttcttaccttcctggaagatgggaagtccaagatcaaggtgtcagcaggtccggtatctggcgagggccctctcttcctcaccagatggctgtcttcctgttgtatcctcacacagtggagagcagagacagacagcaagctctcctatcacttcttaatcccacatggctccactcacatgagttatgacttcctaaatagcatcaccttgagaattaggatttctgcatatgaatttggaaggcaggcaaacatgcggcctgtaacaccacccatatccgttccacatctaggttccctctgtgtgccgggcagtatgccagttaattcaagtgcatgtcagacccagagggtgacatcctgtgactcagatgctagggcccttatgatgcctggtaaggtaagtgggtctttaccactgtcctttcttaactagatggaacagacttcaaagaaagtaaccatggactatcggcagggctctatctctggggctgggggataaggggttgtctgctcagaggacagtgggtcaagcgtttgaaggagccgaggaatgcacattttttacatgtcccctatgtggttctctgtctgctaaggttaaagaacctcaattttgagggtgcacttccacctcttggtctggagaaggggtctcaaatctgtcctgagtggagcctgttctgtacacatccaggccctgagagtacacagagaggaactcactgctaccgccctgccaatactgctgctgtggggacaccagcgggggtgggccaagaacagagtgtatgtgtgtgtttgtgtgtgtgtgtgtgtgtgtgcatgggtgcttgtgtgtgtgtgcgtgcatatgtgtgatatgaccactgagtagctccttagcagggccaatattttctacaagtctgatgactcacaggaaggagcacaccaggcctatacttgggtcctgacatctgggatgccaacctaacactgaagaaaaagaaagagctgcagacaggctgggaaaaatatacagaaaggggaaaggggcccttccacctttgttgccctctgtggtcctgaatctcagcttggcctgagccaacctgaagatgggaaggaatagccattttccaactgcaaaatgtcagcttcaggcaatggtttcaaaactgaagtaatggttacatatgaagtagatttttgtttgttttgttttttgagaccaggtcttgctctgtcatccaggtggagtgcagtggcatgagcacggctcactgcagccttgaactcccaggctcaatcagtccttccacttcagcctccagaatagctggcactacaggcatgagccaccacacccagctaatttttaaatttttggtgtggagatggggtctcatcacgttgcccaggctgatctcgaactcctgggctcaaacaatcctcccccctcagcctcccaaagtgttgggattacaggagtgagccaccacacccggctgaaatggaattttaattgaagtaagaagcgggtgataaggaaagtgaaaccaataatttcacatagtccctggaagcccgttgctataaagaactttcagcctgaagtccaaagagagacgaaaattttaaaatgaattggactgcagttttcaatccctgaaaatgagtcacagcctttttgtggcagtgtgccctgggcttctaaccgtcctctccctgccccagctgccttgaggtcccggccaatggtttcaacactcaggctaggaatgccaaggcccggcagagcgaggctgtggaagccttggcataagcggaagggaggatctgagggagaatgggacaagagaagtcggaaagaaggagttagggcaggagaacaaggagaaatccctgtcccccaaattggagagaggggcgattgggactccagactggaaggaggcacggatccctgagtgcttggtgtggaggcagaggacccgcagagccaccccgtcctccctgccttatccagcgtccccgccgccacacccccagcatctcccccaaccccacttttacttcattatctgcccctggttctctcaccactcgagcccctgctttcctccttcactcccaaacatgcacacgttccctctgcacgggtgtttggaacaccagccatcccccaccccctaccttgtgccagcaggagatgtttgtccttctgccgtctcta

SEQ ID NO: 585688 - DNA, 4001 bp, Homo sapiens
ctcagctctgctgttgaagcgcaaaggcagccacaggcaatccatgaatgagcgaggctggacctgccttaagtgcccaatgacccaagaccccctaagatcctagaggtgcatgtggttccaatgtctaattggagaatcacaacatagattccatgtgaatgttcagaggcaaggcaacgccactcacagcaaggaaatctcaacattaaaaagtgtctcctgtagagtactgggccttggcagagatggggcctttagccatggaagggccgtgaccatccagcctcagagctgcccattacgggtgggctcctcaccctctaggtcattaggaagagaggtctggcagtgagaagacacaggtggttctcctgggatgggcagaagtagggccacagggaaccgggaagctgcacaagcagttggccccgattcccaggacaccacgtggctgcacccccttaccctcagcttacacctcaggtttcagggaaggtcactgatggcccccgtggaccatagatgccactcagcagcaaaggaggggagagtagaccctgaaccatgggacccccactcccatcacatccacaccacccagaagccacaggcaaggtaggaccaccttctactctccaactgacacctgagacaccacttggagatgacaccataggggatggggtactatttgctggtacactgtaatcccctcatctagggtcagcaacctaggacagggtccaaatctggtcccccctatttgaaggttgccattgcctgctgttgctctgcaaagggacaggactggacactgagacggagaacccaaggcctgcaaagatcacagggcatccttcctccctttctagaaagggtttgctgacccctgtctacacactgactattctctatgatgctggcgccccagtaggaagaacaggcaggtctgggccccaagggcagaagtgggtgcctctactcaccagagttcccagggtcatcctggaggaaatggtgcttcccatcccccctgcacaggttctgtggggagcttggggtgtgtttgctggggtgtgtcctcaggcaagaggcagaaggtgtcacgtggtgtaagaggtcgcgagggccccttcatggatggggagacctctggggtgaccagctgggctgaggtggggagtaagaggatgttacctgggtggtggcagtggatggtgaggggagggtgggaagtgtctgctgagccgctgggtgcaggtgagtgtctacaggaaagtgcagggaaaaattcaagggcacgcagccctgggggtgctggaaggtttgtgtggttgagagcgggtgagaacagagcaggctggtggctggtgggagtgtctgtgattgtgtccctgtgcaaccccacttcacccctgtcctgaccccagctcggattctgggggctctggtttctccttcccgagggcgggtgggactgccgggctgcactagggatccccgctccacgtcgccctctgcagccctctggcccctccactctccgggggttcctttccagcctcctctctgaccagctcctcccctcggaggataagtagcctctgggaacggacccggcgggaaggagacgcggagggaaactgagcgggggcgcagtccggggtgatcgcacgggtccttccagaagcctcccctcctctgaagcccacagtccacagccccccacggttggcctccgccccgcttaggctccatccccgaactcaccggccagcccggtcctgcaccagctggacagcaggagcagaagcgggaggcgtagaaggaacgcggggctggcggccgctgccattggggagttggatcgcaggggacagcagaagcgaagcccagcccgtggatcacctggcggctcgcaggctgtctgaatgcagcccgtctgaatgcagccctaaactccagtaagccctaaactctagcactccttctgccccgcccctcggaggaaacacaccccctttgctgagccgctagccaatcaggtgtctctcagccaagttgctcatccaagtctaccccactttctactgcagcgctcgcgcacttccccctgcttcagccagtcagactttgctggctgcctgcccgggaccagtcctgccaaaggcttctttccatgaccccctcatgtaatcatcaccgcaattttttcattttgtattaatccaatgtggataccgatgcacagaaaggtgaagaaaatgcacagaagtgttcagccgcgacagggtctccctgtcctcgcctgtacctgcgacacccgccttccctctccctgcgttgcagagtgctcccaacccaccgtcctgtgcgcagatccaagcccagtcccatccccgcggcctcatcccaaatcccgagtggacgtggttatagcctgggctaggtttgtttgtttggttggttggtttttctttcttttcttttttttcttcgtgacagagtctcgctctgccgcccaggctggagtgcagcggcgcgatctgggttcgctgcaacctctgcctcgcgaattcaaacgattctcctgcttcagcctcccaagtagctgggaccacaggtgcgcgccaccaagcccggttaagttttgtatttcagtggggacggggtttcaccatgttgcccaggctggctttggactcctgggctcaagtgatcggcccgacacggcctctcaaagtgctgagatcacaagggtgagccaccacgcctggcccggggctagattttattacagaagcaccaggtcttcagaagcttcaaagaagatattgtacactaaacaattggttaagatagtaaattttatgttctacttttttaccaaaattaaacagctttaaaaattatcttaaaaatatgtgtcttgctgggatctgcccaattcggattggcaaaaagactctgctcattaaaatctttgcattttaatgcaaagcattgaaaaccttgtctctaaaatcacaacctgtgaggcaccttgctgatttagaaagcacatcagagagattgaccctgagctccccttagaacagtgccccaccaggtgtggggatggcccaggggactcagcagagcaggttcaaatgaaagctccccatagctactaactgccagcgcttgctttgggcctgttccccctgggcaaggaccagccatccttccaagccgcgcacaaataccccctcccatgtgtgtccctcatcttcccacatgaaggaacaccctcctgctccctgaggcctggatccacagtgatggagcgtatccggatctccctgtgtgacaaatgctcacacatttctttgcttctctactagaagcatgaggtctttgagactatactagatctgtgtacagcttttgagggaaaaaagccctagtggcctactgttgctcaattggaatgtgatcaattgtgtttcccatgggagcaggaggcaagggaggggtctgtgcgtgcgtggagctcactttgcagtacacccatctgtggccaaccattgatgcctggatccatggctgcacccacacctctgctcagtccctggacggtccctgcggccatcctcaaaaggaaaccccaattgtatccttgtcttaattatcatgagggcatctggaagtggtggcagaagccagagacaggtgagggtcccagtggttcctggcagctgtgaagggcttagcttagggtgaggactggacagagcccctgggtcccattctgcccccagccactcaggcaatatcctcttttccccttctctctcagcctcttctcaccctagggctgtacccaaagctctgaatgagactgtccctgccccgccccatccactcctggtccagctcagcagtgaccttggaactccaggagcagctcagtacccctgtctccgagtcagctctgctccaggcagggccagaatctg

SEQ ID NO: 585689 - DNA, 4001 bp, Homo sapiens
gtaaacatgtaaaggtgttcagggaatatattctccattgtaactactcaactctgctgttgaagctcaaaagcagccatagacaatccatgaatgatgagcgaggctggacctaccttaagtgcccaatgacccaagaccccctaagatcctagaggtacatgtggtcacaatgtctaattggagaatcacaacagagattccatgtgaatattcagagacaaggcaatgccactcacagcaaggaaatcgcaacattaagcagtggctcctgtagagtactgcaccttggcagagatggggccttttgccatgcatataaagaaggccccatgacaaggcaccagaatggaatgaagcttagggatgcctattcctgaaggcctcagagctgcccattactggtgggctcctcgccctctaggtcattaggaagataggcccagcagtgagaagatgcaggtggttcttctgggatgggcaggagcagggccaccgggaaccaagaagttgcacaagcagttggacctgatccccaggacaccacgtggctgcacccactcaccctcagctcacacctgaggcttcagggagggtacctgatggtccccatggatgccactcagcacaaaggaggggagaataagcccccaactatgggacccccactcccatcacatccacaccacccagaagccacaggcaaggtagggccaccttctactttccaactgacatcagagacatcacttggagatgacaccctaggggatggggcactgggacactgtaatcccctgatctgggatcagcaacctaggacagggtccaaatctggtcccccctctttgaaggttgccattgcctgctgttgctctacaaagggacaggactggacacagagacggagaacccatggcctgcaaagatcacagggcatccttcctccctttctagaaagggtttgctgacccctgtctacacagtgactattctctatgacgctgacacccccgtaggaagaacaggcggtctgggccccaagggcagaagtgggtgcctctactcaccagagttcccagggtcatcctggaggaaatggtgcttcccatcccccctgcacaggttctgaggggagcttggggtgtgtttgttggggtgtgtcctcaggcaagaggcagaaggtgcgacgtggtgtaggaggtggtgaggtacccttcatggatggggagacctcaggggtgaccagctgggctgaggtgggcagtaagaggatgtgacctgggtggtggcagtggatggtgaggggaggggtggcgggtatctgctgagcccctgggtgcaggtgagtgtctacaggaaaagtgcggggaaaacaaaggcagggagtcctgggggtgctggagggtttgtgtggtagagagcaggtgagagcagagcaggcttgtggctggtgggggcgtctgtgattgtatccctgtggtaccccccttcacccagtcctgaccccagctctgttcccgggggggctctggtttctccttccgaaaggcgggtgggactgccgggctgcactaggaatccgggccccacctagccctcgcagccctctggcccctccaccctcctgccagcctcgttttcaccctgctctttttcgcccctactggggcaagaacagccttggggagtggacccggcgggaaggagcccaggaggggaactgagctgggggcgcagttcggggagatctcccttgtccttccagaagccttccctcctctgaaacccgctgcagtccacagtccctcaggtttggcccccgccccgcttaggctccatccaccagctcaccgtctcgcctagcccgggaccagccgaacagcaggaacagaagcgggaggcacagaagcaaagctgggatggcggctgctgccattggggaccaggagggctggggacaagagatttaatcaaggtggatcctggaagatgaaatcacctctgtgctgaaaggctggcttatatactgttagttactggggaatgtaccggggaatgagtcacctcgattctgaaaagccagattttaatgctactgggcgtagtcactgggcgcgttccacctcttcgtttcattgtctggacgaaatccagtttccatgctagtgtcccttcccttcttcacccgctccggcagcttggtggcctcgtgcccgggccccactcctgccaggacacgattccttccacgacagactcatttaatcattatagcattttttattaatggtgaagaaacgtgcagaggaatattcagcggcctcggcgtctccttgtccccgcctgggtccgcggcactctccctccttccgcttgcgccgcggggtccctggctcaccccgccctgggcacagccatgggcctgttcgcgtcccctccactacttccccagtccccggtgggcgtggttacagtccgggctgggttttattttttatttctttatctatttatgtatttggagatggggtttctctcttattgcacaggctggagtgcaacggcccgatgtcggctcgccgcagccttgtctcctgggttcaagcgattctcttgcctcagcttctggagtagctgggattacgggtgcccaccaccaagcccggcgaattgtttgtagttttggtagagatggggtttcaccttgttggccaggctggtctcaaactcctttcctcaggtgatccacccacctcggcctcccaaagtgctgggattacaggcatgagtcagcgtgcccggcctgggctaggttttattacagaaacagcaggtagggtttcagaggttcaaaacaacatattgtatagtaaacaattggtgaagatggtaaattctatgttctatgtttttaccaaaattaagcagctttaaaaattatcttaacaatttatgtcttgcttctgcttcacccagtgcagactggccaaaaggctgctcattaaaatcgaggacagcattgaggacctcatccctagaatctcaacctgtgacacgcttgctgatttagaaagctcctcagagagattacctctgagctcccagttcagcagccgccctggcccaggtccaccgatggcacagggggctcagcagagcaggttcaactgaaagttcctagtggttcccaactgtcagcgcattctgctggcctcttccccctgggcaaagagccagccatccttcaaagccgggcacaaataccccctcccatgtgtgtcctgcatgttcccacaatacagaacaccctcctgctccctgagacctgggttcacagtgggtgcatccagatctccctgtgtgacaattgctcacacatttctttgcctctctgctagaagcatgaggtctttgagaatatactacatcccttcctaaaaagacctagtgaacaacttgctcaatcatgtaatcaattgtgtttccacgaagagcaggagccgagggaggagtctacacacgtgtggggttcactttccagcacaccaatccgtggccaaccacacctgaatccatggctgcacccacacctctgctcagcccctagatggtcactggactcattatcaaaggggcaaccccaagtgcccccttgtcttagtcaccatgaaggcatctagacctgtgggcagaaggcagagggaggtggggggcccagcgatccctggctgttgggataaggaatgggcagagcccctgagtcccacactgcccccagccactcagccttctccctattaaatgagtaaaatagacacagaccttcttctccacacagttgtcatgtggggaggatgcacacctggtgaccagcaatccccagagccctgaggctgcgggaaaggggaggaggcctagaccaagcccagggactgtctctgcttctgcacagggggatgggatagcagcccctctgtgactgtgcagggacacaggag

SEQ ID NO: 585690 - DNA, 4001 bp, Homo sapiens
aggtcctaacttgagaaaaaacaaagatttgatattgtgaatgaaacgttcagacgtttagattaaggaggataacacttggaagtacttctttggatgtatggcgagaataaaaagaatgttcaacaaggcctatttttgtgcgtgattctttgcagccaaatcatttggtagatttctattgccattcgcctttctgattaaatagtaacttacttatcaagcttcttctcaaatttcagtcccgtataagttaagaatttaaccacaaggttgtttatctcctctacatacatgtcactaggatctgagtagacccctttacagccaatcaaagtgaggctgccgtgaatgtaaaagcttctgctttaggtttggggcctaaaaccctggatttgtttccagacaagactgatacgttaggttgatttttttttcttccacacaagtaaacttgatacatgctattaaattgggctacatttcaatagttcccatagcaattcataattttatatacaactgatttgcttccagctttgttttaacctaggagaggtaggtgagggaggaaaggggcaagcacaagcctaaggttgttgtttttaactgcaagtgcaaaacataagccaattttcttcaaaatactaagctgcattttgttccatcttcgttttcaacaagacttcatgtgatatcaacacctaaggacctgtatagggcacttccaatcgggaggggtaggtttctgctcccctaagaaaaagggtgttcctggggttcccttctcttaccctcccggttgcttttactaaaatatattgatggcaaacttgggccccttgtccttttgtccccctagacaatctctggcctaattttgattactcctccccctgtgtatccctgctctctcttaattagaaatcatacctcagaatcgtgcctctcttccccccttgtaagaggagaacgcctgacccaccacctggagaacaatgtaacccaactccgagtccatggattcctctacccaagccccaagatttatctcccagggaaatcagaaagccagttctgtcctgtcatcccggattccctcaaggtgtcctgctcctggtctaggattaccagctcctttctaccctggggcattctactcaccttccttttccaagaatctcgcccctcaccctcggacccttcaccgcgacccccgcgcccacccggagcagcacaacaggcggcgagtggcctccgagggcagagcccgcgagggcgggggtcgggggcgggtcgagagcggcgcagcggcggccggccacgtcgggtcagtgccccactcccaccgcaggacacacgcccagtacctttgtagtgcacccgcaggttgttctgagagaggccgatgtagctgaacttgtccttcgggctccaggaccgaggcagcggcgtctcttgttcgtccacggccgggtagagacgcttcagccgccgctgcaactccttctcctgctcgttcagggccgagtccccgtgagggaagggggccgcggcgctgctgcccgccaccagagctggggtcggggctcctccagccgggccggggcccgctgcaaggcccgggggagcgggcggcccgctggcgggggcagccgctgaggcagggggaggcgggggcggcggcgggggcggcggggccgcggtggccgggggcggcggcggcggagggtggaggagcagggcggccgccgcggcccctaagccttcgccgcccgcaccgccgccgggcgagccggccggagaagagccggcgctgacggccgggggcgccggcaggacgactccggagactggggccaaggccgccggcggtggcggcgacagctgctgctgctgttgctgctgctgcggcggcggcggcggcggctgcccggacatcccggccgcgactcagcctgcggccacctccacctcttctctccttcctcctctgcttcccgggggcgctgtcgctgcggccgccggcaccaggcgcccagtccgcccgccccggaagcaggcggcgggccgcgcgcccagggagaccgcggcggttgaggagctcggagacgcgggagtaggcggcgggcccgggaggccgggagagaacgttggccggagcgcgggcgcgcggcccggggacgaggcgccgagggcgggggcgacgcgggagcgcgggaggggaaggcgcgctggcggccgccgcggccgctgctctcgcggctgtttcccggcgggcgggccgggccggcgcgagacgctgcgcgcgggcggcgctaggcgagggggcgggacggaggcgcgagagaggcgcgagcggtgcgagggggcgggccgcggggctcccggctgtgcgccgcgaggcgtcctcccgggcccgccagtcgctcgtgggcaggatcgctgggctcccggcgccgcaggtcccttcggaggtgtccgcctcctctcccttggcggccgccgtcgcccccctcgccggcgaatcccctcccacttgacttctttttgttgtcgtcgccccacctccccaccgtagggctcctcggagccgaggcgccgcttctcgtccaggcgagagtaatcgagccccgctggggccgccgcgagcccaggccccggggcgctctaggacccgtcggcccggggcgtgcggagcggctcaggctccccgcgcagtgctgctagctctcgcctcagtcccgttcccgtttgccgcctccctccaaagaggaacgcattgcctttggtacttcagtgtttaattccgtagcattgaccatatgggcagtagaaaccacttctgaaggcagtctcccacttagaatagtgactgtttcattaattaattttacgaggactcacagtgaacttaacagtggtagaagatgtcattaataaagaccggcatatcttcaaaaagcaggagcaggcactgtatgaatacaagattatagtgtgtgtttaggaagggcttctagagacgtcagaacattttatagactcgttaattttcataacagggttcttaggtaacagaaaattatgcccatttttaaaacaaggaaatatttaccgagatcagcagagtcaaaaataggacttcctactttgcaattcccaatagaatgcttcgtcgactaatttggcacaacttgccaagtgttgctctctgacccatcataacattactactttgttttcaccacttccctttgtttagcttatccctccctagctggcaaaatcaggctttgcatatgtaaattgtgtgatgtaaattctgatattttgtttgcttccaaagatatgatggtaatcatttggtcaaataagaaatgttttgccgaagagaaaattatttcgttttgaagaaggtaggccaaaggtgatttaatttaaggccaagattatctggccagaacaaataacagagtcattcggcctaatttctccctcagttacccagacaactagatgttctgttgtacttttattattattattattattgttttgtcgcccaggctggagtgcagttgtgtggtctcagctcactacaacttccgcctcccgggttcaagcgattctcctgcctcagcctcccaagtagctgggactacaggcatgtgctcacacccagctaatttttgtacttgtagtggagacggggtttcaccatgttggccaggctggtctcgaactcccgacctcaagtgatctacccgcctcagcctcccaaagtgctgggattacaggcgtgagccaccatgcctggcctctgttgtagtttgatagaaatatccattaattttaacctgttgtttgatgactttttttaaaccactgcactttgaatcacatgatgtcactgtatttacagtgttctaacactttcatttatattacagtaacaatgagttcaatgtaagccaagctctatttaaatgtacgatagc

SEQ ID NO: 585691 - DNA, 4001 bp, Homo sapiens
cccacctcggcctctcaaagttctgggattacaagtgtgagccaccatgcctggtccaatttacagtctttacaaagaacacagcctttgcaaaactaaacacaatttgtttctcatcatggcactatctttacttaagggctaagaatggaaaacgtccacccttacacacagcttagatactaaggtccaaaactaccttccctgatatggtttactgtctacattaacatgaatttattattttttgtcttcattagcataactttactgttctagaagacttctgcccaaataacttaatcattcattataagaacttcatgagaaatctattagcttttcacgttttttatttttattttttgtttacagggtctcgctctgtcacccaccctggagtgcagtggcacaatcatagctcactgtagcttcaaactcgtgggtccgtccaagtgatcctccagactcagcctttcaagcagctaggactacagaggtgcaccatcatgcctggctactttttaaaaaaaattttgttgagacggggtctacctatgttgtccacgctggtctcgaactcctgggctcaagccatcctcccaccttggcctcccaaagtgctgggattataggcatgaaccacatgccaggcctattagttcttccaatagaaaacctcaatagtttatgccttaaggcttcttgcactctttgcttttcctatcaatcttaaaccgctgtatcagatcagagtccaaccctaatcaagccatcttcctccaacaccctcctaccctctccctctgaaagaccagccttaagccatacccatcagtaaaatctgaccttgctttcccagtttaatacactaccaaagctctcagtggtgttcttccttatcccagtgagcaataaattcagctgtcttaacaaaatgtcatgttggtgatatttggcgaattatcaccggacagggcagtacatctataaacataaagacaaggcagagggatttccccacaaatgtctagaaatactgtaaaaatgagccaagataaattatacaccaggctaattacgtccactagtacatccattaatcagaaggaaatgggttagccaagaccacaatagaaagtttccttgcaagggtggccaatgagtcttaaaaattctttttgattaattccacatttatactgcaattttgcccagcgcggtggctcaggcctgtaatcccggctcttagggaagcagaggagggaggacagcttgagcccaggagtttgaggcctgcctgggcaatacggcgagaccccgttctccacaaaaaggaaaaacaaaacaaagcaattatattgcaattttgtaagcccttcctcacaacagagctgttcaaatacgaccctgaaccaagaaaaactgagtctcagatagctcttatatctttgggcgttaccaaaaacaattctagggtaggctgcctaagtgactgcaagagaaataagcagctttaaaatgaggtccttctgaagaacaatccagatccatcatcaatgtcactaaagtgtaaagaacactaacttctatggggtctaatcatggtctaatgacttgccgccacccaggtaaagcattcatagctgtggggtgggaaggagagaagaaagcaccaggtacctttcaaagtttacttttcaccgagacaaactgatcccagccgacgctccacaggacttctgaagctccaccagctccagagaagggggaggaggtggtagaaactaacaggattccgtgggacccaccctccagctgactgaggactggcccgcagcggtgaaaggcctttggggtccctagctcctcagggactcctctgcgcgctccgggatccatacctggcaagcaatagcgcggcgaaagccgcacgccatgtccacctctacggaagtgcgccgcagtccgccagttccggcctcgccccacctccttatacgacccgcctccccgcgccggaaacccgccccggagggtgatgccagccaatcaaggagccgtgtggctcgccactaacctctgccctgcagccgcgagggcgcgcgggaaatcccgagtgcatctggaatacgcagagtcagtaagaccatggctacgtcctcgatgtctaaggtatgtggtggccgatgcgcactgtggctctaccgctgcctcattcccctttgaagaagggatgaagccgaggttacgtaggcatcccttccctggctggagaggagggagggagcggcgtactgagctgaggcgtccttgctccagatcagttgaggccaactttgcttggggagcgaggacgcggatctgccttgtggtatggctaggaggatttttaagttctggttggtggaggtcggatgtcctgatgatgtggcccagtctctcatttttccatctcacaaatactgtgcgccaagcactccgttaggtaccaagatgcagtggtaaacaaaacagattcagtttctgcagtcaagaaagtcggtaaacatagataaactgacgatcacaaattttaagtgttagcaaggaaaagagttctaggcagacaacagaagagtgggaagaacctaatataggttgtcgggggttagcggaggctttttggagaaagtgaccctttcgctgagacctgaaaaatgagtagaagttaggttaaggattagggcgaggagggcagagagaacagcatgtttcttcggcccagaagatagaaataaaatggcatattagaggaatttaaaaatcataatcagaaagtagacaaagagtgggagcgtcatgaaaaatgagaatgaaaaagtaatgtggatgcgggtgtgtgtggtgggatatcttatagacctcctcatgttggctacctagatggcaagaaattgcaagacatagtgtagttggtaagaagataagccctagagctgtattgtccaatgtgttagtcactcaccacatgtggctatttaaatttgagttaaaataaagtaagattaaataaaaattcagtttctccgttgcactaaccacatttcaagtgctcaatcatcacatgtggctgcagctaccattttagatagtgcagatataggacatttctatcattacagaaagttctgttggacagcgctgttctggaccacaaaaagtaagaccttgagttctattgtaagtgcagcgggaagcccctgaagttaagctgtctgagaaagctgaaaaatgcacatgaagaagctacattctccctatgttaaaacaatggattgatgaagaaggctatgtcatggatctgattttttattttgattaaaacggtttatgagaagcagtgcttttaaagactacatctcaaggaaaaaggacaagccctggggtttaaggttatgctagtagagattcaaaggtagtatttttattagaaatggtactggttttattttgtcctggttataatgttctgtaggttttgaatggtctatcccttaatcctgttgattgcataagcacctcttatttttatgtatcttgcagaaagtaagatttttcaggaaagcatttttggtattataacaaatgtctgtattgggatgagaccttacatgaataagaagctttaagaactatttcatgaatttatggaactgcaagctttttttctttttcttttcttttttttcttgagacagagtcttgctctgttaccaggctggagtgcagtggcgcgatctcggctcactgcaacctccacctccccgattcaagctattctcccacctcagcctcccgggcagttgggattacagacatgccccactacacccagctaattttgtatttttagaagagacagggtttcaccatgttggccaggcgggtctcgaactcctgacctcgagtgatccgccagcctcggcctcccaaagtgctaggattacaggcgtgagcca

SEQ ID NO: 585692 - DNA, 4001 bp, Homo sapiens
caaaatttcagatggaaaggcttaggagtgaagagtatatgatttaatcaaactttacaagtaaagttgcctgaccaaagaaaatattatatttgcttaaaaatcaactctcaactatttgtgctaatgcaaagggcagtgttgtaaataatccaagaggtattgttttcccatagacaaaaaactgctcccttttggcaactaatagctacatgacttaagtaaaatatttctcatctctaagcatcagtttctttgtctgtagcatagggttcttgagtaggtgcaatttctgttttctttgattgctaatactctgtgattttatgttgaaggtttaccattttgggccaggcgcggtggctcacgcctgtaatcccagcactttaggaggccaaggcgggtggatcacctgaggtcaggagttcaagaccagcctgaccaacacagtgaaaccccgtctctactaaaaatacaaaattagctgggtgtggtgacacattcctgtaatcccagctacttgggaggctgaggcaggacaatcacttgaacccaggaggcggaggttgcagtgagcctagatcgcgtcattgcactccagcctgggcaacaagaacgaaactccatctcaaaaaaaaacaaaacctttaccatttggacatcgcccctaccccttaatgcttcccttgggtctgtgttcaagtcagactgcctgctctgagcacagtgcaactggtgctaaaaggagagacaccactaagtagggaagtatattagctgaagtcgacaaatttggcctatataatccacatgtgaattatctacaggtggctaaaaattggaaaattgagagcagactacaaatgtatgccatataggaaacaggtgagacatgactaactcttcttcctgcacgacccccaagatccatttttgcacacaggtacatttcaagccttgagaggagtatttacaactctcatttatgtttaatgccttggtagaataacaagccatggttcaagtttactaaacacatctacagaaagagacaatgtcttctaaattagagaatcatcccacccataaatggggggttcttggagaggggggtaggggagacagacatttctcacctggttgcatgatccttggttttgctcctaagtatgccaggttcacgttggcctttctgccatcaatgatgggattgggatccttgcaggccctttcggcagcagcccggtcagccatggtgaccttagcaacagacacacacagacatacatacataacctctaaattaacccatgaaggaaatcaagaatcacaatggagaagtcattcatgataaaactgagatcaaactttttttctattctttgcttcttttggctggaccctcctccttgatctcccatttttaacaggcgggcgggggcgtggggggggggggcgggtagacgaaggaaaaaagaaagaaaccctctaaccctgcctccccccaccccaccgccgaaatcttaagggtgttagtagggcctagccgagatttggaagcctaaattcttggaactctagatcctccttcccccgaatcccccgccccccaggtccctactcagcctcagaggcaccgtttgctttaaagaaagtccagccttacatccgcccaacgctcccaacctcgaaaacactccccaacgacaatagctattgtcctactctggggctccctgctcttcggcagctgaatttgcacgcttaaatctctaggaaggaagcttaatatgctctgtttcagttcggcaaagagccctaggatcatgatttaaaagaacctacctttgcagttaaaaggcggggggatgacacaagggcaacagccccagacctcgtggggtgtcccctccctgccccagccaaaacaccagaacacacgcatttttacaaagcaacagcgcgcttaacaaccggcatccagcccgggaatgcaattgttcagggttgcggcccctccctcgcaaccctccgcaccccaaatcccgccgtcattacaggtctctcctttcacccctgctctgccctgcccggcccccgacctcgcacagcgctgggtcttctccgaaccccgcgaggctggcgccgaccctctcccctagcaaagtttcagttcaccccggagcgaaggggcagcgccgctctacccgcggggctcctcacgggtcacgccgagcccctcactccaagctcccgatccccggggtcagccgccactccgtccctccccgtcacccccagtccgtgcaacttacaaatccatagccccgggacttgcccgtctgccggtcggtgatgaccaccgcctcctcgatctcgccgaagacctcgaagtacttgcgcaggctggcgtcggtggtgtggtagggcagccccccgacgaagatcttggtgtacgtcgtgtccttctgggtcgtgtgcatcttcgcacccgccccgcggctcgggctccggctgcggctgcggctcgggcagcggctgcgcctcctcctccggctccgcgtctcccgcaccctttcgcggccgccgggggccaagggcgagcccgggggcgagggcggcggcgcggcgggggcgagcggccgggggcggccgagagcgccgggcgcgcggcttccgaagtcgccagcggccctggagacttgacttcgctctctcctcccgccccccctgccggtcaccgtacaaattctccggatcgtctggattagaatcgggttctatagaatgtgcaagcggtttccactcacccggcggggaggccaaaaatgaaaagagagggtagttctcaagcgaagaagcgggtgctttagaggtagatttttcttccttaggaatcaggtgccttgggtggggtgtggggagggtccgcgggaagagcgtccgagcgccgaagcgggcggggggcgcggcggcggggccaggggcgaggaactccgcgcagcttcggctctggtctgtccctcccgccgtgggatctggaagacgagtgccgaggacagctctccacctctctgctcccttcccccgcgggccgggggtcgacgcccggctggggaggggggcgggccggacgcctgcgattggccgcggcagcacctggggcgccgggcgccgccgccccccagctgttgggaacagctgcttctctccccgcgcggcgcggcgctggggctcggggctcccgctctgtagccggcgatggggtagggctggagacgcctgtaggcggcctggctctcggcgtcgcctgctctaaccagtcaaagtcttagggacccggcgcagcaccagccgggacccagggtgcggggactgtgcccaaggaggaagctgcgttgctttccagaggggacgacgcgagctttttgggttaggcctcggtgacagggccggcgacctggactggcgaactggggtccccagaggcctggggcgattcgctgagaggccaatcccctcccgggcgcggggggtcaaggagctcggccgaacgaaacccaagctggacaccctggggtctgaagagtgagaaggagggccccaactttctttggccccaaaaagccagtgcggggaagtatcagagaggtagagccagaaggaaaagaaagatctagcgcttgggtgtagttgggaaaaccattagctttaattgctaccgcccagccaaaccaagtaaccggagatacctatgtccatcaggcaccgccttctatttcagaggaccataagttagtattttagcccccacagtcaccaaatttgtctttcctccctaacttagttattcaggaagattggtacagatgtcttagcataagtcgttctttttttttttttttccctaaacaaagaattaatctatttctttctctttgaattacaagaatgtttagtggcttgacctcatctgtttttatctggatgtaaatgtaaaa

SEQ ID NO: 585693 - DNA, 4001 bp, Homo sapiens
gggtgtggtgacacattcctgtaatcccagctacttgggaggctgaggcaggacaatcacttgaacccaggaggcggaggttgcagtgagcctagatcgcgtcattgcactccagcctgggcaacaagaacgaaactccatctcaaaaaaaaacaaaacctttaccatttggacatcgcccctaccccttaatgcttcccttgggtctgtgttcaagtcagactgcctgctctgagcacagtgcaactggtgctaaaaggagagacaccactaagtagggaagtatattagctgaagtcgacaaatttggcctatataatccacatgtgaattatctacaggtggctaaaaattggaaaattgagagcagactacaaatgtatgccatataggaaacaggtgagacatgactaactcttcttcctgcacgacccccaagatccatttttgcacacaggtacatttcaagccttgagaggagtatttacaactctcatttatgtttaatgccttggtagaataacaagccatggttcaagtttactaaacacatctacagaaagagacaatgtcttctaaattagagaatcatcccacccataaatggggggttcttggagaggggggtaggggagacagacatttctcacctggttgcatgatccttggttttgctcctaagtatgccaggttcacgttggcctttctgccatcaatgatgggattgggatccttgcaggccctttcggcagcagcccggtcagccatggtgaccttagcaacagacacacacagacatacatacataacctctaaattaacccatgaaggaaatcaagaatcacaatggagaagtcattcatgataaaactgagatcaaactttttttctattctttgcttcttttggctggaccctcctccttgatctcccatttttaacaggcgggcgggggcgtggggggggggggcgggtagacgaaggaaaaaagaaagaaaccctctaaccctgcctccccccaccccaccgccgaaatcttaagggtgttagtagggcctagccgagatttggaagcctaaattcttggaactctagatcctccttcccccgaatcccccgccccccaggtccctactcagcctcagaggcaccgtttgctttaaagaaagtccagccttacatccgcccaacgctcccaacctcgaaaacactccccaacgacaatagctattgtcctactctggggctccctgctcttcggcagctgaatttgcacgcttaaatctctaggaaggaagcttaatatgctctgtttcagttcggcaaagagccctaggatcatgatttaaaagaacctacctttgcagttaaaaggcggggggatgacacaagggcaacagccccagacctcgtggggtgtcccctccctgccccagccaaaacaccagaacacacgcatttttacaaagcaacagcgcgcttaacaaccggcatccagcccgggaatgcaattgttcagggttgcggcccctccctcgcaaccctccgcaccccaaatcccgccgtcattacaggtctctcctttcacccctgctctgccctgcccggcccccgacctcgcacagcgctgggtcttctccgaaccccgcgaggctggcgccgaccctctcccctagcaaagtttcagttcaccccggagcgaaggggcagcgccgctctacccgcggggctcctcacgggtcacgccgagcccctcactccaagctcccgatccccggggtcagccgccactccgtccctccccgtcacccccagtccgtgcaacttacaaatccatagccccgggacttgcccgtctgccggtcggtgatgaccaccgcctcctcgatctcgccgaagacctcgaagtacttgcgcaggctggcgtcggtggtgtggtagggcagccccccgacgaagatcttggtgtacgtcgtgtccttctgggtcgtgtgcatcttcgcacccgccccgcggctcgggctccggctgcggctgcggctcgggcagcggctgcgcctcctcctccggctccgcgtctcccgcaccctttcgcggccgccgggggccaagggcgagcccgggggcgagggcggcggcgcggcgggggcgagcggccgggggcggccgagagcgccgggcgcgcggcttccgaagtcgccagcggccctggagacttgacttcgctctctcctcccgccccccctgccggtcaccgtacaaattctccggatcgtctggattagaatcgggttctatagaatgtgcaagcggtttccactcacccggcggggaggccaaaaatgaaaagagagggtagttctcaagcgaagaagcgggtgctttagaggtagatttttcttccttaggaatcaggtgccttgggtggggtgtggggagggtccgcgggaagagcgtccgagcgccgaagcgggcggggggcgcggcggcggggccaggggcgaggaactccgcgcagcttcggctctggtctgtccctcccgccgtgggatctggaagacgagtgccgaggacagctctccacctctctgctcccttcccccgcgggccgggggtcgacgcccggctggggaggggggcgggccggacgcctgcgattggccgcggcagcacctggggcgccgggcgccgccgccccccagctgttgggaacagctgcttctctccccgcgcggcgcggcgctggggctcggggctcccgctctgtagccggcgatggggtagggctggagacgcctgtaggcggcctggctctcggcgtcgcctgctctaaccagtcaaagtcttagggacccggcgcagcaccagccgggacccagggtgcggggactgtgcccaaggaggaagctgcgttgctttccagaggggacgacgcgagctttttgggttaggcctcggtgacagggccggcgacctggactggcgaactggggtccccagaggcctggggcgattcgctgagaggccaatcccctcccgggcgcggggggtcaaggagctcggccgaacgaaacccaagctggacaccctggggtctgaagagtgagaaggagggccccaactttctttggccccaaaaagccagtgcggggaagtatcagagaggtagagccagaaggaaaagaaagatctagcgcttgggtgtagttgggaaaaccattagctttaattgctaccgcccagccaaaccaagtaaccggagatacctatgtccatcaggcaccgccttctatttcagaggaccataagttagtattttagcccccacagtcaccaaatttgtctttcctccctaacttagttattcaggaagattggtacagatgtcttagcataagtcgttctttttttttttttttccctaaacaaagaattaatctatttctttctctttgaattacaagaatgtttagtggcttgacctcatctgtttttatctggatgtaaatgtaaaaggtataatttttgaaatcaacttattgcataaccagtggtttctaccagcagacctgaaagcatttgtagaacatagggcaccccatatatatttattactttacatcagctttttgcaacttcttttaattgagaattcattcaattaggccttaaaatcaatcagtcatacttgaggtttggatgaaaatatttgatgtgagcagaaggtttcatccaccattgttggtgcacaattgccttttaagtcctttctacgggagtctacagtccctacattaatcgcccctgagccgcaccatttattccattaaaacaattcagtatgttaaccgttagagaggtgcatactctgtttctctccaggacacctttgcagtcaacccaagagggtgagaaatgttgcatttgcaaaggctaatgggaatgcaaatattcttgtgcaaaacattaaattccgtttttcatcttgctgacttcctcat

SEQ ID NO: 585694 - DNA, 4001 bp, Homo sapiens
tttgtataagggctggatgaagttgttgaacaccaaaggcaaaacctaacaacaaaatataccacattctttatttgtgcatggttaggcatttattattcctacatgtaaaatgcaatcacaactttcacttataaaagataaacattctttcgccactttaaagaaactatatgtatgtatattttttaaagtcagttttataaatgctatcattgattcaaaataaaggttttaacagagaaaaggtgaaaactttaaaaaaatctgcaaattttagttgacagacacagaatcagaccttgggaaaatgttcatgaaataaaattaagtacagcaggatttgacagtgaagttacatctcaaatattctcacagttttgaaccagaatctatgaaaagtctttgtaatttggaacgttctgggatgcttcagacaatgctttggaagattatgggttttacactttccagtattaaaaattcacaaaaaaaaatgttttttttctggatactacatacccacaatgtattagacaaatttttttaacgcccatgaatatttgcacaaacactcattttcttgacaacctagtttccttttaaacccgtttggatggaagtgtcaacctcttcccaaaatttcagatggaaaggcttaggagtgaagagtatatgatttaatcaaactttacaagtaaagttgcctgaccaaagaaaatattatatttgcttaaaaatcaactctcaactatttgtgctaatgcaaagggcagtgttgtaaataatccaagaggtattgttttcccatagacaaaaaactgctcccttttggcaactaatagctacatgacttaagtaaaatatttctcatctctaagcatcagtttctttgtctgtagcatagggttcttgagtaggtgcaatttctgttttctttgattgctaatactctgtgattttatgttgaaggtttaccattttgggccaggcgcggtggctcacgcctgtaatcccagcactttaggaggccaaggcgggtggatcacctgaggtcaggagttcaagaccagcctgaccaacacagtgaaaccccgtctctactaaaaatacaaaattagctgggtgtggtgacacattcctgtaatcccagctacttgggaggctgaggcaggacaatcacttgaacccaggaggcggaggttgcagtgagcctagatcgcgtcattgcactccagcctgggcaacaagaacgaaactccatctcaaaaaaaaacaaaacctttaccatttggacatcgcccctaccccttaatgcttcccttgggtctgtgttcaagtcagactgcctgctctgagcacagtgcaactggtgctaaaaggagagacaccactaagtagggaagtatattagctgaagtcgacaaatttggcctatataatccacatgtgaattatctacaggtggctaaaaattggaaaattgagagcagactacaaatgtatgccatataggaaacaggtgagacatgactaactcttcttcctgcacgacccccaagatccatttttgcacacaggtacatttcaagccttgagaggagtatttacaactctcatttatgtttaatgccttggtagaataacaagccatggttcaagtttactaaacacatctacagaaagagacaatgtcttctaaattagagaatcatcccacccataaatggggggttcttggagaggggggtaggggagacagacatttctcacctggttgcatgatccttggttttgctcctaagtatgccaggttcacgttggcctttctgccatcaatgatgggattgggatccttgcaggccctttcggcagcagcccggtcagccatggtgaccttagcaacagacacacacagacatacatacataacctctaaattaacccatgaaggaaatcaagaatcacaatggagaagtcattcatgataaaactgagatcaaactttttttctattctttgcttcttttggctggaccctcctccttgatctcccatttttaacaggcgggcgggggcgtggggggggggggcgggtagacgaaggaaaaaagaaagaaaccctctaaccctgcctccccccaccccaccgccgaaatcttaagggtgttagtagggcctagccgagatttggaagcctaaattcttggaactctagatcctccttcccccgaatcccccgccccccaggtccctactcagcctcagaggcaccgtttgctttaaagaaagtccagccttacatccgcccaacgctcccaacctcgaaaacactccccaacgacaatagctattgtcctactctggggctccctgctcttcggcagctgaatttgcacgcttaaatctctaggaaggaagcttaatatgctctgtttcagttcggcaaagagccctaggatcatgatttaaaagaacctacctttgcagttaaaaggcggggggatgacacaagggcaacagccccagacctcgtggggtgtcccctccctgccccagccaaaacaccagaacacacgcatttttacaaagcaacagcgcgcttaacaaccggcatccagcccgggaatgcaattgttcagggttgcggcccctccctcgcaaccctccgcaccccaaatcccgccgtcattacaggtctctcctttcacccctgctctgccctgcccggcccccgacctcgcacagcgctgggtcttctccgaaccccgcgaggctggcgccgaccctctcccctagcaaagtttcagttcaccccggagcgaaggggcagcgccgctctacccgcggggctcctcacgggtcacgccgagcccctcactccaagctcccgatccccggggtcagccgccactccgtccctccccgtcacccccagtccgtgcaacttacaaatccatagccccgggacttgcccgtctgccggtcggtgatgaccaccgcctcctcgatctcgccgaagacctcgaagtacttgcgcaggctggcgtcggtggtgtggtagggcagccccccgacgaagatcttggtgtacgtcgtgtccttctgggtcgtgtgcatcttcgcacccgccccgcggctcgggctccggctgcggctgcggctcgggcagcggctgcgcctcctcctccggctccgcgtctcccgcaccctttcgcggccgccgggggccaagggcgagcccgggggcgagggcggcggcgcggcgggggcgagcggccgggggcggccgagagcgccgggcgcgcggcttccgaagtcgccagcggccctggagacttgacttcgctctctcctcccgccccccctgccggtcaccgtacaaattctccggatcgtctggattagaatcgggttctatagaatgtgcaagcggtttccactcacccggcggggaggccaaaaatgaaaagagagggtagttctcaagcgaagaagcgggtgctttagaggtagatttttcttccttaggaatcaggtgccttgggtggggtgtggggagggtccgcgggaagagcgtccgagcgccgaagcgggcggggggcgcggcggcggggccaggggcgaggaactccgcgcagcttcggctctggtctgtccctcccgccgtgggatctggaagacgagtgccgaggacagctctccacctctctgctcccttcccccgcgggccgggggtcgacgcccggctggggaggggggcgggccggacgcctgcgattggccgcggcagcacctggggcgccgggcgccgccgccccccagctgttgggaacagctgcttctctccccgcgcggcgcggcgctggggctcggggctcccgctctgtagccggcgatggggtagggctggagacgcctgtaggcggcctggctctcggcgtcgcctgctctaaccagtcaaagtcttagggacccggcgcagcaccagccgggaccca

SEQ ID NO: 585695 - DNA, 4001 bp, Homo sapiens
gtacatttgttcttcgttttgaagtgatgtaataaaggataacaaaggtgtgaaacttgagttgcactgttaaagttgtcctacatttcctaaagcctcccctctgcatgataagttgagtgaaattctggctgaagggagagagaagtgtgagctggaatgctgtgacatcccttcatctccaattgtggaaaactgtgggaatgcatattaaaggaaccccagaaacttttgtttttactaaactgagacttaaaaaaacttcatttggcagttgaacacctctatcccattgtaagaaacaggaaagattcaaagcatgcattctgctataattcattttgggataagaaataggcagaagtacctcgaagaataaatcattaactaaaaggcaaaccgaggcaccctggaaaccagcgagacctggaggcggccgagggatcaggcggctgggatttgcctgttccctctggtgacttctggagcgaagcatcccacaggcaggacgaacccggcacactgcgctccgctccatttcacttttcaaacttgaagttatttttagatgacccaaggccgctaatcccaagcaggacaattctcagcccgctgcacctcagtgcacctaccccctccccagcctctgcattgggaagaagggatctctcgatcttctttgctctctgcatccagttagtctcttctagaccctctctaagcctcagtcccggggatcacaggcgtcatcctcgctccttcacttatgcacctgctgctgcttccaggaaggcaaacccccgggccacgggcagtggggaaggggctcctttggacccgcgccccctagaggggggtcgcgggagatctccgtccccacggccgcagccgggactgaccacagatctggagacaaaccccacccccgccactgcccccacccccgccaccgcccccgcccccgcccccgcccccgccctgcacccagacccggcccggagaccagatccccgccgcggacccccggcacgaccccggggctgctgtcagccccggcgggacggggtgcctgggcgagcctggccggcgcggttacataaccgacctgctgggcgtccgcgatgcgccggcggaggcggaggcggaggcggcggctggggcgtctacgggggccagctgctagcgcgcggcgctgcctgctcacctgcccgccggtgcgagcgcgtgggggcggcgcggtgcccgcgggcctttgcgtggggccgtacgcggcgcggcgcgccccgcctccctctctctgccgccgtgggtcagtgggattctgcctgctgcccgctcctccccgcaacctccgccgccgtcacccgggacaaagcggctccagggaggggctgagccggcggctctcgcaggagccggcggagatgggcgcgtccccagctccgactcatcgggccaacctccaatcagacccagggaaaccgaaagcccctgtctggcctcttctcatctcctccctcctgacccggcgccctccccagtcccctacccaccgcacctccggggctctcaccctgccctcagccccgcaccccctcctttccacttcaggtgcccgggagggcgcaggagcctccgggcacctggcgtgggagcctggctgcaggagtcccggcctcagcgggaagaggctcctcggggtcccatactaagctgagggtgagggggcagcgacagcccagaagaaatggtcagagaagcaaactgtggtgggggagtactgggagaaagactcttcttaccagatgtctgagccccccgactctggctaactgaggaaatgtcggggagcccctggatggtcctcccgggcttctgcgcttggtgggcgctggcgccctctggctggagccctgcgcccggcccagcccaggccgctgagggtgccctgcgcgggcttcacagctttgccaggatttgcagccatcagacctgaggacagaagggttcgggctgcaaggaatcctattgtgtgagagccatgacacagtgagtgggaggttggtatcctacagcaaacgggactgaaggtgaatcgcaatctagggtagatctgttgctcaacaaagttaaccccagtagaagtctctgctttacggaataaagcaactcaaatgggtaaggaagcctgtggcttacgggtggcacagataggaacaggactgagtctcatggcaagagaatgtgaattatgcaaaagatcataggagagtgcgggaaattaaaggaaggaggtgtgcagaccaatctgagggagggagtgaataacatttaaatcaggtttgtgttctgtcatctttcgaattgctgcataaataagccgttttctttttgctttttatgccttttgattttctgataacaatattacgattgcactgaagcagtccattcacaatcattcttcacttacccacactacgttgtttttttccaaagttgacatacaatcacgttttgtttgttttcaacaaaaaaaggtagacgagacgttggctcttctctctgattaatctgcattaacataaacacaatttcagaattgaaaatgaccttaggcttcccctcgttcagccttcccctggatgcataaatctgtaattagtcgttgatttagataattgccatttgggttagaattgtctgaaagggcattcttaagttgagcaaaaacttgcctccctttaatcattagttctcccttactttttgaagccaaagaaaccaagtcaaattcctcttctaactatctttaaaatatgtaaaaatagctagcatgtctaatgcactccaggatcccctttctttccaagtaaagcatccccaaccctttaaacaaaatctcacttattattagtgagtacttcctagaatcttcgtcaaactgatgactttcatcttaacagggactatttattattttgtgaatatacatttacaaataaaattttcagcttatagaagcaatatattcattgcagaaattttgaaaagttggaaaaacacaggatttaatctgagaactaaatgaggtaatacatgtaaaacacctaagcacagtgcctggcacacagtgatactcaatatatgttagctgttaccaaaatcaacatagccattttcctaacaccaaatatagatattgttacttttctagatgctgtttctgagttctcatagccacatattcctccttctactgctaagagaaattctgtgtttgtcagtttgtgtgaagaaggaagcataataaatgaggaaaaaaatgaaaagtgacaaacagcctcatgttgtttaccttgagaagaacaaaatgttactagcaaaacaaatgttaatggcaagaagaaaatacagagagaaaaagagtttatgggatggggtctgagcttgaagaggattttggagagcaggagtgaggctaaagggtagctaatgttaaggatggtggtaaataagatcagaattttggtttgctaacatttattgagcatttagtatatgccacgctccaagccaatgaatttttatacattaattcatttcactttcatggcaactctattagataggtactataattaacctatagtaaagaaagcacagaaagattaaataaatgacttgctgaagctaacaagtggaaagctgaattcacacctagacaacctggctttggagtccccactagactagactgcctctcaatggttgtatgtgacattataaatataaacttttaggttcacaggaaagttgagcagaaagaacagaaaactcccatatactgcctgcccccacatatgcatagtctccctgactatcaaagtctgacacaggagtaatacaatgaataaagctacatgaacacaacattatcaaccaaagtccgtagtttacagatccactcttggtggtgtacttttttgagtttagacaag

SEQ ID NO: 585696 - DNA, 4001 bp, Homo sapiens
ttattttcttctccttttctgctaaattgatttctgggaggcatgggcctcattcttttagcctctggcacaggacctacaaagcacacaggaggtgctcaacaaataattattgaattgatcgagtggatgctacagaacgtaaaataggaaaatgagacctcggtgattgtcaatgttagtctcaataaaaagaatttgtgatatgtatgactgtctgcaaatgattacacaagtggtttttaacaccgtgatgtgcacttacaaatgagaaagctctcgagttcccacttctgtctgttacacgttcatcactggagaaagagtcatgccctcccaaatttaggtgagttctggaggacctgcacacactaagcattttgagagctctcagaatcatgtagctttagatgagaacacttttccctcacaaaattctatggactggactcaggtagtagatgctcagtaaatgctgatttgatttgcagtggatttgaatgcaaagtgcaactcacattttagactaattgaactcaatggctgatcatacttaatataatagctctaaggctaaagaaaatcaatgactacactgaaaagcagccaaatgctcactctcctgcctagttgacagtcaatgctgacctgcctcttgatcctttccagcttttgggtatttccaacttcactgtgcccccagaatgcagaggccggttagcaagtgttgcgtggtaccttgtggtacatttgttcttcgttttgaagtgatgtaataaaggataacaaaggtgtgaaacttgagttgcactgttaaagttgtcctacatttcctaaagcctcccctctgcatgataagttgagtgaaattctggctgaagggagagagaagtgtgagctggaatgctgtgacatcccttcatctccaattgtggaaaactgtgggaatgcatattaaaggaaccccagaaacttttgtttttactaaactgagacttaaaaaaacttcatttggcagttgaacacctctatcccattgtaagaaacaggaaagattcaaagcatgcattctgctataattcattttgggataagaaataggcagaagtacctcgaagaataaatcattaactaaaaggcaaaccgaggcaccctggaaaccagcgagacctggaggcggccgagggatcaggcggctgggatttgcctgttccctctggtgacttctggagcgaagcatcccacaggcaggacgaacccggcacactgcgctccgctccatttcacttttcaaacttgaagttatttttagatgacccaaggccgctaatcccaagcaggacaattctcagcccgctgcacctcagtgcacctaccccctccccagcctctgcattgggaagaagggatctctcgatcttctttgctctctgcatccagttagtctcttctagaccctctctaagcctcagtcccggggatcacaggcgtcatcctcgctccttcacttatgcacctgctgctgcttccaggaaggcaaacccccgggccacgggcagtggggaaggggctcctttggacccgcgccccctagaggggggtcgcgggagatctccgtccccacggccgcagccgggactgaccacagatctggagacaaaccccacccccgccactgcccccacccccgccaccgcccccgcccccgcccccgcccccgccctgcacccagacccggcccggagaccagatccccgccgcggacccccggcacgaccccggggctgctgtcagccccggcgggacggggtgcctgggcgagcctggccggcgcggttacataaccgacctgctgggcgtccgcgatgcgccggcggaggcggaggcggaggcggcggctggggcgtctacgggggccagctgctagcgcgcggcgctgcctgctcacctgcccgccggtgcgagcgcgtgggggcggcgcggtgcccgcgggcctttgcgtggggccgtacgcggcgcggcgcgccccgcctccctctctctgccgccgtgggtcagtgggattctgcctgctgcccgctcctccccgcaacctccgccgccgtcacccgggacaaagcggctccagggaggggctgagccggcggctctcgcaggagccggcggagatgggcgcgtccccagctccgactcatcgggccaacctccaatcagacccagggaaaccgaaagcccctgtctggcctcttctcatctcctccctcctgacccggcgccctccccagtcccctacccaccgcacctccggggctctcaccctgccctcagccccgcaccccctcctttccacttcaggtgcccgggagggcgcaggagcctccgggcacctggcgtgggagcctggctgcaggagtcccggcctcagcgggaagaggctcctcggggtcccatactaagctgagggtgagggggcagcgacagcccagaagaaatggtcagagaagcaaactgtggtgggggagtactgggagaaagactcttcttaccagatgtctgagccccccgactctggctaactgaggaaatgtcggggagcccctggatggtcctcccgggcttctgcgcttggtgggcgctggcgccctctggctggagccctgcgcccggcccagcccaggccgctgagggtgccctgcgcgggcttcacagctttgccaggatttgcagccatcagacctgaggacagaagggttcgggctgcaaggaatcctattgtgtgagagccatgacacagtgagtgggaggttggtatcctacagcaaacgggactgaaggtgaatcgcaatctagggtagatctgttgctcaacaaagttaaccccagtagaagtctctgctttacggaataaagcaactcaaatgggtaaggaagcctgtggcttacgggtggcacagataggaacaggactgagtctcatggcaagagaatgtgaattatgcaaaagatcataggagagtgcgggaaattaaaggaaggaggtgtgcagaccaatctgagggagggagtgaataacatttaaatcaggtttgtgttctgtcatctttcgaattgctgcataaataagccgttttctttttgctttttatgccttttgattttctgataacaatattacgattgcactgaagcagtccattcacaatcattcttcacttacccacactacgttgtttttttccaaagttgacatacaatcacgttttgtttgttttcaacaaaaaaaggtagacgagacgttggctcttctctctgattaatctgcattaacataaacacaatttcagaattgaaaatgaccttaggcttcccctcgttcagccttcccctggatgcataaatctgtaattagtcgttgatttagataattgccatttgggttagaattgtctgaaagggcattcttaagttgagcaaaaacttgcctccctttaatcattagttctcccttactttttgaagccaaagaaaccaagtcaaattcctcttctaactatctttaaaatatgtaaaaatagctagcatgtctaatgcactccaggatcccctttctttccaagtaaagcatccccaaccctttaaacaaaatctcacttattattagtgagtacttcctagaatcttcgtcaaactgatgactttcatcttaacagggactatttattattttgtgaatatacatttacaaataaaattttcagcttatagaagcaatatattcattgcagaaattttgaaaagttggaaaaacacaggatttaatctgagaactaaatgaggtaatacatgtaaaacacctaagcacagtgcctggcacacagtgatactcaatatatgttagctgttaccaaaatcaacatagccattttcctaacaccaaatatagatattgttacttttctagatgctgtttctgagttctcatagccacatattcctccttc

SEQ ID NO: 585697 - DNA, 4001 bp, Homo sapiens
cttttctgaaacgaataaagtttagaatattttatgacattctcagggcaagtgtgtaaacaacagataactgttgaggacagaagggagctgtgaagttttattctccatagatggaattatgttccagtggttactggaagatgtctctctacctggttacccacactggacttgacgctggctttaaatgactgctctcccttctcaagtgctatggaagtacgactggcaggactgtgggtctctgcatgcatgtttccattctcaatgcaatcacagacagtgccaaacctttatgtccttattttctgaaccttcatatgacaggtggtagacatttccatggcactgacacaaaaattagtaaatacagggctacatgtttaaaatattcaggaacaaaatgccagattatcaaatctatttcaaaagattgttaaagctgcaatcttgaatgacatagccatgtgctatgccaagaacacataaatccccacctgtaaagcaccagggtgtcacctgcacacccaacaataaagaattcagggtttttccttaagttaagactaaagcaaggatggtaaatgattatgcaatgtaattcaccttttattcctcccaccacacaatgaacaactgaccttctgtgcgtgtatatgtgtgagtgaactgtttaaataagaagcttcagctagttcttctattaaatatgagagaaaaaataaacatttccattttgcaagcctggcatcttctccataatataaagccaaatggaaaataaaagggaatgaatatcatcagaggacgattacctatgacaagtcaacaactgctgccggcaatcagtgaggaccagcatgtataatactaagccttaagatgcgaaatatttatgcctaaactttatgaacaactgctcaaggaaaatgacttgctttctttgcctgacaaagaaaatttaggcagctgttctccaactttgatttccagaaagctggggactgaaactgccatctgtagaacagctattgtttaatttgaagaccacatcacaggatatttaagtgacatgccagaaagggttattgccccactgtcaggctggcctggatgctgggtttattatgtgtgctttcttcatgtaatcattgattcaaaatccctcttgacattgagggctggaaaattctccttattgacaaagatacaatatgagaatatgaaaatgtgtctactcagaaaggactgaccagggattacctaataaaaaagacaagaagaaacaatggcagaccttgtcatatttaaaaataatatgctggtccctcttccaacttattctacttaatgcagccatgcactcactacatgcatttctagcgcagactatgagctgaaaactattaaccaaagtcttatttcttcatgctaaaaaggctctgccaagcagcgtcagtaacagcaacaatgaaaaataagattgcaggtgcataccttaacctcctgattggtaaagacctcgacatccaccacacaggcaaccagagtggaaacatcacagtccatgctaggggctggcattcccccttctgaatttttaataaagagttaggcaacctcagagttgggagtgaagggaagagcttccagatggatattgctgtggccaggcctcggtgctgccttgctctggggacggctggaggctcgggctcctggagcccgctcccactgcacgcagccctccgcgtctgaggcagcacagcagagtaacgaacggcccggctcgctcatggcaatgacatcaccacaaagactgacacaagctgaagctatttttttttctccaagccttttatctctaggcagtgcagtggagcaaattgaacatgattatgtgctaaatctgaactcagactaaatcaattcaagcagcgttagctaggaactgagtcatagctgttgttgcagccgagtgcttatgtttgcaaaaagcaggagggggtgaatctgacaccagagtttcttctttgaggtgggggaggtgtaattctgcagatgagcctcctgaggttaaggtttgacaattttctgccttcgagatgagcaggaagttgaggcattttgcaaattgcttggcttctgttaattgctctgtgccactcagagcagccacacatgttctgggcatcctaatgcatcccgggcatgggctgaatagaaatccgttcttggagtgactaaagagctggtcgtctgtcatttagggagcatggtaagaggagataattagaggtttgtggaaattctatttgaaggctataagtgcagaccagtaacgctaagagcacccttccaagctcaggatttcaggctgtctccaaggtcattcaaaccaaaagcagttcatggaaaggagttacagcaaatatttcacacggggacagatggcagggtctaacgggcaaactcactgatgtgtctcagagcttgtcagatcctcggggcttgacttcacctgagactttgaacacatccttttgctttctcaggcttttttcctgattataaatccctgaggggcaaggccacagatgatttacctttatatcttcagtctttcacagattgcctggcacaagaagatgatacttgtttaataaataaatcaatcaaacaggaatagcctcctttcacaggagtgaccaaaggaaaaatttccaattgttttttattttatcattagttatacaagtcccagtagaactcactaacattgtagcagtatctatccttaagagttcagttgtatcttcagtggccactggaacatcctgatttataacagattggtacttttctaacatatgactggacaaaagcctcccaattttacatgcagatgagaaaggtgacatttcagactgagagtagaagctttctcatttgtcctcattggtgtacacttgagtccaatgttccccttcaacaaggcattttctatgctaaaggtaatcaggccacaaatatggatatttagactgatgaaactgtgtgtgtgtgtctttgtgcatttgttcaagtggcatttatttcgctgtccaggacactgtgggaaatattaagtcatatatgcatataatccaactaatatcaagtaatgactatgcaaagctctgcatctgatactctcaaggataaaatgatgaaaaagcaaatgtcactatcatcaatgggcttaaaatccaggggaggagataagacatggagaccaacatttcacaaggcagggatggtgatggctgaataggtataggaagtgttcagtgggagcactggagaaagagcaatgaatgctgaatgctggatcccatgttaggatggcaggtgagcatcaaagaaggggaggaaatttctgctctgaccttgaaatacgggaaagatactggcagacagagaagtgaggggtgcccttcagctaggtaaaaacagactagaaatgtccaaaggaaagaataaggcatttggatgcaaaactcactcagggttaaatctggctggagcctgaagtatacaaggcagccggagccagatgatgcaaaacctggccaacatgaagtaccaggcagcttttgaaaaggtaaatgggggatctacctgtacaagtgtagctaaaatgtaaagtaatacaaagatgaatgtgattttgaatatcactggcatctgttcaagaggcaaaacaaagaaatgaatattttttcatatgccatggcatatcctaaaatttattttttacatttcacagcatactggtaaatgtttaacaatcagctctctgaaaagaaacatttcaatttttagcattcgtcaatttctatggtgtaaatatgctcatcatggctgatttccagcagtcagtgtgaagtcaaactgaatacaaagttgggaagacatgcatgtaatctgctcacacgggctgttccagcacatcactg

SEQ ID NO: 585698 - DNA, 4001 bp, Homo sapiens
gcccttcactggcacgtaagacatcccacctttaaaaaagcaatgtaaaacacaagaccatttaaaaagatcgaactcgttcaacttagtcatagttaatgcagacttaacttctaaaacagagacctgtgtgtggacatttttattcttcacagaatttttgttggaagaaacttgccttcattctgtggatgaacatacttatgcttgaaaatggaaagtgcctgacccaaagtcacactgctggttaacagcagagtagggtcaaggacccagccttcaaaaccctggtccaatgctttgcagtccactacatacacctatacatgtggctttaaattttggagatgtggataactagcttggatcaatataaaagatgaaagcttaaaacctgttcctaacatactgtttagacagactcctactagcagctatgaatcattaaacagagtagcattaatgctcaccacatacattagataagaacttctaggaagtcctctgtttcaaaagcagatatgataaaaaaaggctttaaacctacagggtttgctcctccagggcttcagattagggcaaataacgcacttctgcctaccagctgttcaatactcatctcccaacccaaatccacaagttccacaaatgctttcgaatgcctgttgaaaaacattgttcagtctcatcacatacacacgttctacagataattacaacttcttgtatgcctacttgtaaaactactaagtagttcacattttaaaaaatttccctaagaattttgcttcctttaaaaaaactgcttcttcgattcctaaatctatagaactcactttatcacgtcttctcggttaatccaagaattaaaaaaaccattttgcccatactgataactttactactctgcaggatccgaaaagctctctatatgccaggttctaggattcacacacattaacaacctaagatccttcaagtgagatagctcttgcagtacagagcacagattctcagggtcgtgggggataccggctgaggctcttcagacccccaccacaggagttccgtcctctaagggcaaccccctcccccttggccgcggcgcgagtccaggcctcccgggcacctgcggcccctgcccgctgcggggaccccccgaggaaccagccccccgccgggccccaaggaatcggcgcccactcccactcctggaggccagtgactgcaggcctaagccgcccgccggccccgggacgcgacgttacctgtaggaccacgtcgttcggcagctgcgcggcccggaacagctccagcacccgcccgttgaccaccaccttcttggtgctctcaatgtcgcagtaggagaagagatctgaatagtatttctgctccgcatcgctcagcgttaagccttccatcttcgcctccggctcacggccgccccgccccgcatgcactactcggggcccggccccaggaacctgggccggcaggggctgcgcgtggcccggcctcctgctagcttcccgaaaacgccggccccggcctcacacgcgccaggtgcgcccgagcaacagggcccggaggtcgcgaggagggggcccggctgcgctcgccgcgccgctgcctgcgaggcccggcgcgcggctgcggctgcggctgcgactacggctccggctccggctccggctccggccgcggggagggtgcagagaaagaggcgggggccgcggaggcgcgaggcactggcggactccgcccccgccgcgggttcgagtctccccggctccctgccgattcccccagacttcccgcctcggcttccccttccgtccacgcctccggagcggcagcgcttcccggaaagttgtggggcttcgaacctaaagtttcgggggatctgggctgagcgtggccgccgctccgcctccctccgccgccatttacagtgccccggcccggccccgacgcgcccgcaccaacagtgacagcggcggccgcgctccagacccggatgtgaggccgggaggagagagcgcgagagggagagagaaacacccaccgggctggcttggccgctcccgggagagggaggaggccgcagcgccccctggtggccggcgcccggcggcgggatgaccgagccgccctctgcgcggagatctcagcagcaagacccccggaaaggggggtgcagtgggaaacagccggcagctcattaagaccgagataactaagatccgggttgcagtttttatgtttcgcagtttctggtcctaagcgtctgaataattggattgaaaggggagccttgttcaggttattatcattctatctgtaccttttcggtacagatgaagataaatgcagtatttccatctgttctgaagggctatgaacatccgggctatgaacatcctggctatccgggaagcctccacgtagacaccaacattgaggcttcatctcactcgtgcttcaagccatgtttacctgagaaacaaaatgtgctgaatagaggggaaaactggcaaagttgtcctctttgttcaccaggtcattccggtcactgggaacttaatactctacatttataccttcaactctatcaactcatgtaggcccggggctgcccacaggggctgccttccgtattttctcctttatgaaaatcatggagtggcgctcttttaatctgcacctgtcccagagaggggattcttcagctatttcaagtagaatatcttaagaatttatacttagcaaatataaaatacttcaaagacgggagctaaggcagaattacccagagttctggtttttattttgtcttctacaagttgtttcccagagtgcggatcctataaatgacacatatgaggaaattattacaggttcccagtcatttatctgtaattgcaaaattcaaagcgcactgaaaacccaaagacttttttttgtaaccctttggaagtaaaacctgccctgcctcatttggaggcaaaatctaaactaagcttgcatgaagctatttctagcctttatggatcccacttagtgtcaatatttactcatttcactccaggtctttgtagaatgttaatatgtacacagtcacaggcattctattatctttctattttttaagaaagataagggattttagacctgtcaatgtcttctgacttgactagtagtatttgataaaggtaagtatatactatccattaagcttatttcccatctctaagactttcagtttgctacagcagcccctcatgtgtcctttcagggcacctgcagcaagtgatcagaccccccccagacagctgccttccaaaggtgtaaacagaaagagcacaatggggtagggattggctcacaattgtctttgcatctttttctctgccacctctcctaggccttgcagctcttgtcggccccagggcctttgttcctgccatctaaaatagtccttccacaaaccatggcatggcgtattctctcatatggtttcaggtccctgctcatatgtcacctcctcagagcagccttcctgcaacagctgctgtaaaataatcccaccatgcactatccccttatctgaattccttttttttctcttttgagacagagtctcccactgtcacccaggctggagtgcagtggcataatcttggctcactgtagcttcgacctcccaggctcaggtgattctcccacctcagcctcccaggtagctgggaccacaggcccaggccaccatgcccacctaaattttgtgtatgtggcttttgtagagacagagttttgccatgttacccaggctggtctcaaactcttgggctcacccacctcagcctcccaaagcgctgggattacaggcatgagccactgcacccaacctgaattctttttctttataacacttttcactatctgacattacatatatagctgttacatttttaacggctaattattgaataattactaag

SEQ ID NO: 585699 - DNA, 4001 bp, Homo sapiens
tttcctagaactccattatttcatggaagcagttcaaagcatgcaaaaaagcaaaaccattttaaaacacctagtaaactgggcctctatcttttttatattatcataagccccaggagtttttgagaacgtaccttctgtcacggctgtctccccttcccatcccttcttcaacatagttgtgtttaaaaaatatatacctgtacttaaaacgcaatcctacagcccagcctaggagcatttcaaaatgtctgtgctgctgagtctggctgtggttcctaataaattcaccccattaagtgtgatgttttaggttgggcaacataaacacgcatttcctacttccatggatgcacatttcctgaaagcactgcacctaaggatgctgccctgtcccccgacgctcaggcactaaactctaaggagtcacgacctgcactcacagcagagccacacggtcaccccagtgagaaagattatctggccccaagcgccactctctccggcccactgcatctccggaactggcagaggagagcgagggtgagaagagaccatggggagcgactgacaacaaggctgacacttccccgtttccagaaagcggcacttgggggacacaagggatgtcccactagcgaccgacctcagagcaggccctacgaacccgtccaccgatggacatggcgcggccacctggcccgccgtccggggcgcccgcggctttcgctctcccggcccgcgccctggagtgcggctcccgctcccggccgccacacgcagtctaaacacgcggcgctcgccacctccctgcccgggggtgggggcgccgcgcagcgctcgcgcggacccacatttttgcggctcttgtcacgcacgagagaaaaggcgaggagggcggaggggagggaagacgcggcagcgatccacggagacggccggcgccggtggcgtgtgcgcgtgtgcgcggcggggagggcggccccggcgccccgccgactcccgctcccgccccgcgcccggcgcccgcttacctgccggggtcgctccgaagactcgcaccaccggcaccttcttgacaggggcctgggtgaggggggattggcaggtatccagcccctgcagcgggctggccatgtagtagtctgcagtcactatccttactgaaaacatgttcgccgccgccgccactgcctcccttcactggcgacccggcagcggcagcagcagcggcggcggctccctccgcagcggcggcggcgccccctccccttctcggcacggccccctcccctcacacagaggcacctcgaggagcggcgggcggggcggtgtaggcgctgctgccgccgcctcctcaggagcacccggcaaggggccgcaggagagaagccctcgagctttcgtcggtgctggtgctgccgccactgccgccaccgccgggaatcacacgggctcctcggtcccaggctgcagctcttgttgccatgatgatgatgtcacggacgcaaccactggggggaggggagaggggggtgtgtgtggcgaagggaggctgcgagtagtgcgggggagggggctcggcgggaaaaggagcgagagggcgggcgcccgggcgggacacggagggcgggggccgagaaggggctttctccccctccccgggcacgcggcgagggaggcggccggcggccggcagcgcccgcgcgggatcgatgactcggctggcgggcacggtcacctgggtgaggggcagcggaaggggcggcggagcaccgatctcatggatgggctccgaggggcttgcgggaggggggcgccagtgttcggggccgttttggcggctatgcaggattggcaggagctgcgatgctcacacttgcctcgccgaccgccatttcacatccagcagaggaggcgggggcagccgctgagacggtttttcacaaggtaagaaaatccgcccgcgtgaggagggaggcgaggcgcagatctcgtgccgctgcggcctcgcgggagggaagggcgggcgggcggcggaacgggcggggccgggtgcggacgcagccggcccttctcaggtaacgccgcggctccgcgcgtggcccgggggcggtgcgaagggtgggggcgcgcgggcgcgggcttcggcctataaaagggccgccctggcgttcccccttcccgaacgtgccgcgcgagccgcggtgccccctcctctttgctgctgcagtgtctgcgccgggccatttaatgagatttattcacgcacggctcttctcagctttgcgaggggttggcagatccagtgcacagggatttcccactaccgtgtttttctcccgcccccttccttccctctcgtcctaatacatccttcgttggtttcctcggccccgcaggctgcgtcccgggcacgcgcaagtacatgtaaggacttgtcagctgccggtgacctccctcctccctcgtcgctcctcccccagcggaatgtaggattaacagtctttccgagaaaattttggccaaagaaaaaggcctgtgaaagtcaccgcgttagacgtggcctcctcgtgtttttcactaacacgttatggaaggttttactacccgaaggcataaaagcaccaccgtggggaagggccgttttgaataaacaactttattcaaaaatcgagagggggtgaagcgatgcagttagggaatttttgttttaaagagtagtaacatgcagctggcttggctattaaattggaaacaaggggttcctctctgacttggccactgatattgggcgtgaccttggacaaataattttgtttctttgggctcagtttctacatatgtaaaacgggaaggtttctcttaaaaactaatcctgaagggtttcttctcaacaaaaagatgcaagctgtaggaggcagaaagcgtgggttcaagttcgaaatttgcccctgaattaggacccttgacacatttctaacccatccaagtagagatcgttcttttacatttgtgtgttatacaggtgcattttagtggttaccaggttgccacgtatttgaagtggtgtgagagctactcgtttggaaccgttgtggattttcaaataggaaaatcaaaaggcccaaagagacagctcactggtaagaagctgtctataaattccctaacatataaatgctataataagaacttacgctccgagggatttgagactgattactacagtaaattagcttgtagtttttaacctcagagcatgattataaacatacgtggcaagatttctactaatatgctggaaattagctaatatttttaagaggcaaaatctcttgatctgaaattttagaaggctatagaagtgattttaaaatatgactaccatgctaaaatgtattttttataaaataaatattttgtacacgccgaatgtcagatacacaatatcagtgattctcagtgttccatgacacctagaattctttaagtgttgatattttggctcttactgaattatattttgggggatggggcctgggaatctgtattgttagcaacactacttgccaccccgtgattcttaagcaaaataaaattgagaatccttgtactatattataatcagtgtatccataacttttaaattataatattcctaactagaaaatggtaaaagcatcaaattaacagatttgcgatttctagaagagggtttctttccccttacctcttgaatcaacattatttactttaagaaaaggcagttgcaaccacaagtcaaatccttctagaactccaagaatgttcactcttgaagaaaaacatttgcagcatgaaattaggaatgttgtgttcattgcatgtaatttagttttaagttgatgctcaaattgaaaacctgacaatagccccctaattaaccactatcaaatgtgttttatatgtatattcttcctgaagtaagaaaaagttctggaattttgagtcagagaatg

SEQ ID NO: 585700 - DNA, 4001 bp, Homo sapiens
gcagcttacctagtctgaagacttccaggtgatgtgttggctgctccggccaaagtttctcctaatgggggctgaattcaagtgggtctttaacagaatctcagtatagtctccactcagtatttctttgtagatcctctgcagttcaggaaaaagaatgttcatgtctaaattcaataatgaaaataaagccaattctacattaatcatcacagaaaagtgactctaaggaatcctcagaatttccaggaaaattaccacatgtgagtaaagccagcaaaatccactgcaaaatgagaagcccataaaagaatcaagtttaaggacaaagtgttattagatgaaatgctttaaagcactctaagaaaactaattaaggcttgaattaatgtgaataaaaatataatagtcatcaacttctccaaaataatcatgcctgaatacaaaccaaaaagatgttccagacaaggaagatgccctcctgttaccccaactgctcccaaagcttgagagcctctggtgctcccagaggacttcccaccatggctattattctttgagtgagctgtctctgacatgctgggcacagcatattggaccaggctagacccatgacccaaagacagcctcgcaaagctggacagcacctttgagattatgtgaacagaggactgttctccaataagagcctgcactgagcagtaactagcagaactccttaccaagaacccacaaatcacacattcagtggtgacagtagtaacagaatgagggacagaaagaggagcagcatcaacattaccagagagaggaagtgatgaacaccgatgaggccagcctaagactgagttactagaactgtcctacatcccagaacacattctctaatctctttccaacaaatacttattgagccccttctgtgctcttggcctcaactggactctggaaacacaaacgtgtgtaataaacagggtatctgcccacataaaactttgtcttccaagtcctgatcagcattccaatctcatggtgcctggctggcggacaaccagagattacctctttcttaaattctgttatctttttcaatttaatgggaaatttaacatggtgctggaaatctaattgcctaacccaccttggaatgtatctaagaaaacaattttacaaaagaaaaaaaatgctacacttattcacaagttgttcatttcagtgttaactaccatcccaaatgatcaggaacaatcgaattatctaacaataataaaatgattcagctaattatgacacaactactaaaagtggccaagtatatttaagtgaaaacccgaagtgaagtctttttttttttttgagacggagtcttgctctgtcgcccaggctgggggtgcagtggctccatctcggctcactgcaacctctgcctcccgggttcaagcaattctcctgcctcggtctcctgagtagctgggattacaagcatgtgccaccacgtccggctaagttttgtatttttagtagagacggggtttcaccatgttggacaggctggtctcttgacctcgtgatccacccacctcagcctcccaaagcgcaggcgcgaaccatggcgcccggccgaaaacccagaaatcttttaagaaatgttggaaaataaaaagaaaccattttaaaaccatttaaatccattgtagttgaaaacacataaaaatacaagttcatgcaaagagtgacctgaggttcatatgtaaaaatttaaatggcaaagttatagttaaaggtgaagaaagctccctggcacaggaaaaaactagttctttctcctctaaaataaatagttaaaggcattcgaaaacaccagtttgtagccaaagacagaataggacattggaaatagcttaaacagaaggtataacttaccttgacttggagacttccagcagaattctaaaagatccgaagcctacgtctctacctctacagacctctgctcctctcggagtttccgcggagagacaccagcgtttttatactgcctggaaaacattgtccaaccaatcagagtcagaggctccgccccaaaggttgtaccactctaatctgagtaaactcatcaacccacccttccgtttatgatgatgacattaaagcaggcttcaaattatatagtaaaaaaattcaaaatttcttaataactccctgaattagagtgaatctactgccatctgctcttgtctctaatttcagaactcaactttaaaaagcaaaatgtgttggagatcaaatacagaaatgcactgctgaaacctaatcacctcgtggctaatgtaatcattggtgttcctattcctgatagaatcatgagcggacaggatctacaacagttttcatgtcctttgactcaacaattctactcttaggggtacttactggacaggataagaaagatggcagctaggcaaggctattgtcctgtaattattaataattccattttttactctcaaaagtgttcttggatgaacggtaaattttatggtgtctgtatcgagagcagaaggagcagtaaaagtcacaacagaggaaagctaagacacaaacttccaaaaaaggatttggagggtgaatgaagtcccattgtagagaggatcgctggaatatacgttttccccaagagaggctgcattctaaataacctctcctttctcaggcttcctgttctgcaaggcccaacacacagcttacacagcttttacttcatttttacctggtgctatctccttttctgtgagttaaatacttgcaggagcaggtctcaagcgttgctggggtttttttttgttttgatttttgacacaatcttgctctgtctcccaggttggagtgcagtggctcagtctcggctcattgcaacctccacctcccaggttcaagtgattcttgtgcctcagcctccctagtagctgggattacaggaggccaaggtgggcagatcacataagtttaggagctcaaactttttaaattgtaatctcaagaccctttaaacttgagattttaatctcaagaatccttacactctcttttttaattattcaaaaatgtcattttattttttctttcattttattttgaaataattttagacacagaaaatttgtaggaatagtaaaaagagatatattctttacccagatttactatttgttttttaattgtctgatgtatgtatacactgtgaactgattaaatcaagccaattaacatatctgtcacttcacatacttatcattttgtcatgaaaatgttcaaaatctactatcttagcaatttttaggtgtgctatacattatcattagttatatccaccatgatgtacaatggatctccaaagagtattccttctatctacctgaaaattttgtaccttttaaccaatatctccccatttcagtcttcttttcatcccagtgcctggtagccaccattctactccatgcttccatgagttcatttttttttacttttttccattccacgtataggtgaaatcatgcagcatttgcctttcggtaccagcttatttcactcaacataatgtcctccaggttccatgttgttgaaaatgatagaatttcttaagactcgatagtattccatcatgtacatgtaccatgttttctttatgtattcatctattgaggaatatcctgattctttatgcattcatcagttgatgaatataagttgattctctatcttggctactgtgaataatgctgttatgaacataggagagcagatatctcttcaatgtactgattttattttctttggatatatattcagaagtagaattgctagatcacatagtagctctatttttagttctttgaagaacccccatactagttttcataatagctgtgctaatttacattcccaccaatggtgtacgaggtttctcttttcttcatatctttgccagcatttgttat

SEQ ID NO: 585701 - DNA, 4001 bp, Homo sapiens
acaagttttttctttgatcttaacttatatatatttatgtatacatttattcataaaagaaacatatatttccacacactcaatttaaatggaaaaaatggagtaatcattcgaaacagctcaataatatatctgaaatcaaaacacttttgccccagttatcctgctgcaaatagttgtatcctaaatatcccagatatttaactcaattacttaactgctctagtatattcttaactagtaaccacgacatcaacttcaatagttaaactccaactttagatgaatatttggcttatatttcaaatattttgaaagggttcaagcatataatcacaaaaaactactatatgtaaattgtaatttaatatttaaataaataataaaaataaaatttactagttctttatcttgtatttttctaaggctccttagatcatactttacacaaaattaggttatgtaactaatcagtaaatatatagtcctttttattagtttgttttttacttggaatttgtgaggaaatttatgctcctatttcttcccactacgtaggaaagtttaatataatgcttttactttagagccgtctttcttttagatagatattacaaaatgttcactctatgtggaaatcctactgataaattcttggttttaaaagattttccacaaaatccaatttgtaatattttattattataaatcatatatgatagatggtataaaaatagttgaacttctatttaagttagtatagatatcttaaccgattttttctatgtcttctacctcaaacacagttcatcttatggagtatacactatttttaatttgccctcttttgaataaaggcagtgttaagatccttcctcattttaagttgtttttaagaatcatattttataatctcaaaaactatcaaacaacaaatatgtaaggactgaactgattgcatattaagccagtaagtcataaaaacgttcattaatgcttacatttgaagaaaatatggttttagtcaataaggaacaacgtaatgtggttttcatttgtattgcaaatccttcaccagtacttgtataagtctctatactaaaaattcagtgaaaaaaattctgggttaaattctaattggttttttaaactttcccaaaaagtttgaggaagaagtaaattgtgaaaatcaaagatcctgaagacgctggctgttaaaacgtcaacaggtgcttcagtgtaccctgcgggcgagtctcaccactgcagcgtgagctgtgtctgcttctttttatccttcacaatctgcgtgatggttttcttctgagacaggtattgatccgctgctttggttttgctgtcgtggttgtcggcgtcctcttcttcagaggaaaagttaccattgtttaagtgcatttctgattgccagttgaagggatgataaagaaaaatagaatataaaatcaactaagtcgcctttaagtgtaccttaacttcaaaggagtagcctactggggtgggggcggaggggaggaaaggggggctatgcaaaatgtcaggtctctacttgacattttactgaggaaatacaaagatttggacagaacattctatatctgccttatgtttgttcgggatgcattattattattgggtgcccttcttagaatacgtccccgtccccttcccagctccggatgcggcagagcactcacctgatttcactgcccccggcagctccgggtcttcgcctttctccccgccgccctgctcgcccccgggctgcccttcggccgccaggtacactgtttcttccggatagactagcaagcccttgcccaggagctgcacacagcagtcttcctggatccccggggacagttggggcgcaggctgcgcctgcaggaaggtgtcttccagctccgggaccttggccatcctcctggccgccggacacctccgcgcgcgccgctcggccggttccccagcggagccccagcccggggcggggcggggcggggctgggacccggggccgcaggggcggggaaggaggccgcaggctccggggtgccctggctcagcgcagaaaggacgccgcgcacaggtacagcccaggccgcccgggagccgcggtgggccgcggtgggactgcgtttctccacctgtctgcggtcccggcagatgctcccgcgaaactcactttctcacctgcgcctgtcacgccctgggcgcccacagcttccccctccttcccgttctctcaacctgcgctggccggaggaccgttttcacactcagagctcccagaaagatcccgggaaggctcactgtcttctgcagggaaagtgcagctgtaactggccccatccctactttcaggtacactattggggcacctggccgcgcggcgtggactctgcacgcctgggacagggaaaaagtacaccggagtaccgctcagtctttgcacagcagggaccgggctttttattctgggaaccttccgagggattggcgagggctcttctcagcatttgagggaagatcccatctcgtcacacactgctttgctcgagggtgcacagtggcccgcactcctgggtctcccagccctggaggatctggcctcaaccccgagaaaagattctttctctcccatttaccattattttgtaatttaaacgcgtccctgacgattactcatctcatacctagcagtacggcaacggacgtttgcttaagtgaaaaatgaaattgcgaccatcttccaacccaaaatggcaatctcatgggggcaaactataatctgtgctctctttagacgggagcggtcagtggagacttgggattggtgttacctgactgccagatcatcttcctttccttccaccttctgttcttttgacaaatacgcccagtgtctttatatgtccagtgctctccaacaaaagcaaggattctgctttggatcacattgcctcatcacaacctacagcatgtcatcttctcttgcagcattagagagagaaatcagccttcgactttgacaatattaaactacattacattgaaatttaacatagaacaaacaaaatgggatccaaggtggtgggtggctgaagggtgaattatgggaaggagcgatacagtctaagtaatacagcaaaagcagctaaaattatgagtggatttgaatctccccatttttagtaccacttgttgggaaaggcagcaactctttgtcaaaggttttcaccttatctggtacctccagcagctagatccaggatggggctacccacccctccacactcctaaagtgggtatacccctccagtgcttcaggacaactttgccagttttctctacccagtcctccgaaagcctcagagcctgctcagaccagagggcttagctgtatgtacagtactaaagtttagaatgttgcctctttacagagataccctcagattcattctgtaaagggagtcccagtgattaactgtgtctacttatatgaaatgataagaagaaaaatgttcaggaaaattactggaatttcttttttaaaatactaaccatatgataatgtgtttgtgtgtgtgtgtgtgtgtgtgtgtgtgtaagtcatacagacactacgtgaaaatctggcaattatccaattgaacagatcattggaaacaaaaaccacgatcagttaaggccctaagtgaactttttgccttaattttaagtaaatctgtttgcctaacaaaataatgtgaaagttatttgtgcttctattcaaaaataggaagtctaaataggcctatagcaagtaaataaatttaatcagtaataaaaaaacttccaacataaagaaaacacatgatgagatagcttcatgagtgatttataccaaacgtttaaagaagaataaatgccagttcttctcaaacgtatggtatgtggtgaaagcagaggaggggaaaagctgtcaatattctaaatttgcta

SEQ ID NO: 585702 - DNA, 4001 bp, Homo sapiens
acccccaaagccccttctccccagagctgaacccacacacgacagagaagcagggtacaaagggcaggagagggaagcgagaggcagcaagccagaggcagcgactaggggtagctgaaacctcagtccaggcactgccgcatgccccgcccctcccggccaaggactataccagcccagagaattagtctttttcaggacccctttcaccctggtccctcgggtagcgcctccactatctcagccctaagggacccccgaaggtagcagctccaatcccagtacaggaaggaaaaggggaagtgggatgatagggggttgggggcggtagactcagagagtcacgtggccccagcccctcccccgaccgatcccgaaaaaccagccctgccagtcaacctgccctcacctaggatctggacctaggagtttagggcctcggggccccaaatccaaattctggcccctcctgaggcccgaaatcctgctcctggccaccaccattaatccctaatgaaaacagatgaccactctctacccaccctaggatctttcctccaggtcccagaaccgtggcttcccggcctctacccaggaccggggcggggcgggggggcggggggaagggggagagagggaaggaggggtcacgaaatctgagggttccctccccaatcccagagtcagaggagctggttactgtggaaacaaacccctccccgccaaacaaaaacaaggagggagacagggaccaagacacgactgctcagagaggtaggcacactcaggcaggcagaggtggagggccaaagacccgcagggacaggacagccagccagaagttccaggcaggaacagggcaggttcctgcgggcaggtcctgagtcacactgacagagaaccacggagacgccaggactccccgcagcagagaaacgggccgacacccagggaggcgcgagaataactgaggcaaggaggaggagatgtagggacccagagacaagagaaaagtggagacttcagaaatacatacgccccctacctcccaccacccgcgtctcacctcttcttcttcctcctcctcttcctcctgccccccgcccacgaccaggccacctgggcccccaccctcttcggggtcccggcttcggaagctgctcagtacgactcccccgggggggctcgtgtccaaaagcagccgcaggggccgcgggagcatggccgagtgaaggaatcagcggggtcgggccatgggggcgcctggggagagacggggtggggtgggggtggagagtcaggcaggcgcgggggaaccgggcagggaagggacgtgggtgggtgtcaagaagaccggaagggagttctgcaggaaggttgggggagggggcaacagaagggtggaataggggggcccttggtgctgttggggaaggaggaggtcacgagtacggggacgcgcagggtgctcaggctctgacctgctcgggaggggtgggggcagcgtgggtcctgagccgctgttgccgtcggtctccggccccggaccgagtcccctccccggcttttccgtacccccttgaacccccccgccgggctcctgggccctcccgccctttccgctcccccccgcgtccgcccgctccgagagcaggagccaaaaggggaaggaagtgaggacaggagccagggccgcggactaggggagcgctggacgctcagggaccaggacccaggcgcccgagtccccagctccactgtcctccgcctctacactcggggattctggagaccacgtcgacccgcaatgaactggaataaagattccagtctccagcccctgggggaaggcaggagcagaatttgacattcccttccccaacaataacacggctaaaactcccgcgggaagcgtttcaggcggagagagagccggtcactccatccccacgggattaccctccctaccacaacccacgaatgtagctgaccgaaatcccggccgggttttccgaagggccctcgattcccgccccctcggcagggggcggggcaggaagcagccacatccggttccagattcggctctcagaggcttccggcgccgagaccgagatccccgtcggctcggtgtatcctcgctggtggagtaccctctgcttgagcgcatctcatgcgccagtagtggcgcccgccccgaacggtgtcgacggggcgttctctgagcggttcagggtcactggaagggaccagaggtgattggaatattcattgagcttggaaaggggttggaatgagagaaccgtttggaagcactggaatacagctttattcctacacgattagacccgttaccccgtgggtctggccgaccgtcctgactcggagatccctgagctgcgccgccgcttccttcgtcaacatccagcagctacttgatgagcgccctccagtgggccttaggtccctatgccggcgcggggttacagcagtggacagacaggccagtccctgtcctcgaggagcccatgatccgcggggagacaggcatttaacgacgactcacacgatcacttaaatacaactgtggtgaaccgcacaagagggacgcgcggcggtctgcggggaatgacgaggccgacctcgtctgcgacccagggagggcaagggtggaccaggcaaagggaacagaggactgggacctggaggtgggcgggaggcgtttggttcattggaggaaaggaatagccctgtgtgtgatgagcattgagaggaggtctggcgagcaccatctagggctgaagaactaggcagtggctccagcgcggggcggtgggggggacaagtgagccagggcaagaagaatggatttggccctagagtacgggttctccaaatgtaacctcggccctacagatctctgagactatgtcagggggtttgtgagattttataacaaaattaagatgttagtacaatatcgtgtttcgccgccgggcgcggtggctcacgcctgtaatcccagcactttgggaggccgaggcgggcagatcacaaggtcaggagatcgagaccatcctggctaacacggtgaaaccccgtctctactaaaaacacaaaaagttagccgggcgtggtggcgggcccctgtagtcccagctactcgggaagctgaggcaggagaatggcgtgaacccgggaggcggagcgtgccgtgagccgagatcgtgccactgcactccagcctgggcaacagagcgagactctgtctcagaaaaaaagaaagattatttgcagccgggcgcggtggctcacgcgggtaatcccaatactttgggaggccgaggcgggcggatcaccaggttaggagatcgagaccatcctggctaacacggtgaaaccccgtctctactaaaaaatacaaaatattagccaggcatggtggaggacgcctgtagtccgagctacttgggaggctgaggcaggagaatggcgtgaacccgagaggcggagcttgcagtgagccgagatcgcgccactgcactccagcctgggcgacagagcgagactccgtctcaaaaaaaaaaaaaaaaaagttttttgccttcttcattctataagtgtacagtggagtttttcagaagctacatgatatgtattgacaccatggttcccacgatgaatagaatgtgtgcctatgtattctcgtgttttaaatttttctcacttttaagttctagtaccataaatattgatagctataacccacatacccaaaagctttttggggtccttgatgatttttaagaggtcctgagagaaaaaaattttgagaaccactgtcctagagctccaagaaggtgaatgccataagatgtgtgttttttaaaaaagcatttctcgggcctggtgtggtggctcacgcctgtaatcccagcactttgggaggctgaggtgggcagatcacctgaggtcaggaattcaagaccagcctggccaac

SEQ ID NO: 585703 - DNA, 4001 bp, Homo sapiens
taattactgttttagttcatgttaacagaagaaatggcttaacaacagtaacaactggaggaggtcaaacttctcattcatttgtattaaatcacccttccattagataggagtgctataatgcatatttcttggataatactctcactacagaagacttcggaaacaagtacaatgtactttaaatgtttcacggtttgcaaattatttcgtacacgcagcgtctggcagttgtgaatcgaggaggaaagcattattttccactacactaataaaaatcaattctcacgtcttcaattaaatgattttcagaagggttcatcacccggaaaaccagtatgtatgaacgccggaaatgcagatggcacccagcctcagaactgcttattctagatgggaaccaaactaagatttctctttattatttgtgaaagccatcccacgctggagagaatctcgccgtaaaacaatttaagaaaagaaagaaataactctgaagagtgtgaagttctccagacaaatcttatagtgaatcttttgaaagaagcatttatggaaaggtcaggggaggtcaggagagttatgccaggagccagggtcaatcgtccccgggcgacaggggttctcccacgtgaaccgacgtcccgggctccgggcgaggcgcagggctcagggcgcagggcgggtcccgtacgcagggcgggcgcgcgggcatctttgtggccaggcgaccccggctcgctctcccggagcccagggactcccgaggctggcgcgggctgcccgcgacaaggtgccagcagcctcgggctcgcgaggagcagctcccacccgcggcttccgagtccagctctgtccctccgccatcccctagtcctccggcatttattcagggagacagggaggcagagagaagaggagaaagcggccgtgtctgcacccagcctctgccgcagcactcgatgagggacagcagggaggctggcggggaggcagagattaaactatgattccatcgatcacggaaagaccaccatcacctacagcaaaggaggctccgatgcgcccacccgggcagcgactcgcggttggtgggcgttcctcgtcctcgccccctcggtggctgtggaatccaccccgcgccgcacacgccaggactccctttcctttgactaaggggaggggaaggaacaaaagagaccccccaccccctatacatacatacacatacacacacacacacacacacacacacccctccggtattttactgctggtcaaaggattcattttcgcaacctcttcttcgaacaccttccccacctgagcagtgcattttcccaaaggtaaagagagataagggaggaaacacagcacccaaggtgatcagtcgattggacactgttgatggcacattctcctcgttcccaaccaaccgcacaaaacccgcaacacctcgcgtccccgcggggtctcccgcgcccctggcccggccctcccggccgcccccagcaggcgccccgctctccgcgggaactctgggacctggccgagcgttccccggcgggcaggacactcgcccggttccctgcagcagctgagggcggcgagcggaccgcgtccaggcagcgacgcgggattcaacttcccggacccgcggcgcggcccccgctcccgctcagggcgccgcggccacagctgagaccccagcgccgcgcagccgcccccgccggggcatgggcggtcgcgctctccgccccctccttccttcacctcccccctaccttgaaaaaaatccatccattggtgcaaagcagacattttgatgtcatttacttagcaccgcttgttttggaggcagcgtcttacccggtcgcctggaggtgtgggcagcgcgccgatgggtccgggggagcggggctgggcggctcggtcctctagcggagccggtttgctgccatccgcccaacttcagcacccagcgggcgaggagagagggagagcggcgaggatgcagaggagggggagggggaggagggagcggtgggcggggagggagcgagagccgctcggcagcgcgcatgcgcctcgcgggccggcgcagcccctcgcccggcgcggccggaggggcagcttcccagcccctgcgcgcggccgcgagagtcccggccccgccccctccccgggcggcccccggccccgcccgacctcgcgcgctcgcctgggcgcggcgcccaccgtgcggaggggctcggccgggactctcggcttcggtgacgcccgtccggagcttcgcgggaggcccggagtcccgagagcttccctgggtgacagcggctctccgcccgggcccctgcaactccactcgcccgtagcccgcgcgctgctgtcctgggctgcgcgggagccttgcacccaggagccggcctgccaggcacagcagcctgcctgctccgggtcccggaggaagcattccctgcgtgggggttcaaggaagtgtgaagttaagcaagttttgcttcccgaaggactttatgaagcgtcctttactttattgacttcctcgcccagaaagaggaccttttctcctaagaatcagtgcaggtgctctctggcctagcccatgccagctgcctcaggcgcccggaccactcgctggagcagagttttgagtgagaaaagccgatgacaaggcaagagtggagaattattaacggaggtgctgatgcttggggcctagagcatccttaggggacagcttggtagttaccaggtctgataatcgttctgtgcccaagtggagcccagcttggtagggaaggagcttgggatacttaatgcaacccgagcgctagattgcatctccaatgattagactaaagtgtttgtgcggaggaagtggagaagcagtgtcttgctcttcagataccacatctgtgggaagaggagggagttcctgcaggagtgaatgggcttttttttcttacacctaattaaaacagattacttgtaaatctgtgtgagttccccttccttgtgtgttcatgtaagcaagcgttgtgttatttcagcctactgaactctcctgtgcctccatcctcatagactcacgggtacttgggttaaatatgtctcagggcctcctccagggcctcccatggctttgagtactagtgctcttcaaagtgtcttcatttttgttggatttcacagaagtatttgtctttgtcttccaggctgctataacaaaataccatagactggatggcttataaacaacagaaactgatttcttacagttctggagactgggaagtccaagatcaagatgtaggcagataccttatttggtgagggcccaattccgagctcatgaactgctgactccttgctgtgtcttcacgtggtggaagtgagcaagggagctctctggggtctcttttataaggacactagtcccattcatgagggctccaccctcatgacctaaccaccttccaagggttccacctctttatatcatcatcttgagggttagaatgcgaacatacgaattttggagagacaaacacggctagtccactgcagtattgattcgcggtggataaagataaaagttcttcaccaaaaatgatttgagcagcgttgaatcctatataactttcagatttatgtcttcagtcctgtcctggcctcacacagaactcttatgtccttcactacctttacatctccacttgaggaataattgtcgtagctggtatttattgaacaattactacatgctaggtacagatctaaattctcctcatatttcgtattcgttgttcacaacaaccctacaaggtagatactattattatcatggttaacaggcatctcagaagcggaactccggatatccaccccctccaaacctgttcctcctcaaattgttctactctgttgttcattccaaaaatttagaagtcatcctcgttttgttgctttctttcatcccc

SEQ ID NO: 585704 - DNA, 4001 bp, Homo sapiens
tatactttgtgaaatgatcactacaatcaagctagttaacacattcattacctctacattgttattattgtgtgtgtacacctgtgtgtgtgtgtgtgtgtgtgtttgtgtatacctgtgtgtgtcgggggggtggggcgaggggtgatcagattaaattgaagcaatatccactcagcaaattacaaatatccatacggtattgttaactatcatcattatgttgcacactagatgtccaaaaattatacatctatagctaggctactgaaaaatgaccatgtttagtgactttccttcaacctggtgttgatctcaaattgtgaattgaaattttacctagaagctttgatgctgggacttagaaagttcagcttgaatgatacaattattaagctcttaaagtcttaagataactttatttaaatcatattaatcttagatcatatttttggcatttttaacattgtattgcatctctttgtttacaagtgtatcagatagtggagtcttagaataaaagaatcatatttgttttattttttaataaatttgctgtagcacatgcttagtgcttaataaaatatgtactaaatgaataaatggatgaatgaatgaaatgtacaaaagcatacatagatgaacagaattttttctgttttattctctaacttgcaaactataaaacttatttaatcaagaaccctctcagacatctatgcagtgtaaagacagctagacttggagtctagttttctctgtcttattaccctaactctgtccttagctttcaattttatatttttcctatgtcacttagcaactctaggccattatttctacatgggaatacccccatcatattaattccctcaaaaaatgttggaataaaaaaaagggtgtcaaattgttttttaaaaagcttagacatatgctatgaagtataataaacattataccattttaaataatttttaaattttttagattatttgaaccttacttaagaaaagcaaatagtctatataatagtgacatactactgtcttccttcctggctaatgaggtaatggatgtgttggtttataataaggacgcagtaaatggtagttattgttatattaactattttacagcctacccttccaaacttgaattaaatttctctctttgctcaatcatcattcccaaggaaggattttgtttttaaaatatgttaagtattcacacatttcttttcatctcaaagtaacaaaccgacttcctttcagaatattgtaaaactctgagtacacttttttgattaaaactccattaacttcctacatcatactaaataccccttcttattccttagggtcctcacatgaaatctagggttcccttcttataactccattcttagaactctctctcctccaaagttacctttggccctttcagtggggaatgcaaaggaagcgtgatacttttctttgcagaactagtgaccaactgaaggaaaaaggtcatttagcagtagataagcaatacaaaaggcatcaattattttaattttcagcttcttgttctgatattttaataggaaaaagttccaaccaagcaccttaatcacagagaagaagaccagatgtcacatcacaaacatgtaatatccttagcactcataaccatcatataattctacaaagagctcaagggtttatagtattcaattgttttacattctgagaaaccgaagaaccgaaaaatgtatagtaagtagtaaattgcctactcacgaggatataactcaaagaatatgcccatgtctgttggcttggtgatgttgagctgctcgagaacagtctggtccgtttcatactcaacaaataatccaaataaaacaatcatggcaatttccaggactatagccatgagagggaatgtgaacctcatgtttgtggcaaaggacagaggcacactgagagcttcacaggctgtgagatgttgataagaacaaaggactgctctgtgtgtggaatttgactgcatgttcaaggcaccccaatgacatcacaagaaaaaaaaaatgggcaagactgattaaaatgccccacccattggggaaaattatgctctgtaatctaattgtcgttctaaatgttgatctgaagaatatgcaatgaaattgtgagaacctggatgatgccaacaatctattgcacaggcctctagaatcatgtttaacttaattcagtagacatttcttgagggcttattgtataccaaatattgtggtaggctttgtagaaggcatgaatctaaagcaatatatataattggtctgttaacttcttgagaaaattaagaatctagttgggaaaacataaatataagtgaatgattatataaaaacaaatatgtgatataatagtggttataaaagtattataaaacataaataaggcagtgaaactttttgccttaggccaagaacattagcatataaaacaatatggatgtgagaactagaacataaatagggtttttcaagtaaaacagataagagggaatgatataaatcttggaagaacatggcatgttttggaaacggcaatcagtcaagcaaagctggaatgtaaaagagatgaagagaaaaggaggaagtggcagagataatgttgtcatggaggtggctgtgttgtaaagaccctcacattcagtaccgaggatgctagatgctaaatattatcccatgagcaatggggaatatataggactgtaagcagttttatgtacttatgaagtttttgactccttactctgatttacgcaagtgaaaatatggaaatacacaaatgagttgtgatatatcttttagtcttaaataggaagagagtaaacttaaacaggaacataactaatctatcatccttatagatagtcaagtgtaaataagatgctaagcaattcaaaactaccatataggtggaggaattcttgtctcctctttggaattgttctcatggcagaataaacctgtttttgagaactaagagctaccagttaaatacaatttctttcatgaagcccaatttccaaaagattctatgcagaatttggagagagagtgcaactgactgccaggatacatacattgtaataaatatttataaaacaaagcagcaggattttttggtctttctggtatgattttccacagtagaacatgatatgttaggactaagtgatatttgaaattttataaatatacagacactttgaaaaatgactatttccattattcgttacagcatagtacaagaggagtgggttcacatgcttagctatgaaaatacatgtgtacatctcacactttaatttttggttttgcagcagcctaaagagtgttcatgagaactccaacaaatcctaaatgaaaagtgtatatgttaataaactatgcataaacttgtgaaaaccaagtatcaaataataaattgcaagaacatctaaacaatatcataaaccaatgcggttttaaactctttaataaaaagtgacacagtatattaaacaatccaagaccgatggcatctctctttctctgggacatttccagcagctcagcaaccactcaacacatggggagtagaggattttactcatataggtgatgggactatgccagcacttgacttcagcctgttcaacttcgaggaattcagattttttgccttattctgaatgtagacatttgtattgaaataagctgcattgtctaccatctgggaaattatttctcttgttcagttcttcacataagcttctctttgtaactggaaatcttcccacatattctctgctccctgtcctatatacatcatccatcattcttcagttttcagataaaatgatacttcctcagaaaagccttcattgatctcccatcttgaaccaggtttccactattatctctcattgaattgtggtcttttctttgcaattagtacagttgg

SEQ ID NO: 585705 - DNA, 4001 bp, Homo sapiens
agacagaggttgcaacgagccaagatcgcaccattgcacgccagcctgggtgacagagcaagattccatctcccaaaaaaaaaaagaatgcatgaatcatataagcctatgtaggctcaagtcaactgaaataaaacattttaatacactgcatgtgtctattgttgtgcttgagttttgagatttaaaaaaatatttatttctctattcctatttcttttctcttgtttattatccagtatgggcttacttcaaattataaagtcattttgaatgtcattaatctaatatttgtccctcattccatctcatgaatttatattaatttagtataattaccgtgagttccccaaagtgccttgatataagaaaatttatcaaatagtaacaaattgcatttctaacagaaaatacttaataaatccaaacagggtttatcaagtattttctgttagaaaagcaattttttaccaaaccctgtttggatttattaagtattttctgttagaaatgcaatttgttaccaaaccctgtttggtttattaagtattttctgttagaaatgcaatttaataaactaaacagggtttattaatcaaaatggtattcatggatttcaaaattacagaatcaaagcagagaatcaatattagaagagattaatgttgaccttattctaaaatatccttacttatttctgggtaccacatactatgagctttcatgcatagtagtaagtgttattcactggagccactgtctaggtaaaagtagaaaaaatccttctattttcattttttaaattccaaaatttatgttaacaatatttactcatttaaaatatttctacaactcttccatcttgagctatatatatccttcttctgggttatatatttcacagcctcatacttagttgtgattccacagctatatcaaagaccagaaaactgatttcccttgggagagaatacataaaacctaacatcaaatgcaattttgagcttgcttcatatattccatttgaccttgtgctattgtagtttaggtcaaggcctgcatttgtgaaaaggttttggtactttcgcaagaacccaggaaccattattttaaaaaagtgacacaaacttcctatttttgcattgacattccactaatgattactgcaatttgtcatgtatttctcattctttgtatgagatagtaaagcatggaacacatttacagaaaaaaaaacccatgcacaattaggtagcctgctatttttttttaattattttcacagaacattgattttctaatcttcaaatctcccttgatgtggctattacacaggaatcaatcataaacataattaatcatcttaaaatctttagagctatattataaaccctacaatctcatttcagagtaacagattaaagataaagttggtaactggaaactttattcaattaagaacactgtgcacctgacacacagagaatagaaatattttgactggaaaatagatacagagggagtgttaaatatagatttaggtacaactgggacaaaatgaagtgggattaccattatctattgcttaccagcaactgctcgtcgagcttcaattgttccctcttcggaatcaacagacctcacttcttcccacccttctgaagagacatgaatcccaggtgcacacatgacagcaaacttggaaataaatccagcttgagagatttaagccttgctgtttaaaccactctctgctgctcaagatcttatctaagaagagtgtgaagcgcctccttcatcactctgcttatatcattgaacaacaggaccagcagaaaatggaaactgaaataaaacattggtgtgagaacaagaaagtctccttgcatgactgactcaggtcactgcaggcactgtgcagttacccaaaggactgcttggataaaatactgtagacaagcttcggtgggcctggtggtgtggggactggtagcatttactgaggagaagcatattggcatctctgttgggttttaaccagatccacaggattcaggaaataagctctctgccagatgacactatgctcctagccattccttctgtttacttatcgcccaaattactctaactagtgtcctttgtcgtgctgtgagcttatttgtggagaaggctaaataaaggatttttatgacaatgaaatggccattggcccatagaatgatttcttaacctaactcttctgcttttgttcagtaccattaaaattaattaaatgggagcacttattattatatctttgatttatgaagaaatacacttttgtttcttcttgaaatatttgaacttaggctgtatttttaactgttacatattctttaaatagtacttacctcttattacataaactttttaaggtagcttccctcttcctattatttttctatcagatgcaaatacatatatatgtgaatatattatatattatatatagattcctattatatgtgacatgctacaaaactaatacacatttctgaaatatgaagagctgtaccttctgataaatgagatgcatattcctaatttatgaaaaaaattatatatttttatctaccttaactgtagtcttttcactaaaacaaacaaactaaaaatttcacatgtaattttaatgtaagcatattttcctgcaggtagttattattgttttggatttcaatacagaaaatgttgtaaatagcaaaaataacacaatcaccttgcatttgcctatatttcatacttcctaaataatattcatatgcttcaaaatgaatctgagaggtaacaaagatggatagcattaacaagagaatcaaccatgtagagaaacagacatggagtattaccaagactggtttatcctggaaatgaaattcctaagtcactaacctaaggcttctacttcaccaaacattcattttcaaattaaactttggtactaatatgacagccagaaagtacagataaaaacctattacaatcaaatgccaatatttttaatgttgaaatattgatcacatataatatcttagaaattcctttttattcctccatagtcctattaattccatatgcaaaattaatctgactttcaaatcacaaatctcctacaagtatcctttgaagtaataatcaataatgtattgattttctaagttccatacaccaccagcgtattaaggacagtactgaagtactatatgaaaaatgtatatattatttccaaactcttccaaagtactttcaaaagctgaaaaacatctctactaatctacagctgactcacttatgtaatatcctgttgctcacaattatatcttgtaaaaaatgtaaacttccatatagacaaatatgctaatcattttaaataatgagaatgtctacataatttactttgataggatgtaaatctagcatctcattctttatgggactacagaatgaagactgcccaggtagaactaacacattactactgagtttactggctaactctgctgtgtgagccctgctatattgtattaatgtattggcacttaagaaacaatagcaggacaaactctggacagaagagggcaaatatattgtcttttaatctgtacatgtggaaactccagatccttttagtaataccaagattcttaatctttacaaccagtagtagaatataatatttatgaaaggttatggcataaaaacatgttcaggttcacgatacctcctctgagaggttttcattgactaaacccaatgcacattaatctttttattgtttagcacttccctttaggtcttcaagggacagtcggccttgcataatatttcattctgttatttcttccaattttcactgatccctgcatgcatgcattcagaacttctttcatcaaacaaaaattctgagtatcaactatactaagcactggagtaaaagaaaaaatacatagaacaggtct

SEQ ID NO: 585706 - DNA, 4001 bp, Homo sapiens
ggattttgagcttgccttcagcacaaagtagacctcttgaaaaacatttgctgagaaaagaaggcaggagctctcttcagctgccctcagcaatacacactgaacctgagggggagcaagtgagcagtgaggacagcccttgtccctggccgactttcagagagccccagtgcctctctgcgtccaggtcctcatcaggctgcagcacaactgtgatgcctctttcctctcccaaggagtgcagtcttaatagtaggtgcccttgggacacctcaaacttactcaatgcctatttggcaaaatagttacaatgaagccaattaaaaaaaaaaaaagcaaaaaaaccgctgtatttacctcttgtattaggaaaactgcatacctttgaacatttaataattgtgtcttttttctacatgaaaatcatcaatagatgatcttgagcatctgaaaaaatgttttgccattcctacagagaataacaggagagtctttttccaaactggcagaagggaaacaagggccagaaggggttagtcactagttactcttttaacccaaggtcacacacccaaatctctgatgcaaaagattacacttctctttccttctttgtgtcttgggctctctgttcccctcatctgaacagtttcccctttagtccacagcttaacatcaccgaaaacacaggcatttccacgaatgtgttctataatcaggactgtcaattaggagaaaccaaacctggtcagcattttttctaaacacttgaaaagaacaatctatatatacttaaatctttgtattttcaagaagattaagctctgacattttctaattttagtgaaagtcactaaatagggaaagcaaactctttgatccatcagagaagaaaaatgtatctttctgaattaattgtatattatctatatatctcaagttaagacttaaatgtaatactaaaatgtatataatttaatgtgtacttcagataaacatttaaatcataaaaataactttatgtaatacaagtaatcattattgcatcctaaaattacatatttatataaagcaaaacatccttattctctactgatagaatctaaatgaaacattttagtatcttactcttttggataattaaacaataaattacattaactttacatttatccatagattaatataatttagtttacctgttcctgagtgcaatgtatgaagtagtagaaactgcagaaacccagcaaacataacagcagcatcggagtggttaactaaatgccactggcatcaaatcattaaatttcagctagcaatggcagcaaatgcacaacacaattaaaaaatccaccaaaatacaacattttaaataaaattccctgtggtccttgcattctaaatcaaagccaaaaaagcctgcagtgtccaacattatacaacagtgacactaaacaaggccataagtgctgctgtcatcaaaacagatctctgcagtgaacagattctcattgattacagcattaatctatagtgctctgtgctgtactaaagtggctcccagtgtagcatacactaaagctcttttagctcctcaattaaccatttcctaaaacaatgcacagaagctgctaccttcctgaagccagagagatgaaacgttgtggtccttaaagctaacacagaagaaaagactcaggcaaatgttcaggagctcatcttgttcccactgacactcactgggatacccatggattaagatgacaaggttgagcagatgcctgtcagaccacagaaaactcacctgaaatgatttggtcccattatcaatcactggcaatggtcctgccaagccctgtgtaacagatcatttcctctgcagtttccctaactgaggaatcttactcagctcaatgacaactggcaccagaaagcataaaccaagagtatacacaattgattgttgggaacacaggcaaaagtgcttcttcaggcttttctggtacggccagcctagtgctaacggtggctcatctccagagggcaaaaggacaacctcaaacaggttttgccagagagctggggacaggagaaggtggctcgtatttctgatatttttaaagatgcatatttttgaggactgtagatgcataattcataatacaatagattttttttttctcactgagacacagaataattatcctctcattgggtcacctacattttacttcatccacccatattttgtgttacagaacaacagcaacagtaacaacaaaattagttgatttgaaattatgttactatctcaattacatttttattgtagtacaacattcagatcccagaaacagcaatgaataatgatacacttctctaatcatctagggattatttgctgaaaaatcaaggtggactgcttctactttgttttagaaaatgaaatggccaaatgaggatagagagaaaattaggaacatctttcatttatttaaaacaaatggtgctgtgtttacttaaattacatgtacttgtcaaaaataattatctcatgagaaaaaaaattaaaactgagccatggatcatctcattaccaaaaacaactgcaaaatatcagccttaaatgaaatgactaatttgaacaatttttctctcttaaaagaacatatttacggtctcactcagaatctgtttgcttttttttcttttcccaaacttccgcctatgcttaaagctggctgtagtcaaaacctgaccaagttattgttgggaaaagcaaaagggaaataaacatcaattgaatgcttattaagtgccaaatattatactgtctattaattttatttagttaatttatttctcataggcatatggaaaaatcaacaacacttatcccatattagagatggggtttagaaaacctaattaaattgcccgaagtccatgatttataagtagcagagttgggatttgaacttggttttgtctgttttgaaagccatgtatgagcttttcactacaccatagtagttaggagttactgcaattattttgttgaattacttcaaagttatgtcagtttttgtgaaagtactcgtgacttgttggaggtgcagcggggggcctataatgatatacttttatttcccatgttttgaggtggtgaagattttccggagcagctattggggctgaagtcttatacttgctgaacttaagttgcttccattatgatatggtcattaagaagacatacagatggcatggtctagagatagatctgctggtccagcaagtatacagaagagaaccaatagaaagggagtcaaaactttcaacaaccaatatactcattttgtctggttgaaatcgctaccatataatgttctttgactagaatttaagaatgcatgaatcaggctgggagcagtggctcacgcctataataccaacactttgggaggccgaggcgggtggatcaccggaggtcaggagtttgaaacagcctggccaacatggtgaaaccccatctctactaaaaatacaaaaaattagctgcgtgtggtggtgggtgcctgtaatcccagctacttgggaggctgaggcaggagaatcgcttgaacccaggagacagaggttgcaacgagccaagatcgcaccattgcacgccagcctgggtgacagagcaagattccatctcccaaaaaaaaaaagaatgcatgaatcatataagcctatgtaggctcaagtcaactgaaataaaacattttaatacactgcatgtgtctattgttgtgcttgagttttgagatttaaaaaaatatttatttctctattcctatttcttttctcttgtttattatccagtatgggcttacttcaaattataaagtcattttgaatgtcattaatctaatatttgtccctcattccatctcatgaatttatattaatttagtataattaccgtgagttccccaaagtgccttgatataaga

SEQ ID NO: 585707 - DNA, 4001 bp, Homo sapiens
tcgtctctcatgtacatatatctgggaacatgaaccatcattgcctcagccttcctctcataatggtgggtgtctactattaagaagaaacagcaagtataaacatcaacagaagattcatgatcattataaactggcaattattagccactctgtaagcacattgttcaatttacaataaaatccttccatcctcactaaaaaatatatttaattaggctagactcacaaacattaactagtatttggtaggcagcaatctgattcatatttttgccagtggaaggtggctacttttccatttgcctctgaccctttggattttgagcttgccttcagcacaaagtagacctcttgaaaaacatttgctgagaaaagaaggcaggagctctcttcagctgccctcagcaatacacactgaacctgagggggagcaagtgagcagtgaggacagcccttgtccctggccgactttcagagagccccagtgcctctctgcgtccaggtcctcatcaggctgcagcacaactgtgatgcctctttcctctcccaaggagtgcagtcttaatagtaggtgcccttgggacacctcaaacttactcaatgcctatttggcaaaatagttacaatgaagccaattaaaaaaaaaaaaagcaaaaaaaccgctgtatttacctcttgtattaggaaaactgcatacctttgaacatttaataattgtgtcttttttctacatgaaaatcatcaatagatgatcttgagcatctgaaaaaatgttttgccattcctacagagaataacaggagagtctttttccaaactggcagaagggaaacaagggccagaaggggttagtcactagttactcttttaacccaaggtcacacacccaaatctctgatgcaaaagattacacttctctttccttctttgtgtcttgggctctctgttcccctcatctgaacagtttcccctttagtccacagcttaacatcaccgaaaacacaggcatttccacgaatgtgttctataatcaggactgtcaattaggagaaaccaaacctggtcagcattttttctaaacacttgaaaagaacaatctatatatacttaaatctttgtattttcaagaagattaagctctgacattttctaattttagtgaaagtcactaaatagggaaagcaaactctttgatccatcagagaagaaaaatgtatctttctgaattaattgtatattatctatatatctcaagttaagacttaaatgtaatactaaaatgtatataatttaatgtgtacttcagataaacatttaaatcataaaaataactttatgtaatacaagtaatcattattgcatcctaaaattacatatttatataaagcaaaacatccttattctctactgatagaatctaaatgaaacattttagtatcttactcttttggataattaaacaataaattacattaactttacatttatccatagattaatataatttagtttacctgttcctgagtgcaatgtatgaagtagtagaaactgcagaaacccagcaaacataacagcagcatcggagtggttaactaaatgccactggcatcaaatcattaaatttcagctagcaatggcagcaaatgcacaacacaattaaaaaatccaccaaaatacaacattttaaataaaattccctgtggtccttgcattctaaatcaaagccaaaaaagcctgcagtgtccaacattatacaacagtgacactaaacaaggccataagtgctgctgtcatcaaaacagatctctgcagtgaacagattctcattgattacagcattaatctatagtgctctgtgctgtactaaagtggctcccagtgtagcatacactaaagctcttttagctcctcaattaaccatttcctaaaacaatgcacagaagctgctaccttcctgaagccagagagatgaaacgttgtggtccttaaagctaacacagaagaaaagactcaggcaaatgttcaggagctcatcttgttcccactgacactcactgggatacccatggattaagatgacaaggttgagcagatgcctgtcagaccacagaaaactcacctgaaatgatttggtcccattatcaatcactggcaatggtcctgccaagccctgtgtaacagatcatttcctctgcagtttccctaactgaggaatcttactcagctcaatgacaactggcaccagaaagcataaaccaagagtatacacaattgattgttgggaacacaggcaaaagtgcttcttcaggcttttctggtacggccagcctagtgctaacggtggctcatctccagagggcaaaaggacaacctcaaacaggttttgccagagagctggggacaggagaaggtggctcgtatttctgatatttttaaagatgcatatttttgaggactgtagatgcataattcataatacaatagattttttttttctcactgagacacagaataattatcctctcattgggtcacctacattttacttcatccacccatattttgtgttacagaacaacagcaacagtaacaacaaaattagttgatttgaaattatgttactatctcaattacatttttattgtagtacaacattcagatcccagaaacagcaatgaataatgatacacttctctaatcatctagggattatttgctgaaaaatcaaggtggactgcttctactttgttttagaaaatgaaatggccaaatgaggatagagagaaaattaggaacatctttcatttatttaaaacaaatggtgctgtgtttacttaaattacatgtacttgtcaaaaataattatctcatgagaaaaaaaattaaaactgagccatggatcatctcattaccaaaaacaactgcaaaatatcagccttaaatgaaatgactaatttgaacaatttttctctcttaaaagaacatatttacggtctcactcagaatctgtttgcttttttttcttttcccaaacttccgcctatgcttaaagctggctgtagtcaaaacctgaccaagttattgttgggaaaagcaaaagggaaataaacatcaattgaatgcttattaagtgccaaatattatactgtctattaattttatttagttaatttatttctcataggcatatggaaaaatcaacaacacttatcccatattagagatggggtttagaaaacctaattaaattgcccgaagtccatgatttataagtagcagagttgggatttgaacttggttttgtctgttttgaaagccatgtatgagcttttcactacaccatagtagttaggagttactgcaattattttgttgaattacttcaaagttatgtcagtttttgtgaaagtactcgtgacttgttggaggtgcagcggggggcctataatgatatacttttatttcccatgttttgaggtggtgaagattttccggagcagctattggggctgaagtcttatacttgctgaacttaagttgcttccattatgatatggtcattaagaagacatacagatggcatggtctagagatagatctgctggtccagcaagtatacagaagagaaccaatagaaagggagtcaaaactttcaacaaccaatatactcattttgtctggttgaaatcgctaccatataatgttctttgactagaatttaagaatgcatgaatcaggctgggagcagtggctcacgcctataataccaacactttgggaggccgaggcgggtggatcaccggaggtcaggagtttgaaacagcctggccaacatggtgaaaccccatctctactaaaaatacaaaaaattagctgcgtgtggtggtgggtgcctgtaatcccagctacttgggaggctgaggcaggagaatcgcttgaacccaggagacagaggttgcaacgagccaagatcgcaccattgcacgccagcctgggtg

SEQ ID NO: 585708 - DNA, 4001 bp, Homo sapiens
atctaacttgtcatctgaatttatatgcttctaaatctctcccctcaacacactcctgccagagtgctttgtgaagactcgtgcttaccgcatcttcattgagtgagctggtgactgaattttagtaactaaaacttataacattaactgtgtatgtatcttcaaagaagcccaaagtggaggccgaggcgggtggatcacaaggtcaggagatcgagaccatcctggctaacacggtgaaatcccttctctactaaaaatagaaaaaaaaaaaattatctgggcgtggtagtcccagctactcgggaggctgaggcaggagaatggcgtgaacctgtgaggcggagcttacagtgagccgagattgcgccactgcactccagcctgggtgacagagcgagactctgtctcaaaaaaaaaaaaaaaaaaaaaaaaaaatcagacaacactgattctgtactgttggtcttacaccaagtttataacataagggggaaaaaagaaacttttttacttaggtagaaaaataatttcttgctgcctataaatattataacaagcacagataagaaataagaggacattttatgcagttggttaagcataatgatggcataaaaccaaatagatgttaagattccttttaagacaaatgaatgaaactaaattggaattatgggaggcaaaaatataaattacaaatgtattaaagccatcctaagtacatttatacctttattccacggataagccctgcttctgaaggtaattattaaataaaattgaaattaggaattaatttaatacaagtattactcagaatataaaaaaatatataaataaaacacaagcaacatgtagatgactcttcttggataatctatgaaacccttcatttgcaaaagtattctccatcatattttgattgacagttcttttagaaagaagtaagaaaggaagttactgataaatatggatagtactgcacagattatatgtttagtctttggagaacagcactgtttttgaatatatatatgtatgtaagactgtccttttcaaactctagtggtgacaactgtacactttcaatttcagccaggctgtttgtgacatcagagtatcagtgaataagaaaatgattctagaaataaattatgaggttatacttctacccacactttttctgaaagcacaaaataaatctatttttgaaatttcatcaaattattaacacatatgtttcctttggatctaaaagctgacatttccctggtccttgcctgaaaataacaaaataaaaggcaaaatttaggaagcctaaatagaaaatgtgactgataatttcaaaatgcaaagtaaatatacttctgaatttccaaaagaaatgctcatatatttgcactgaattgtacctagaagggctatattgtatacagtatagctgacaaattttaaataagaataaagttgttttaaagaaaaatataactttatgataccgttaagatttatgttttggtagtaatgagtttaaggactgctcaacttcaaatccagctttaaaatcctgtaagtctagctttaaagttaatcatatttggatattacaatgctataaataaatctactgttgcaacatcattttttaattatttcgtccactgcataatttttatgttttttcattttcatttaattatttgcaatctgaagtataacactacctttgaaaactgttaaacaacactgaaagcttcagacaaatatagaaatttggcttttggctaggttttatgaaaagttataaataaacaaactccccttataacttagtaaatacatataaggaacatagacttaccttgtctatcttgaaaaaattaagtatcagcattaaattgttctctggggaaaactgaatgccaaagaagctttgacctggtttaaataacttgtgcggtggctggctggaatatctgtctgagctgcctgtgaactgtcttctctgtctctctcccattctctctcctcctccctcaccctccgacactctctccttctcatgcatatacagaatataattaaattgcttctgtcaagagtgcttctttcctatagcttattgtaagaccatgaagtgtaacatcactaagcaaatttgccatgtgtcataaatttgaaaactgctaaagggccacaatttgaaaactgccacagtcacaacattttaaacaaactatgtaacaaagacatttaaatcaaatgaaatgaaaatatgttgcctactttattgaatataatatagcttctccaattaggtaagaaatctcagagaagtaaagctcagggctaatacgtgatttccaggataagtttgtttaaaaggtttttacacaattaaggggaaggttctatatcgatctcttgtgttgtactcacttggcacttgtaatacacatttaatacacttaagctgtcaaaattatcactttcaatatatacttattaaacactgataggtttcagctgctttccctgtgtcgtttcacgtcccaccctactgccacgagaaaaacactagaacactggaaatagaaaaacttagaaaaaaaaggttctaacttctgttgagcactttttacataccatgccttatgcttagagctttacacacatttccattaacccttatcataattctctggtattggtattgctatgttttacatgcatgagaggttcagagagttaagaagtagtaagtgtcacagctaccaccacaagtgaaaacaaaaccctccaaaacacaaccaaattctaaggcccgtcttcttcaaacgtgtgtaagctctttaagctctttttataacatcatgttcatggaaggaatatggaaacaacaggattttaccgtaagagcatatttctgtgtggctcctcctcacctccataatggcactaaggaattaaaaacattagagtctagagtgttctgtttttcctctttttccctccagggctgtgtcaacagcatgaaggagtaaaagtcagcaagagtgatcatttttcatggttaaccaggataatcctggtttatgcctgttctagcatattactaatggtggccctcttttacttacaaagatattccagtttggatgctaaattatatagtcaatagacatataagtggtagagcaatacaagttaaactaaacctgcctcaaaactgcaagtgatattttggaattttgacaggactggtattaaaattgaaatggcaagggatgaagtctatgtaattcaaaagtttagcctactggtaccttggtaaacaatgtatctgcctctcagaacttggagtatttatctgggtttatagaaggctgccatatccatgtggaatgccatggttgggtgccctgaataaaggtggaatataaacagtgttaaaatcctgccagaggaccccagcagggaagagaaggcacagagaaagaacgtaaaagaatggcttcctcaagcacatactgcaaatttgaacaaatcagaaatgaaataacctcatagaacttgtggttgggcaaagagcacttttgtgccttagagcccctcactggctgggcacctctgtgcaaagaccaaaccacacaattaggtggagactctgggtagaaaactacgggagcagatgctattggtatcctggctatgccccgtagacattcactgttcctgtatgcaaggatgctgtcttactggaagcacctccaaccctctgctgagggttccttccaattgtgtagtcagctgtgagcataaggaaagcaggcctgaagaagtcagtgactctgcaagcagtcccatagccaaggacaaatgagagatgttggataaatcctacaatttcctcacgctcagaggaaacacttctcatagtctcccatagaaccccaattgcctacagcagaaatctgataattaaacaccgtattttg

SEQ ID NO: 585709 - DNA, 4001 bp, Homo sapiens
tggatttctactattttgctgtgacctaacagccacatctctccctcagtatccccctcccctatctgagtgtcagttgccctggttggggaaccatcggtctgtgaatgcagcctccctccattcctctcctatgaggcactgctgcactgaggggaagcagaagaaatcttcttcggcagcatcttctctcgaggaggcacttctagggggtgggggagaggccatgcagaatgtgctctgtgtctgggtttcacccctgctccctccccacccctcttttgctatcaggtaactccagatgcaacaggttccttttggctcttcatgccaatcccctggccccagatacaccttccagcctaagcaggggacaccaaggagtcagtcacagtcagggcccctacattcccctgcttcagagtgaaaactttcctgaatacatgaagacttcccaagaaaaggcagggttgaagcctccttcagctctactctatgggtgatgctaagcaaggaaagccccgtctctctgccagtcccttgtaagcagttttgtctgaggcaagcagcagcacagtgtcacacactcctgcaccaccagcaagtagtcccatcttctccccatcaccaggaaaatggggcatcagacagaaatcccttgaagggttgatgcgctctaaagaagtgaggaggagtgcaaattcccaatcccttattggactgtttcctccaggaactgaacaggccccagaggtctcttggaaaccactaaagaggaacctctatgttattcaggccagagtccctgtcagcttctcccatgattaaaaactttgtattgccagtggcattacatatggagaagagaatctgtcttcacacaggtatgctgtgtagaagactctgaataaaaggttaaagagaagctggggaggcaggttaccaaagatggcaattgcccaaaaaaagacccaaccttgatctgtgagatgaatgattactaaaatgaacactaaaaataagcatttttattatataaatataggcagccttcactggggtaaccccgaccagctaaacaactccaagaagagaagaggagctgtcctcagcacctcttcatcctgcctccccttgtttctactcatcccctgccccctaacctgctcccagcccagggaccttccacttgggtgggatcagcacctctcagcttctgcacttcccaccacgagcgtggcccccgtccacccatccctcctctgcaccccagtctcaagtcatcctcccccggcctttgggttcctggatctgtggcatatcccctccctcctccggtcccctgacctcttccctgctcaagccccgcgcccctggcccaaggcgggcgcctccgtccgcacccagcaccctggcagccccttccccacactcagccgcgaggactaggggagtgagtggtgaatggacggatggaggcacggaggcatggatggcgcggctggggctggcttacttgagcatggcttcttctttttcctcctcttccttctgccggtccatcactgccatgataatgttcctctcctcttcggtcaggtggctcaggtcgggcagctcttgcatggggggaggcaccgtgggtgggcgaggaccgcggggccccacggccgaggacattttcgtggcctgcccgccccctctgctcgctctctggctctcacctttcggatgcacgcccagcagctgcgcccctgcttccccctcacagcggagccctagcggcggcggcaggaggaggagcagcggcggcggcggcagcagcagcagcagcagagccggggagagcgagaacccagtctttcatggttgtttgcatccacccagccccggatgctgcctttgttttggtcgccctagcgaagctcggggccgcccggccgcctcccgcagcccagcctcggccggcgggggcgggcaggcggaggcgcggcgggagaggcgagggggcgagggctcgcgccaggctccgccgatccgggcgtctccggcggggcgcggggcgggggcggggctggggctggggctggggctgggactggggcggccgctgccgccgtggaggctgctcccaggctctgctgcctccaatttggggctgcgggagggagagggagagtttgggtgtcagttaggcggagtctcagaggcttccatccagggtgatgccgctgctctcgcagacatagctgccagccactcagtcccggcgccgctccgcccacgggcacccacccgcccactccccgggtccgagccacgcgtgccccggccgctacccctacagtcgccaacgtgcacagcacctcgctctatccccaggtacccctcacccatgagtcatcctccctcttctggtccctcgcctatgtcatcctccccagccctattttgcatgggtcgcattaatcatcatcatcctcgctaccatcttcatcatagagcattaatattatttgagcaaccacaatgttctgaacagcagaatggaacaccctgtggatacattttctttttcctccctgccaccgtgtctttcttatttactagttaagtgttcacagccacaacaatgtgattttttggatgcttttgatacacacacacacacacacacacacacacacacacacacacacatcctccaacagcctggattttctgggtatattgtactcatcaatgcagtgtctttcttgacccgtcctcgctaggactgttctgcagtgtatcaagatgccccacaacacggtaaatctttaatttgtgttttttggctctaggtagccccatcacatcacataactgctctctggtgcttacacatgagttatctactctaattcctctaatgatgttcgctatcatcatactcactcacatgtagttcagagtatctctgtaggtacttcccaagaaacactgatcccagataagaaaaacactcaaccatatcctattgtatttaagaagcttctgctaatgcctagcccaatgataggcattaaggatgagcttctcttgctgataaaggcagaaataaataggcaatcttttcaaaataggtaatgttatcagctttgaaacctggagactgaattttcttgatataattataaaagaatcaatatagaaaagggtttaaattgaacaacaatttcctagtcaagactccttagcaatgatgatgagagaattgatatgtttctctcctaggctatttttttaacttaatttaacttaaagttctggagtacatgtgctggatgtggagggttgttacataggtaaacatgtgtcatggtggtttgctgcacctatcaacccatcacctaggtattaagccccatatacattagctatttgtcctgattctctccctgtgccccaccacaggccccagtgtgtggtgttcctctccctgtgtccgggtgttctcattgttgaactcccatttataagtgggaacatggtgtttgattttctgttcctgtgttagtttgctgagaataatggcttccagctcaaaccacgtccctgcaaaggacatgatctcattcttttttatggctgaatagtgttccatggtgtgtatatgtactacattttctttatccagtctatcattgacaggcatttgggttgattccatgtctttgctattgtgaatagtgctgcaatgaacatccatgtgcatgtatctttataatgatttatattcctttgggcatatacccagtgatgggattgctgggttaaatggtatttctggttctaggtctttgaggactcgccacactgtcttccacaatgactgaactaatttacattcccaccaacagtgtaaaagtgttcctatttctccacagcctcaccagcatttgttgtatcttgacttttaatgatagccattctgactggcatgagatggtatctcattg

SEQ ID NO: 585710 - DNA, 4001 bp, Homo sapiens
attacctcagcctcccaagaaggtaggactacaggcatgtgccaccatgcccagctaaatgtttaatttgttgtagagatgagatttccctatgttattcaaggtggtctcaaactcctgggctcaagtgatcctcccatcctcacctcccaaagtgctgggattacagatgtgagtcactgtgcccagccctatatttttcttaagaagagcagggccagttgtttactaagaaactgcaatttacacccatgatttccagccctaatgatcagtctgtggtcagctcctaggatgctgaggcttagaagctagcaggcaacaaggactgacccacggacccatcccatcagttctgcttctctcctgaccctcacacctgtgcatggcctgcatgcgtagcccctcctcaatgctggagctcaatgcctgctggttgtgcaggcggctcaggcggataagcactcggtcttgatgggcctcgtattcctcccggctaggatagatcttagagatcagggcatcaaagttggggtctggccgtagggatcgcttggacaccagcttctttcggcaggtaggacactccttgttcctggggtaggagaagggaagccctgagtggtcagtcaagggaactgaagcctaggctgaaccaagaccagtgagagggccctaactttgtaccccttcatctcatctcaaacatgtctctcctattacccgctccgtagggctgtgacaatgcagtcagagcagaatctgtggaggcactccttggtggtcatcgtattcttcagcatgtccaggcagatagggcacatgagttctgaatgcagtgaccgaggggaaacagcaatctctgtgccatccattatggcttcctgaaggcatcagtgagtagaaaggtggtgtgggttagagggaaaggggttttagaaacagcagcccataaaataagaattttgagaaatacagtgagaagacccatgttggtctctataggagacaagaattctgagaaagagaaggactgatgacttggagcaaatggagaaaagacagactttagtgtccattaactaagagtaggagctttggaataggaggatctgaggtggctaagtggcctaggagtgaagatggcacaaatctgtggttgggaaaaactattcaacaaaattttttaaagtcctggtgctacctgtattagaaccccatagggtgcctgttaaaaattcagattctgagaacccaattcactactgaatcagaatgttggggggcatgaagctctgcttttaataaactcccaaagtgagtcttatgtgcactgacttatgacactgaatgaggaacagggaaggtaatttttgtgtttgtgatctttcaaatgaagataataatacttgttccacctctctggcagggctgttttgaggattaaatgagctaaatgcgaaagtgctttggaaagattaaggtgattcaaaggtagggccaggcaaggcagaatagagcaaattacggaaaagaagctgtgtgatgcggtctgtggatataagggtttgggggagggggtaagcctgaaagggagaatgcctgtcacctgcggggtccggtgcagctcatacagactcagttcccacgttttgctggcattctgggcattcgccggcgtcgtcatggtgaccgggcgcagaccccccaccagggctccacagccgaggagaaggcgaagaaggctgggggtggggggaaggggaggagggcgtcaggggggccgcccctcgcgtagaccccgcccctccagaagcgcccctctccgcccccgctcccgcccccgcgccggcactgcccctcacccagctccagccgttcgcgctcccgccgccgccgcgcctctccctaggcccgggctcctgggccaagttcgctcggtccgcaaccgctgctcagacagcagctcccgccaccgccgccgccatggcccgggcgctggggccctacgtcacttccgcctgctcctccgctacacccgctccccccgccggcggagacgtcacccaccattcgcggcgcgggtgggacgggacgtggacgccgcggttctcccgcccacgggacgggctcgtcccgcgtgaggatcctgcgtcccgggagttctgcgccacttagggaaccacggtctccgcccccggcccagcaccgtcgcgcggccaacaaccttagcctcggttcccttccagaggcccccacgcggggcctcagctccggggggccggggcctggaatatctgggaccccaggaggggacagagggctcgtgaaaagggctacctcccccactctgcgtaccctggcgactctggggatcaacccccctcacttctccgtaacccccattccaggatcccgggggaaaaggctgcaaaagatctgccgctttagccttctagtcctgagaacacacctaggtcccgatgtgcccgggattccccttaccaccctggggactccctccaccctctgctttggctctccctagaccctccgacccgctctcccgctcgaggtttgggggcggcggctcgggacgtccagactcaactctcggccggagccatagactcgagaattgcgtttggacaatcaggagccgcggcccggggcggggaagggagggaggcgcacgggaggaaagggggaatggagacaccacgcggaaacagggacatacacaagatggagctcccattgggaagggggggtgcgcgtgtgggtggggtacacaggggcagaatgtctggagtgggaagtgggcagaagcctcttcgaggactctagagtaaacgaaggggatggggaggaaagagaagaggaaggggcagagcgatccccattgagtgtagggaatgagagggatacagggcgagggggtggggggcagttagagaccctgatgggcatcttgtccccgcccgagctgaggctcccggacttgggctgcggctgccagggggtggcctgtccctgggacaaggcagcagtgggtgccctcgccccccaccccagttcccccctacttccctgtcctctccttcagtccgtggccagtccttatgtgggcgccagagtcgattagcgcagacccccctccccttcctcctcctcttcccagccccctccctcctgctctctccagcccctttcatcggctggttcattcccctaatcctggccccctcccctaatcccccccatccgaccccaggccggctgcagctattgtaaggtggagagaaaggggagggggggactcagagaaaggagaggggtgggggagggccacctgttccaagaccccctttcaaggccagactggacaccaagatggggccatgaacaaatcacccttggggaccataagaacccagggagttggggggaggggactggtgctgcagaaccagtggaaaggggtgacgcacgaacccctcccttcaaaaagacccggagtgtcacgcatacacagtgacacatactctttcctctcacacccggcggcgggggttgccctgggagaccaggcagagaaagggaacaatccttcgggaaagggaaaggagggggaggtggggaagggtctgagggcttggacacaagaagagccggaggtggcagggaagaggacttggaatttattagggtcacaagcacccctgcttcccatattcagcattcctgaaccatacactgccaccccttttgtatcctgggaacttagagtcctcatcagcaggaggccaggcagagtggtgggggggtgagcagagtccagggtccttgaggcagttacatgaaaagacctcctgggaggggcagaaacatttggacagatgcatgggtggagacacaaatgggctagggggtacccacttctgtccctggccttgggaacctctgcccttcccagtggctccagactccccttacttgct

SEQ ID NO: 585711 - DNA, 4001 bp, Homo sapiens
tggcatgttaaagttgtaactttgccagataattcttcgttgtgggggactgtcttctgcactgtaggatttttagcagcatatctctggcctctacttaccagatgccactaatgtaccaccacccccagctgtgacatacaaaaacgtctccagaaattgccaaaagtcccctgggtagaagtcgggatggcaacatcttccccaatggaaaatcactggtgtatccttacaataccctggggtggatggtaaattagtgccctctcattaccattaactacccactagctatgctggctgtgtttcttctgctgcttttcttctctaaagctttttgtacacttctccgtaaccataaaactggaatgcccttcctctttctctggctaacccctactcatccatcaagtatcagctcactatcacttgctcaaggaagtcttccctatttttcccccacttctcctttgtactacttacccaattcgaatacaaatagtctaattatttaataatatcggtttcccctgctagggtgcaagctctgtgtcattcaggatggtatttaccaatgcctccctaccacctaagactagatctgactcacagaaagcattcaacatacatatatttattgaaaacatccccaataattaacaaaatccgcatgtgatgaatccttactgtaaacataaagtacaagctgttttcttggaattccaaaataactccaatatgtttcattttgcttttaggcaggagttatccttcatccctctttccccagactccacgtccagtctaccaccaaacgctgccacttctacctccaagacatatctttaggatctgggctctagtccccaccatctttgaatctgattaccttattatttttgaactggtctctctgttccactcccaccctccatgaacatcatctacctagaaagaatgattcctttaaatcaccaagcaaataatgtcattcttctgctaaaatccctcctatggctttccataagacccacattaatatctgaacttttcaccatcacttgtaaaggtctccatgatctggccccccttcttacttctctatcaccctaccaatcttctcaactacctccactgtgctctaggcactctggcctcggggcctttgctcttgctgtcccttctgtgtgaaatgctgttccctctgctcttgccaggattagctccttgtcattcaaatctggacttaacctttccctacccattcagtcaccacttggtatatcaaacgatttgcatagtctacatcattatttggtttttaaatggtgtgccctctctttcacgtagaaggtaaagttccatgacagcaggaagttggttcttcttgttacctccggcgcccaggacagaacgtggtacatattaagtgcttagtaagtatttgttgaacgctaaatgtggttaaaacgcaaaaacccatgtttcctaatcgctatccccaactctgcctcccagtgacgctaaccgacctgagaaccgcagactcccttgacaagtagctttcacttaactctgccgcgtgaactgggagaaaaacccagctgggatgcagaaacaggcaaagggttgtcaagagagacgctgagtgatgaaccactagtctccctctaaaccgcaaacaagagtccacaccccaagggggcggtcaaggagagagccgtacccagagccagggcactgtacggccgcctacctgtcagaggagtccgcgtcgtcgaattgcccggggaccacccggctcatgagaagccgccggtagtccatgactggagagcgccgccggaggccgccgctctgcgatggaaaggaacggctcagacggatgtacccacggccgatccaaaggccttggcgtggatatccgccttgcaaaccattcagaagccaacagtggccaccacgtgcgacgggaaaacgggaccgacagatccaccaccctgccaccccaaccggaagcccctcaccgcctcgcccggaagtctgacttgagcggaagtcccgcccctgcgccgagctgggagtccggagctctctggatggcgcgctgtatagggctgtggatgttctgtgctctcaggaaggcgtgttgagtagccggcacggcgaggcccgtgctggccgtttcttcccggagttttcgtttctgtaccccactttgtgtttactgcggcaggaggcgccagctagcccacaggctgttcggcctagggggtcgtaccttcctaacttcaccactctctgggaagacaccgcacccacagtagggtcgctcgggcctcgcgggctgcacctgtctctgcggagttcccccggcgcgggcggacgtcacacaggggcgttccagcactccgggagcccgattgcgagtttgtgagagtccttggtggaggaggttggaaagcgttctccctcccacaaaacccggtgcagagggagggagagccaggtccgtagcgtgggtccaagaaactatggatcctggaagtgagcacacttttgtgtcttaaaaagtttggtgtctcgttttgaggtgaaaaatgaatgagataagtgctttttaaaaaggtaaagtttgtcttacaactgaaaaagcttttaaacaaaactatagtttttgcgagtaactcccgtgacacctcttttaactcctatcttaaaacagctttagaatgtctctggaacatctattcaaacatttgataaatatgttaaaaatccaacataaacctgtaaggacaaatgaaagatggaaaaaatagtctaactttaaattaaaaaggtaaactggcagattgtgcagtgccacatgagggatgaacaaagttgtagaaatgtaattggaagtgctgggttcacaaacaagaaaactaagaaacaaggcctttgcgcttttttgcattgggaaaacaaagcaagaatttttcagatctcaccacaatccaggcagcattatttgaaagacaagggagaagtgagcataaagttgggcctttcactgatcctgactggtctgcttggcttacttttttatattttaccaagtgatgacataggtttgaaaacaactaattttcaataaactattcattcagaaattcaataaaagaatccaggcagatgagtaatgactataaattgaaagagcttgatagaaataagtcattggaatgcaggttttattcaatcaatatttgctgtgtagacagcactggtccatttgcagtaggggatattggaaagccctaagtatgctcctctcaagacatttatgatctgtaaacacaaacactaacacccttgaaacagtggtgaagctctaaaacagtaaacgaaatcaccaagtgctgaattgtaagatagagatttagagactgaagacattgtaggaattttgaaaatagatgaatgggtagatgggaaggttttaggagagaagcacgtgccagggcagatgactgaagcttaattcgtaaggaacattatctgtctgcagggaaatgagcctgatctgagtagagcaggggagtaccgggtaggggatgtcactccaggctatggatggcctggaaggacaaaaatttatagaatcaatgtgagtggccatcctttccactctcagctctggagctctggacaggcctgaggaagtcaggagaatatggaccagtgtggcaacatgggatggaaagaaagcacaggttactgaaagactttttttttttttttttttttttgagatggagtcttgctctgtcacccaggctggagtgcagtgggccatctcggctcactgcaagctctgcctccggggttcacgccattctcctccctcagcctccagagtagctgggactacaggcacacgccaccgcgcccagctaatttttttttttttttttttttgtatttttagtagagatggggtttcaccgtgttag

SEQ ID NO: 585712 - DNA, 4001 bp, Homo sapiens
ttagtgtgacttcttggattgggattttgtttatcattttaaaggacacgaaacaactgacaggcagttcttaagagacaaaatacactcacagcatgttaaattcactgagatctgcatggacaagtctggcatcctgatacattcttctcatgtactgaatgacctgcaggtacaactcccgagccttggattctgataactggacatttttcaagagtggtgcaggccttgaatgaaaagaactaagataaaatgaccaagaacaagttttcttgcttcttactatactgttacatgcccttctcttctacaactcatcatgtgagctgtatgtgggacaatctgtctcaatgcacataaaccaagaaggtaccggcaaatagatgctttcccaacacactgtataagaccaccctccaacacaggactaacttgctcctcattctgaagcattttcagacttgaaaaggtagaatacattgataacacttattcactaatatagtgggaaagattaataagttattcaaatgggaaatattcatatagtggataaactcaaagaacttaaaaatacagttctgagaatgcaattattagcccttccatgtacttacatgtcatctttaccgatgaaactcatgacaagaacatgacttcttagcattattggttctggacatggtatctctgctgtgtttagcctgtgatattataacaaataaaaggacaactgaaaagttgaaaaggcatctaaataaattacaactgcaggtcccaagattaatattgctgttaagaaatagcaccaaggcctctcaaatgtattataatatttcataaactctaagattattttaagtggcaccattatgtaccaccgagaatgataaaacactagcaattcaactattacatcccataacctgtaatacccaaagcaattccagagatgttaaactgaaaaaaatgtgcatcttacaatggaggaaatagaggagataggtccacaagtatcttttgtgttgaatagcctgaaaaatgcttaataaaaatagttggactcacacctaatagcttgttgaacacaaaagactttcaaaacgagtagtacttgctcaatactacactatccaatgtgtcacctgtgtacaccatataaaaagttataagacattttttaaaactccataattttcaggaaacttgatctcaactagatgaggcctttacctgataaaaaggtgttagtgcaaacaaagaatataaaaaaagtgtccaaaactggactaagaaaaggaaactatgataaacaaagagttcacgacctaacaagattagtcgaaaactccaatacctacgaaaacatgacagagcattataaccatctgattgtgtcactttcctgattaaaatcctttagcagttccttattatcctcagtataaattctaaacattttcaatggcttacaaggccttccaaatgatctagcttcgtggaataaatatgaattgtggcagtattcttttgaaatggattctcagaatagaaaacaacagaataggaaacaatctctatttgtccagacatgtgtttcttctgcttacttcagcagacctaatagaaataaaggccctaacaagtccctacatttgggcagaaccacactgggatctgctgggaggaagggctgatgttcatgtacagggcataggacagacatacacacatcccagacagtcacctgattaagttcctcatttctttttctgcccaagttttcaccattttcctagggtttcctttacaatagccatgacgaaatcttgaataagaaaaatgtttattatttcaatcattccattattattttaatgttttaggaaatagaaattaaaccaactggagggaaaaatctgaacttacctgaattctccacttacatatttatcccgatctttgaacaccaaaatagaagttttataaattttgattgctctgctctctccatttgctgtgctagcatggtatacattagcctatattaagtcaaaaaaaaaagaaaatgaagtttatgttaaataaccactttttcaatctatttgattctaacctcaaaagtcaagtgaactgaaataacatgcataaggaataccactgtcttttgaatatgtgaattaaaatgtaaaacattacatcaaaaggacagtaaacatagctccaatatacaaatacagtcacgtgccacataacgttttagttactgacaggtgacagaccgcatatatgaggtgattccgtaagactataacaggtatttttactgtactttttctatgtttagatagataaatatttaccattgtcttacaattgttacagtattcagtacagaaacctgttgtacagattcggaactaccgtatagcctgagagtgcagtaggctatactatctaggtttgtatgagtatgctctataatgttcttcgcataatgacaaatttgcctaatgatgcatttctcagaaagtattcccttcattaagcaatgcaagactgtacagtaaaatccaatttaaatataggggagaagtggtttcaaacttttttatatctcaagtatatgcaaaataattaaagacattcttaaatccagtgatttaggcaaggcgtggaggctcatgcctgtaatagcagcactttgggaggccaaggcgggtgaatcacttcaggccaaaaatttgagaccagcctggtcaacatggcaaaaccctgcctctactacaaatacaaaaattagctgagtgtggtggtgcacgcctgtagtcccagctattcgggagggtgaggcaggaaaattgcttgtacccgagaggcagaggttgcagtgagctgagaacatgccaccacactctagcctgggagactgtctcaaaaaaaaaaaaaaaaaaagactctgtttaaaaaaaatttaaaaatccagtgatttataagttgaattttactgagaattgcttccagcagaatgggttttacacttttaaataattgctttaaaaaaaaaacaaaaacagaaactatattgagccacaacactcacatatatttattagctggccctttcaagagcctgcagacccctgccattatagctgagtaaatcacagtaagagtttccttcaagctggagtagtcaattttgagtcaaaaggatttcagagtcttctctaacaaacagaaggcagtatacccgtaggtaaagaaaaaaataagaaagacttgctgactcatagaaacataaccataaacccctggccccatgagtaatttattttattagaactcaggcctgtaataatctgaccatctcactcactactgggcacaactagttagactcaatgatccaatgcagcagcggtagtgaaaagggcgtagttatatgtacaacttcctctctaaccatgaatattaatgtgtatggctttgtttttctttcttcttaaaggcataatgtagttctaagtgccagtttcatctggtatctgaaataagaaaattaaatatccaatcatccaaagaagagctcacttcttttcctgtgctaatgcagccatttatctctgttatgattcctctagtcaacatcttgaataaaatcattcttgttctgggatccaacacctaaaaagaaatgcaaaaattaaaaagttccaaaagacggtaccaaattttcctcattaaaacctgtgacaatcaataaacagcagagcttaactgtacgacgctatcctggttgactaaatgagagtcactatttggtgcttttattcactctaattgttaatcagtaaaatgtcaggtaaaggccaaaggaaccaaaggcaaaaccaactagcaagttcatccagtcatggaaatcaaaggcaaccaagttcaagagaaacagaactctaggctattagctaatagaagtataatgcaaactacataaa

SEQ ID NO: 585713 - DNA, 4001 bp, Homo sapiens
gcgcaaggccttcatcttaacaggcacataagcttttaaaaatgttttcaaatcatttgactttggtaaacaatttttatttttgttttaaatcctatccagtgttgttgccaataatttctatatttaatttaaaataaaactttgttgaatggtatcaaagtgcaaccactaatattctatctgctctcacggtcatttatagtgtatatcctttcattaatccatatttaatgtcatcccatcatgcatatactctacatcagatgatgtctgcatcatgaagacagggcttgtctctgaactgtagattgcagagcagcggacaggtatggtaaacagccaatcacattcctaagacacagactatggaggactgtccacaggatcgagaggatgaagagaccactctcagggcagtaaaaggcaaggaagattttctctttttttcagagacagggtcttgctctgttcacatgcaccttttattttttgtagagaggggatttcactgtgttatccaggctggtcttgagcaccaaggctcaagtgatcctcctgccaaaagtgctgagattacagaagtgacccacggagcccaatcaaggcatagatgttttaaggagaaactgacttcaggaaatccagcctgtaatcccagctacttgagaggctgaggtgggaggatcacttgagaccaggtgttggagttcagcctgggcaacatagcaagaccttgtctctataaaaaaaggaaaagaaaattcaaactaccaagcaatttgcaaatttgatgctaacgagctgcaaacaaacaccccaaggggagccataacagacagccagggcccaagcgctggggatccccgtgcggaggggccctctctacctcggctttcagcacgtgcatcaggttgcccttctccatgtactccatcaccagggagtacttcccttcctctatgatgacgcccaggagcttcaccacccggctgtgtctcagtctgttcatcatcttcgcctcctccaagagggcctcgttgtgcctgtgggcaggaaaggtgctatgctgaggctggcagagccagcgcctcaagagcctggtgcacacctccaacacatcactcccacgtgctggggtcatgcttgggtctgtaccgatctcttccaggcacaggccagaagcgttagaaggcagagcggtttctcacttcctcacagtactcctgcccagtaactggcagtgcatgctccaaaaatgtaaatcaatgaaggaatgaatgaatcaatgaatgaaaagtacatgaacagcagcaaggtaacctgaaaaaagaccgtgctggacagaacgattaaaaaaaaaaaaaacagcctctctcaaaaccactctgacaaaggagggagagaggtgaaaccactctactggttgctttaaagggaaggctctcagaacctctcaggaatgaactgccttttcatttttatacttagggctggtcctcactgaaaatgtgaagcgagtgaataggtctgtcttcacccatcctcctgtttccttttcattgtccccccaccacacttatctctttgtctttctctatttccttcttgttcatgtctcttctgttacttaccagctgtgagagtccttcactacccagtctcagagtccacatcagcgacaataacaatccgaagagccatcgtcaccctgacatcttggcaggctccctctcactctacccaccaacggctccgcagcagccaacggctccacaacagccaacgtccccatcccgctcagaacttagcccacccacccctgctccctactcactcaatgcagttgggccccttgtacactgttttcatgatcatgagtccctgggttctgtggaaacacagagacaccttcccaaagcctccgctgtccagttctgcactctccaggaagtcactggatttcatcttaatgacattcaaggacatgtctggttgcattctgaagctcaagaacgcccaaaatggtaccactttttccccccccggcagagctgtaccctgtaaagaaaacagagagaaaacctcagggcaagactatatatatatatatatatatatatatgtttttttttttctcctttggagacagggtctcactttgtcagtcaggctggagtgcagtggcacaatcatagctcactggagcctcgacctcctgggctcaggcaatcctcctccctcagcctccttgagtagctgggaccacaggtgcaccccaccgtgaccagctgattttttaattatttgtagagatgggggggccgggggatctcactatgttgcccaggctggtctcaaactcctaagatcaagggatcctcccacctcagcctcccaaagtgctgagattacaggtgtgagccattgtacctggcagaaaagatcatttttaaaaacttttgttaacattccaccacatgcttggtgtgccttggatttctgaggatagacttacagtcatctgatgagctatttttcatatttttaagaatcagagaagactataatatttattccctcagcctttttatttctggcaatatggagcattagaaaattttaagaaccctccagctataaaggacacaagtatgttggacaacataatacaaacattcattgaaatgcataccaaaactccgtggaaaggaaaagaactctagggacagaaacagagcaccggaggcaggcagtagctcacacaggggagtgccaacctcgccatccagaagtcaaggtttaaagcccagctgaggtcaaggaatacaagaaaagaaggtagaatgaagaatccccccttaacacggcactgctcaatgtgcaaccctttgatgaaaggatgaactagaaaaaaagcagcccatggcaaacaaacatatttgtcttggactgggcacaaggtattaaaaaaaaaaaaaaaaagtttgtgcaaatttataaccttgggcctgtcttgaaatagatacagactttgaattgagaggatcgcctaaactatgaacttttacacaggaagtggtcacaggctgatgccatcctgaggttataggctaaagcaaacaacaacctcaagccaggccagacagaattcctacaaatacaaatttaacatgagctccctttccaaaattataaaacacaaaagaaaaaattcactgtgagacagaccctgcagctacagcaagcagcactagtaagcaccaaagaacttcagtaaattaacaactgaaaggcattagaaaatgaataggtttaagtaattatgaacaaaagaaggaatctgaagaatataaaaagaacaatgcaaactctaagaagaaaatgtgaaaaaggagtagaatttggagaatgtccatcagggctgtgaagtatacagtgtcagatctcaaagcacagctatttgcttcatccttcctcccttcttttcttccattcattcattttccccaaactgaaatatagaataaaaacccatggagaaccacaaggagacaccactacacaactaccaggatatccaaaactaaaaagactaatacaccaaacactggcaaacatgtgaagcaaccagacctctcaaacatcactggtgggagtataaaatggtacaaacactttgggaaaagggctggcaaaaagcttcgtggcaaaacagaaactccatgcaaaccaacaggacacggacacactggtgtgtgcatgtgaatgtgcgtgtctgtgttttgctttgagagtaaaaggagggctatggatgttttgtattccagaaatacccacatcccggctgggcgccgtggctcacgtctgtaatcccagcactttgggaggctgaggcgggcggatcacgaggtcaggagttcaagaccagcctggccaacatggtgaaaccccgtctctactaaaaatacaaaaatcagccaggcgtggtggcacgcgcc

SEQ ID NO: 585714 - DNA, 4001 bp, Homo sapiens
gcccatgggttcccaacactacatacaggatcaggacagaactctgtacaagagtgtgcaagatttggcctctgattaccctgctaaaatgaccacaacttcacacacctaaactccttggagttcccgcaaggagccacaccgtttcatgatcctgcttctcttttccaatgctatttcttttgctcccacttcccattcatctgactaacttttccaagactcagccaggtaaccacaacttataatatacacttccctgacccttccccctaccactgacagatttaggcacttcgtgccctgcccatacttgtaaaactaaccaaactaaattccattacaacacttgccatgtgctgtgactactttttcctgtgtccttcaccagtgctagcacacggtaggaaattagatgtaatgacttctatgtgttatttatgaccaggggcactttacaaacatcatccagctcttcatttaacagctctcggaggcaggaaaactgcagaattcttaacatttcacctgaataaaagtgacacagaatcttagataaaggctgacttcctgtgactaggaacagtaaactagctccgcaagttaaataaacttttgaccctttctataaccattctcaataatctttaggattttcattacatttctattttttcctactcggcaaacttgtaagactgtaactgttaatcccattcttccttccagattgcaagacaaaagcagcatacacactctgcctgatgcgaagtcaatttcattcgaaccctttaggatttaaaaataaaaactgttttgccagcacaagatgtcaccgctctcttaccatatcatcccctttccctcttcgtaatatattcatcaagttcactgagtatgtattcatcaacagtccctttacgtgggaccgtgagcccctacctttttcaatttgatgagtgagaagataagtaaccttgaagccagattttcagagagagagagagagactgcaggaccagctgcggagctgggctgcgcgatgcccctggctcctccctggggctggaggagcgggagaccttcggcgaggcctgtcactcacctgactgggtgcctgaattggtaaagctttcctgaggctgcggtcattccagggccatcgggcatctggagaggaaaggaagtgaatccagttatcacccacctccttctagaaagtggaaacgtgcacgacccagtgttcctcgtgcccgctgggaatgtaaccccagggctctcagcagcctcgctcccggctgggtgcctgtggcccatcgctccagaggacacatccgccgcgtcggcacctttatggccaccggcaggcgggatgttaagcgagaggcaggacccggtgtctcgcatgtctctctcaggccctgcgtcccgagagccctggtcgatcttctgcacccgtgggaggcgcggcctgagacgcgtggctcactcaccgcctccgcggcgtggttcggcgtctcctcttctttcttgcctccggcgtccacccagggtctccagaagcctgcgtatctgcgggataggggagcacaaggcgcgcagaggagacgtgagcccagacccgggagaatccaccgaagccgagcgctggcaccgggcagtgggggatggagagttggaggggaggagctggggaggcgcaggagggagagacgggggaagctgggaggcgcagagcagcgcggggaagcctacccggagtccgcgcccgcgcgccgcgtagggccgtcggtggccgcgcacgccgcagctccactctctgtaccctctgcgcctcccgcgttctccatgacgccgcagagctgggcggaaggccgctgccagctcgcgggcaatcttgaccagttccagtaggtccgagacccgagctttatatagccctcgcggcctgctgcacattgagaggttcgctgcctctccgcccctctccctgctagccgcataaacaaaaaggctgcgcgtgaaggcgcaccgggctgagccccgggtgtgaacgcgtgcaactcccaaatggcccgggacagggttttgtcgagcgaatgttaatcgcccttcgacacatggctgcggagaaaaacaacattcgcccgagcagccaatttccgtgtgaagaggccaggaggagatggaattaagcgagtctacacgttttgtggatttctgcaaaaaggccaagtgactggttaattgcttgattcgctggagactcaggacttggcctgtggcaaatcaactggttctgcatcccgtgttctaaaagctgggatgcagactagaattcaaaggaataaacttaattcctcttcatggaacaattttctaaaaaatggggagaatgcatggactccttaagagaggaatgtcggttttttaaaaaagtattgataaactaggttcatactccagcctattattatttgaagataatagaaaattattggcaacaagaggtaaattgtaaaagattcgctgttctggctaagagagccagagactggagtcatgtgatttgggcatagagctctaaattatcttctcgtgtcttttgtgattttccccaacattttatcagtgtcctcctacaataacttttgagttcgtctatacacctctgtcactacttggtattttgtcactcaatggtaattacaaaattcttttttgagggcagtgttgtggaatgataatgaaatcttgaaaagttatgatatgagacaagttaatcaaacgtctgcacccctgtttctctgatttgagttacccctcacttatctaccactaaactttgtaaaaagtgttatgcatcgaggaaaagatgatatataaatgttataatttttttcaaaatgttttaaataataaaactggactttctcttaaaagtttagacaaaaatcttgattgtaaactatagttgtctctgctattcattcagctactgcataggaaaataatttaattattaatagtagctaagagcctataatgatctacctgccaggaaggtgagatttgggttgcttctgataagaaaatcagtaaggatagatacctaatgcatgtctgcatcccctacagttattgttaggctaaataaaataaagcttataaaatgcgttttgcagtgcctggcatatagtaagccttcaacagattttaagctacgtaaaaaaatataaggccttaacagatgttaacctttctgataaaatggcttattatttcagttccataatgtaaactagttaaatcattgtggaagatggtgtggtgattcctcaaagacctagaaccagaagtaccatttgacctagcaatcccattactagggatatatgcaaaggaatatcaatcgttattttacaaagatggcatgcataatgtttgtatgcgtatgttcattgcagcactatttgcgatagcaaagatatggattcaactcaaatgcccatcagtaatagactggataaagaaaatgtggtacatacacaacacgaaatactatgcagccataaaaaggaacaagatcatgtcctttccaaggacgtggatggagctggaagccgttatcctcagcaaactaacgcaggaacataaaaccaaacactgcatgttctcacttataagtgggagctgaataatgagaacatctggacacagggaggggaaaaacacacactgggcatgtcagtgggtggggtgggaggagagagaggattaggaaaaatagctaatgcatgctaggcttaatacctaggtgataggttgataggtgcagcaaaccaccatggcacatgtttacctatgtaacaaacctgcacatcctgcacatgtaccacagaacttaaaatgaaaataaaaaataaaaaaaaatctttttgaggtggctgtaatgtgctaactactgtgctttccagataaggacagtaaggtattcctcc

SEQ ID NO: 585715 - DNA, 4001 bp, Homo sapiens
gccatcccatctaggaagtgaggggagtctctgcccggccgcccatcgtctgagatgtggggagcacctctgccccgccgccccgtctgggatgtgaggagcgcctctgcccggccgccccatctgagaagtgaggagaccctccgcccggcagccaccccatccgggagggaggtgggggtcagcccccgccaggccagccaccccatccgggagggaggtgggggtcagccccccgcccggccagccaccccgtctgggagggaggtgggggggccagcccccgtccgggaggaaggtggggtgtcagccccccgcccggccagccgccccgtccgggagggaggtggggggtcagccccccgcccggccagccgccccgtccgggagggaggtgggggggtcagccccccgcccggccagccgccccgtccgggaggtgaggggcgcctctgcccggccgcccctactgggatgtgaggagcccctctgcccggccaccaccccgtctgggaggtgtactcaacagctcattgagaacgggacgggatgacaatggcggttttgtgtaatagaaaggggggaaagggggggaaaagattgagaaatcggatggttgccgtgtctgtgtagaaagaagtagacatgggagacttttcattttgttccatactaagaaaaattcttctgccttgggatcctgctaatcggtgaccttacccccaaccctgtgctctctgaaacatgtgctgtgtccactcagagttgaatggattaagggcggtgcaagatgtgctttgttaaacagatgcttgaaggcagcgtgctggttaagagtcatcaccactccctaatctcaagtacccagggacacaaacactgcggaaggccgcagggtcctctgcctaggaaaaccagagacctttgtgcacttgtttatctgctgaccttccctccactattgtcctatgaccctgccaaatccccctctgcgagaaacacccaagaatgatcaataaaaaaaaaaaaaaaaaaaaacacaaccagcatccattctcttatcttcctccactttgcatttctccattgtttaacatcacttgcacacctttaatttttagtttattaattcatactgcaaacgaactcagttcttatcatgtgccaggtattgtcctagttgctgacaatacagctgaaaataaaatagacaaaaatcctatcttttgaatcttttgaaccttgcattgggagtgacagacaaaacgaggtaaatcagtaaaatacgtgagacacaaagctaaaggaaaaaaataagaggaaagggcagatttttgtgtcttccttccagaatggaagctccctgaggatacggatttgtgttttttcctattatatctcctgacaatagcgcccagcacatagtaggcattcgatcgaatttttaaaatgaaatacaaggcagttactcagttcccgggcacatttcaacttttagagaacaattacaccaattaagaaaatcgattacagctaggctacgattcgagagctaagtggcgctcatctttgggagtatgccgttcaattcctcaaactcaaaattattttatcgatttctacagttaccgcggtgcactggctcaaaaaaagggttcattaattgagtgctttttactcccagctaagctgaccaaagatcacggtaagaggcaaagggtcacagccgcactggcgtaacccgtaactgtacacgttccgggcggccaggagccagggcgcagacctccaagccggaccactcgagctgctaaagaaaaggcaatacactaacctctccgccggaagagaagaaggaagcgccagggacgcacgcttcctcggcaggactgcagggaaagagccgcacccccagcctctcactactgcagccaacccatctcctggaagggcgctcccgcccacccccgctactgcgcagccgcactgaactctggtcccacttagcgggagaaactcgggccacgtgactgtctgaccacgtgagccgcgtcgccgcgacctcttccgctccctaggccctgggacctcccggtcccttgcctgcttccggctttcgctcgcttccatatccgctcctctagtcgccctccgctggccccgccttcgtccccggaagattgggtcttctggcgagccactgtttgccgtttgatcgggcaccaaataaagtttctttattcaaaagcactttttttttaaagccacaccacccccattctcagctcctccttcgcggcggtaccgcctctgtttctgcggcgattgaacagccgagctttgcggccgggatcgcggaaagtgatggctgtcgtcccggcgtctctctcaggacaggacgtggggttagtctagcttttctcctccccacttttgcggaaagccgggcctcgccgggagcctgtggggactaagcggagggcgcccgctccccggtgggctgcgttcgagtcccgccgccgggcgcggctttccggggcgcctttgcgggtttcgcggactggctcggaggcgaagggaggcggccccggggagggagcctgcccgcggcggctgctcgtaaggatcaggacaggggtcagcttcgcggtctgttcctggcggtcactttttatttattcactttaatagacgcgctttgggggcgttaaaattctgcgtaagagttggggatctcagcgctattaagaaacgggtttctccctgttgttgatcaaatcgtaatctcacagtaagaactgtctagttttttgctttatagtcgtcacgctactgattcttgggtaaagttgtgggtgaccgtgcaaataacatccatttgcataaatcgaatggccaaatttatatttgaaatttgtccttacttcaaaatattgcaaaagacgagaacactttgaagaaaataaacctgggcagaaagtaggttgaggccaacaaagtggcgccaatggccccaaattgaggcagtcactgtttcaggtcatgcaagtatagagagtatctccttcaattttgcgccctagggcttctggcctcactccagtcctggccagagactttgttccagaggtgcaggaaatgtagtagttaggaaaacagtaatactttccaattaaagtaaaatctcaaaaaaggacttactatacctactgcctgggaaaattcaagtgacagttgatttaatgttcctgctcaccctctgaggtattagtgatttcttttattaatgatttttaaaaattaaattctgatcaacgtagttattatgcgcattaaaacctaatcactgttttgggtggtactgaaagcaccacagagtcggaaagtgtgtgcagtttttttcttaaagttctatagctatcatttgaggaaaccttttgaagaaatacccaagttacaatctagtaatttaacaattgtctcctgtgatctggagataaaaacactagtcagctaagctctgtgctctatatttaaaactgcacagaatttctccaccaaataaagctttttttctacctgtatcatgtatttccttagaatgatataaaatgataatctgtaaatcttgggttttgtatgaataaaatcaagaatatctttaattttttaatgcaggtataagtttttcttcatctccagcttgcttcattcttgaacacttctataaaatctctgattttttgagtgggaagagacagtagcacgccttcatttgcttaggggcagaataggatggaaggagtccattgtgcagatagagaaggcagagaaggggaaaatttttgaaaataattaaaattgacttagaaaatagacagaatggagagaaacaggcttaaaagtacctttaattctttatgttgttcaagcacattagaccctttaggtggttttagatgcattgcttcattcatctttctaagcaggtgacttagcag

SEQ ID NO: 585716 - DNA, 4001 bp, Homo sapiens
ctgaacctcatggccaataaataaggacataaatgtagctctttttcagaaaatacactttccggaacactgaaatataatgctacattttaatgtacatgattaaaaatatatacctaaggtgtttaaaaagtaaaaccctggccgggtgcagtggctcacgcctgtaatcccagcactttgggaggccgaggcgggcggatcacctgaggtcagaagttcgagaccagcctggctattaaaaatacaaaaattagccaggcgtggtggtgtgcatctgtaatcccacctactcagaggctgaggcaggagaatcgcttgaacccgggaggtggaggttgcagtgagctgaggtcacgccactgtactccagcctgagtgacagagtaagactgtctaaaaaaaaataaataagtaaaacccaccttttccacacctactatgtaagtaagaaatcctattaacccgatcattacccaaatagaaagaaataatatggtattcaaatattggtatcttccacagaattaaagttggagttctttgcagcaccgcctgtttacccctaattaatttgggcggctgccacacacacacacgcacacacgcacgcacacacgcacgcacacacgcgcacacacgcacgcacgcacacacacgcacacacgcacacacacacacgcgcacacacgacacacacgcacagacgcgcacacacgacacacacgcacacacacgcacgcacgcacacgcacacgcacgcacacacacacgcacacacaaacgcacacgcacacacacacacgcgcacacacacacgcgcacacacacacacacgcggagggcgagccaagggaagggattcagaacaggatactcaaaaagaggaagaaccgtcgtttcaccacccgccgcagtgaaagctgaaattaagtgtcccctccacgacttcttcgacctctgagagaacttcgagtgcaggaacagtgctccaccaagcctgccacctgctttgtcgcgtcctaggctgggagcagtctgtgggatgagtttccagtccagctccaggctggagtgtacccaggacctcaccctaccccctactccttcccaggggtcaccccggggagtgttcagggctccccaacccacttcttcccaggagtcaccccagagcgtgcccagggctccccccaacccactccttcccagaggtcaccccggggcgtgctcaggactcccctcatcgcactccttcccagaggtcacttctgagtgtgctaagggctccccccaacccactccctccaggggtcaccccgaggcgtgctcaacttcccaacttcttcccaggggtcaccccggagcgtgctcggctccccccgccctccccagtcgctgcccggggctcagcgaccgccgaccccgagagctgcagccttcacccagtggaaagctctagggcccggctcccacgctccccactttacctcgcaaggtaactcaccgcaggcgcttgtccgcaccgcccaggcaaagcaacgccaggcagaggcagcccagcagggccccgcgcagggctgcagggcgcatggtgccgacctgcggagagaacgctgccagctgccgctccggctcccacttcccacctgctgcccgaggaagacttccgggagaaacgctgtctccgagcccccgcgccgccgcgctccctccgctgcagcagcggccaccgggtgcgcccggagccctgggacggcctaaaccagtatctcgcgggccccgcgccgggctccgggaatggccgcagcagccctggcgacccgggcccctcggagctccccttcaggatcgtgcaccaagcgcgcacgtcccgggctctgcttcgcgacccacagcgaccccagctcctccacgctgcagccgccgtccgcccacgaccacggtcagtcgcgttgctcccagcccagggcgccctgcgggcctgcaccggagcagagagccacgcccccaggacggcacgcccccgccggtggacacgccccccagaacggcacgtccccgcccggcgttcacgccccgccccgtggttggctcagagaggccgaggcaggagcagctccgcgggccttgagggcgtgtcaggcggctgtgttccttcgccacgcaggcgccccgcgccttttcccgcagctctgcgccactcccacactcccgggtccgagctaacctagaccacccgtgaggaccgccctcggggggaccgcccgtgtctgcgccatcccccgccagcaagtgggcgtgcgggccccagggccactctactctccagggacagcccccagcccgacccgcgcaccctgcaggcccgcggtccgcacgcagcacccgctttcaaaaactgcgccctgcaagctgcccgggagctcctgactgcagatggtgcttggccgcccaggctccccgcagcctcccgccacctcggcgctccactgcgcagcccgagggacggctccagaattaggaggggacctactcgggtcactctcctggaaacctctccagtctcccggtgctaggtgctgggagcaccaacattcctagaagggcctggccctcacccagccctgggcctcacctgcccctccccgcgggccccaggagcccggaagtcatctctgtgggggcagcaaagagccgcctcggggcgcgacctgggaagtcatcttgtgagggatcccctcccagagggacgggccaccccccacggatgaaggggacttcatgtcagccccaccttggcgtagccagggccagtcccataggcccggtctcctcccccaacaccctggccttcccagcccttcagaggcacgggttcccctgcacccgcggccccgcccacgggctgtgcacccggcattgtctctgcagatgtttctcctctttcccttccctgtccgcacacccacagctagttaaggctattcctatttacacgtcgagtaaactgcgccttcctcggggtcctctgccactggtaactgtctaaatagcaggtgggcctgtagcctgctctcccacaggcctggaccttgcctgcatgcattaccattctttgaaacaaaatatttaaatgattaatctgtttttcccactagactgcaaggcaaggcccatgtctattttgcccaccttgagtccctgccactgagcacagtggatgggggacagtcggtgctcaataaaatgccacctgtggaacagatggggggggaaaatggctgacacctccttagctcctccaggacctcctacaggtcatggtgttattctcgttctccttttccctaacgacttatttgtttctttccggctcctttcattccttcctctcaagaatataggcacacgccacagttctttttctcttttcttttaagctaaaaaaataattttcttaaaacaaaagtgcttcccagaatcctcattttcctttaaatcacagtccggtgtgtttaaacagccccttgtcaaggagggctgttgtgaccactgccaaatataaagcaaatctggactcggggaggagtggtgttatgaggaccattattgcaggggcctgggggccttttgtccctactaaaaatacaaaaatttgctgggcgggggtggcacgcgactgtaatcctgtggcaggaggagcggcagacaaaacctctcagacaccgagctatagaaggaagggctttattcagctgggagcatcggcaagctactgccttaaaatccgagctccccgaatgcacaatttctgtcccttttaagggctcacaacattaaagatttcacatgaaagggtcgtgattgatttgagcaagcaaggggtacgtgacgggctgcatgcactggtggtcagagagaaacagaacagggcagggagtttcacaatgttcttctatacaatgtctggaatctatgaataacatcggtctctaagt

SEQ ID NO: 585717 - DNA, 4001 bp, Homo sapiens
gagcatactcttctctctgctgtagagtttggctccaaaaacctggttcataatctgagacccaaaaactgattattttaaaaagacatgtcttaagctgacctagtttggaagcctgaatgcctttaaattgccaatgaactgaaaccattcatgagaatgggccttttgaatgctgagaatgttctttgggactcagcacaaagatatttggcatagatgactgtaaatatttgtaaaactctgggtaaatgggcaggatttgaccacactcaagcccgacttccagcacagtagtgtaggagaaagttatctagggtgattgtttggggttttggggggtttttttggttgagttttgtttgttttaaataaaaagccaagcaacccaattctactactcaacatctttttcacgttcactatatatgtttacctttttttaatcaagataattaattagtcagagactacttttgaaactgaggtttttccctttcccacttttctaagtttatgcccacgacaaaaataaaaaaaaaaatgccagtcaaaggtgtgcaagggcagagcaggagttgtgtgaaaccatgaccttggatttcataatacaattatctacaagtggctttgtggatctgctataggtttttctccccctcaggatagttttagaagtatttaaggcactgctgtccatgaaaaggacccaggttgtgaaggaaagataaactaaggagaaggagggactcacagagggatttgatgtgaaagggaccaagaggctcatttcagtgaaagctgcggcagacagatactctaattagccagcaactcagttaggactggctaggttccttttgcctcttacccacaccctaaaaactgagtcatcccaaagttcatttattttgcttctgggcacagacaccccctaatctgcttcctcagaaatgttagatacattgccatttaatttatacctctcaatgttcaaataaacgtccagaaatgccaaatcggaagagcagagatagtcctgttaagaacctcagagctaatgttttgataagatacatgtggcagaaagcaatatgaaactgacagtctgttatgagaacatgaaaaaagaacatttcccagagaagggaattaatttctgggaaatctttatgtgaatagtgtatatgcatgaggagtagacttacagcaggatccttgaaactcatgagaaaaacaaaaggtgttttagaaagaataagcaaaagatacctaccttttccctgcacaaacgacaatcagttcgattttaacttaaatttgagaatggctctcgtagtatcagagtttcactgtttcattagcaattacctgataaaataagcactataatgcataatccgagattatgccaacttttggtctccccttaagacctagggagaggtctggtctaatctcggattctacaatacattctattatagaaactgttttattagaaatgaaactactttcctttaacaaaggcatttttcttctaagttaacaggtgtttaaggcattcagaatgaattcagttctgtatggtttgagcactagagacagaaaatcgaaaaattgtggtgtcacagtgagtttcctgtcctttttccttagtccagcaacaccattccggtcttgcaacgcctgtagcctttaaaaagctcgctaaacctacctggcagcagacctgcgttcctccgtcgccgggcttctcagtagcctccctcgcgctcaccgccagtccgggctgctggcacaccggacaggagctcttccattctctccgtctttcctccgtgctctgcggctgacagctttacactttgcaagactgcaacaggacttgcgctcccagacctacgggtcgggaggaggcggagtccccgaccgcctcctagccttgactggcagctgcgatgcccgggactgttgcagcgggagcgtggggcacagctcgccagcagcggtagcagcgcgtttatttatacaggaagctcaggcgccgcacttcctacttcccatgtgggtcgtacttcagctgcaggtgttggccttaaccctatccgaacccgggcgcgctgcaccgactctactgcttgtcaggacctgtctcttgttctcctgggaccgctgttgcaggaattcagagcagggggtgcaggcagctgcccctagcgcacttcttctgcccagacagggacagctcacctcttggccttaagcgcctgctacctctctgtctgtacatatcctcacaggccacctttctttattttctccctccttcccagctctttaaatctctttcttctacttctaacagcccagacctgccttcccacgtggcagacaactgttttatagaaacacttcccatgcacatctcatcaaaaaacagcttgtacctcacttgtccttttgcatctaatgatgaaattagaatacctgtgaatcaaatcgggaataatcttagtttacctcataaaatacagacacttcttgatgaaacaatgatttcacttgaagtgctttgtaacttaactggttgtaccctcaattaaacaaaaatgtaacaaaataatccagaagctgtgaggtattatgaagtgcttccttgctccaaacccttggacacttcatttgtgtgacattcataatgaatcgcatacctactcattccccatatcccccatagatcacaatcacctaagtctgctgaacattgccatttaggaatgtcgctctgacacaagaatctgtgttcactctgcaatccctctctacttttgcaaccactgtcaggaatgtgcttcctaaaaggaagggactcacaggccctttgtggaaaggatctgtgcacgccaacaggcaccattccaaacgacacaagcaaacattgcttctcagccctccaagttgaagaaaacctctaggtcaaagcaaagtgctgaataacacagtgtatctacatgtgccatgctagggcaggtaggaggaccagctcaccagtcagggaggaagagaaaaaggacaggggcaataagatgataaaagaacccacggtaggatatttgagcttgaaaagtcttcctagctattttagcaaataacctgattttaaaaataaggaaactgggctgggtgcggtggctcacatctgtaatcccaacactttgagaggccaaggcgggcagatcatctggggtcaggagttcaagaccagcctggccaacatggtgaaaccccgtctctactaaaaatacaaaaaattagctgggcgtggtggtgggtgcctataatctcagctactcgagaggctgaggcaggtgaatcgcttgaacctgggaggcagaggctgcagtgagccgagattgcgccattgcactccagcctgggtaacaagagcgaaactctgtctcaaaaaaaaaaaaaaaataaggaaactgatgtccaggaagatttaagagattggcccaaaccagacacaggccaagctagaatgagacctaaatctgagttacatgaggaaggtgaatgtaaatgaaaaccatcccaaaggaagtccaaccttcagatttagcaatggcttaggttctgagataatctatttcaaggaattttcttggtatagtgaccattttggtggacaggaactaggaaagataaaaagcaacctctaagaggttagtttattcattggtgttgatgcaaatctcctgagccttaaaccaaagttcaacacagagtccacttttcaaattaccattcataaattataatctcttgttaacaggataagggaagaagctgctgccaatatgaatgagaacataagcacgaatagtgctgcctattatcccaaatattttgcacaactgagtaacatcaccactgattattttcaaccatgcaactatgcaaattttttttaaattgcagtcaaaatttaataagac

SEQ ID NO: 585718 - DNA, 4001 bp, Homo sapiens
ccagctatttggagagagttttcctgataattataattctaccaagttctgaacaaccagcgaagaaaaaaaatatttaaatgtatttccagtctgcccacatgatacactggctcatttgagacataaattctaaatgaaagattgggctgaacaacatcctccactttaagatatacaaggcaccaaaacaaacacatccaaaatctatttttagagtggtgttcactcttccggttttctctttaaaacgagatttagttgacctattttcatgtgtttttagggcacccagacactctatacaaacaatatttgctaatcataaaacagcaaagccaaaatcacaaatcctgttatctgtgtgggacattttctccacgtgtccttacgtgccatgtctttgaaaagtctaaatatagattcactgactaaaatgtcctaagtcttccaaattctataattatatactggattgaatgccaatattatacgttcacatcccatttgaaaagtacacacacgaggtgggggggatgtgcccactacctgaaatgccaatcatacaaagaacaaagcgtaccctatcatctttgggctttcttctctcctcagttctacactgtttcgatattacaaaaatattaaacaaaatgttcaaaacttgagaaataagtgctcactaaaatggcacttagagaaaataaattaaaacatataccaatatgattaacgagaaaagattctagttgccaggatgtgtgtgtaaacttacagtcctgtaggttttacctgtggagaggacggttccgtctccactcttaaaacaattttacattctttagaagccttagcaaaataaatagcgacaacaatggaagacccacactccttcagacgggatggagggtaggaagagaactccccacccaacaatcagaacaaagcaacagcctcagcttttaagatgcagagggtttggaggctcaagggatattctgagatctcttaattgttccgatgcttcaacagccgtcaaaaacaactaagaatatgcagcgctgggcttcactaggacaaggtgcagggattgctctcttcgttttaggcaagaccgagacactgagcaggagaaaaaaaaggaggaagagcgagagaagagaaagcagcagccagagacactccgggaaaaggcaaaaatgcagactgtacgccctggcttcgatctgacccaaggcccaaactgtctgaccccacacgggaaaacatggagcaggctaccgccgaaaaaccatcgccgcccctacacctcgaggccagaaggtccccgggtaaaggcctaaaaccacggcccagaggggaggagagggacccgcctgccacccgaggcagcgaagcgggctcaggcggaagaggctgcgcagtaatggccgctgctccgcccctcgcacccggaccgagaccagctccggccgtcacccagggcaggggctgcggcgccctcgggcagcgcaggggctgtcacggtcgtcttgcctgccccagcagccaaggcgggggtggcggaaagggctgaactgtcccatcccgcctctgcgcggacagccggggccgcgccagcccaagggcgtccatctacgtaccggcccctgaccccgccgccgcccctctcaggccccgagcgcaaggccgacccggagtacgttgcggctggaggtgacaccgcgagctatgcctcctctccccgagtgaggatcctagagtggccggcgttcaccctgctcccccgagagggcctcgctccgactcccacctctccggccacagctgcggccacctcgcagtcttttctctctggcctcggagcccgcagctgccgggaacgcgcgcggccgtcacgtgaccacccggcgcgtcgcggaggaggggccgcgacgcgccgcgcacccgcacccgcaccggcgagctaactccggcgcctcatcgttctgcccctgtctcgcgccgctgtctgccggtactctcttgcctgtggggagcggcgacttcgctgcttgcattcttctggcttctttagagtgtgcttgctttgtattagggcccagaggctctgaaagagtgcagttccaacagaaagagatttggggtggaggaagtaaaacgtgtgtaggaccagcaggtggtgctgctcaaaaatccagctttgctatcctgaggaagctctggggcgcctagctgagtttcggcttaaagatcccttagcaaaagtactgcttgttccctttcaagaaaaaaaatggggaggggggggacggaggggagagagtactgtaggactttccaatttgttctcctttttaatggttgagcaatttaatcggggaaaaaatgagtattagttttcttttgaaaccccaccctttttttaaaaaaaacagaatagtgcctgagaaactgaagaaattaatctgcatgataatctaaaattaaagaggttattttgatcgcaagcctgtggttttaaacatcagaactctagcagtaattcaccattttagcatgtacatttcctttttcagaactgattaaattttcctaatttgtaggaaaatgaagagggtggaagagcagaccttttatctttagaagagtatgtatttcaacattctatgacagcgtcttctcatttgcattagtgttgcattttgggatttcattaactgtttgattcaggattggaagttttcagtgtccttataggtatagaaatgtatatgttttctgttattcctctgaaatcagtttatttcagggttctcattcatatatatcaatatgtaacccaatctcttgaagggtgcatctagttcagtgatgcttgcgcgtgtatgcaatactgttccatacatgtagaaatattgaagtgtatatcctttaactttaagcttagttttctatctttatcttcttattagccactcagttttgtccctctatcctacacagcccatgaacagagaatagctaaaatttgatatgtactcgaagattccagcttgaagaggtaatgctaatattaactaacaatgtgccaggtgttgctctaagtgctttattcatatatacccacttaattctcataataaactatgaggtaggcactattattattcccattttacagagagagagacacacacagctgagatttgaatccaggcacagactgtaagatgtcagctagttcaaccccttctcactcatacccaaggtctttgtatttcagtaaatggttgcatctttccttgttcaaacccacctttaactcctctcttttatgtcttatatgcatttggcatataacctgttggctcttccttcaaagtatatccaactacttaccacctccgctacaatctgcatcatctcttgtttggattatagtgttacggtagaccaggaactagtcttttgactctatccttaatacagaatcctaaataaatctacttaaaaagaagtgagatcgtaccactcctttgctcaaagtctcctgtggcttcccaacacaagtaaaaaccaaagtcctaacgatggctttaaaatcctcccctcattacctctttgaccccacagactgtttacccagctttgtattcccagaaagctctccacaagctgccaacctcatagtctttgcagttgtggtttcctctgcttagaacactcttccccatcatgctccctccatatgtgctcagatgtccaactcttcagtcagtccctctacttgtcagcatattttaagtcatgatgtttccattcccaatatttcatatttcctcctttactttttaatacttatcacagtgtaatggataatttattttacttactaatcttcatcatatttctcatcacattaggacgcaagacacaggaggccaggaatgtgtgttctgttttgtatctcaactgccaggaatagtgcctgacacact

SEQ ID NO: 585719 - DNA, 4001 bp, Homo sapiens
tctgacaagttaggttggtggagactgaaacaaaacactttgtaagttgacatctccttttaaaagaagttatttcttttttcttctcttgtctaaaagaccagctatttggagagagttttcctgataattataattctaccaagttctgaacaaccagcgaagaaaaaaaatatttaaatgtatttccagtctgcccacatgatacactggctcatttgagacataaattctaaatgaaagattgggctgaacaacatcctccactttaagatatacaaggcaccaaaacaaacacatccaaaatctatttttagagtggtgttcactcttccggttttctctttaaaacgagatttagttgacctattttcatgtgtttttagggcacccagacactctatacaaacaatatttgctaatcataaaacagcaaagccaaaatcacaaatcctgttatctgtgtgggacattttctccacgtgtccttacgtgccatgtctttgaaaagtctaaatatagattcactgactaaaatgtcctaagtcttccaaattctataattatatactggattgaatgccaatattatacgttcacatcccatttgaaaagtacacacacgaggtgggggggatgtgcccactacctgaaatgccaatcatacaaagaacaaagcgtaccctatcatctttgggctttcttctctcctcagttctacactgtttcgatattacaaaaatattaaacaaaatgttcaaaacttgagaaataagtgctcactaaaatggcacttagagaaaataaattaaaacatataccaatatgattaacgagaaaagattctagttgccaggatgtgtgtgtaaacttacagtcctgtaggttttacctgtggagaggacggttccgtctccactcttaaaacaattttacattctttagaagccttagcaaaataaatagcgacaacaatggaagacccacactccttcagacgggatggagggtaggaagagaactccccacccaacaatcagaacaaagcaacagcctcagcttttaagatgcagagggtttggaggctcaagggatattctgagatctcttaattgttccgatgcttcaacagccgtcaaaaacaactaagaatatgcagcgctgggcttcactaggacaaggtgcagggattgctctcttcgttttaggcaagaccgagacactgagcaggagaaaaaaaaggaggaagagcgagagaagagaaagcagcagccagagacactccgggaaaaggcaaaaatgcagactgtacgccctggcttcgatctgacccaaggcccaaactgtctgaccccacacgggaaaacatggagcaggctaccgccgaaaaaccatcgccgcccctacacctcgaggccagaaggtccccgggtaaaggcctaaaaccacggcccagaggggaggagagggacccgcctgccacccgaggcagcgaagcgggctcaggcggaagaggctgcgcagtaatggccgctgctccgcccctcgcacccggaccgagaccagctccggccgtcacccagggcaggggctgcggcgccctcgggcagcgcaggggctgtcacggtcgtcttgcctgccccagcagccaaggcgggggtggcggaaagggctgaactgtcccatcccgcctctgcgcggacagccggggccgcgccagcccaagggcgtccatctacgtaccggcccctgaccccgccgccgcccctctcaggccccgagcgcaaggccgacccggagtacgttgcggctggaggtgacaccgcgagctatgcctcctctccccgagtgaggatcctagagtggccggcgttcaccctgctcccccgagagggcctcgctccgactcccacctctccggccacagctgcggccacctcgcagtcttttctctctggcctcggagcccgcagctgccgggaacgcgcgcggccgtcacgtgaccacccggcgcgtcgcggaggaggggccgcgacgcgccgcgcacccgcacccgcaccggcgagctaactccggcgcctcatcgttctgcccctgtctcgcgccgctgtctgccggtactctcttgcctgtggggagcggcgacttcgctgcttgcattcttctggcttctttagagtgtgcttgctttgtattagggcccagaggctctgaaagagtgcagttccaacagaaagagatttggggtggaggaagtaaaacgtgtgtaggaccagcaggtggtgctgctcaaaaatccagctttgctatcctgaggaagctctggggcgcctagctgagtttcggcttaaagatcccttagcaaaagtactgcttgttccctttcaagaaaaaaaatggggaggggggggacggaggggagagagtactgtaggactttccaatttgttctcctttttaatggttgagcaatttaatcggggaaaaaatgagtattagttttcttttgaaaccccaccctttttttaaaaaaaacagaatagtgcctgagaaactgaagaaattaatctgcatgataatctaaaattaaagaggttattttgatcgcaagcctgtggttttaaacatcagaactctagcagtaattcaccattttagcatgtacatttcctttttcagaactgattaaattttcctaatttgtaggaaaatgaagagggtggaagagcagaccttttatctttagaagagtatgtatttcaacattctatgacagcgtcttctcatttgcattagtgttgcattttgggatttcattaactgtttgattcaggattggaagttttcagtgtccttataggtatagaaatgtatatgttttctgttattcctctgaaatcagtttatttcagggttctcattcatatatatcaatatgtaacccaatctcttgaagggtgcatctagttcagtgatgcttgcgcgtgtatgcaatactgttccatacatgtagaaatattgaagtgtatatcctttaactttaagcttagttttctatctttatcttcttattagccactcagttttgtccctctatcctacacagcccatgaacagagaatagctaaaatttgatatgtactcgaagattccagcttgaagaggtaatgctaatattaactaacaatgtgccaggtgttgctctaagtgctttattcatatatacccacttaattctcataataaactatgaggtaggcactattattattcccattttacagagagagagacacacacagctgagatttgaatccaggcacagactgtaagatgtcagctagttcaaccccttctcactcatacccaaggtctttgtatttcagtaaatggttgcatctttccttgttcaaacccacctttaactcctctcttttatgtcttatatgcatttggcatataacctgttggctcttccttcaaagtatatccaactacttaccacctccgctacaatctgcatcatctcttgtttggattatagtgttacggtagaccaggaactagtcttttgactctatccttaatacagaatcctaaataaatctacttaaaaagaagtgagatcgtaccactcctttgctcaaagtctcctgtggcttcccaacacaagtaaaaaccaaagtcctaacgatggctttaaaatcctcccctcattacctctttgaccccacagactgtttacccagctttgtattcccagaaagctctccacaagctgccaacctcatagtctttgcagttgtggtttcctctgcttagaacactcttccccatcatgctccctccatatgtgctcagatgtccaactcttcagtcagtccctctacttgtcagcatattttaagtcatgatgtttccattcccaatatttcatatttcctcctttactttttaatacttatcacagtgtaatggataatttattttacttactaatc

SEQ ID NO: 585720 - DNA, 4001 bp, Homo sapiens
ccagcgaagaaaaaaaatatttaaatgtatttccagtctgcccacatgatacactggctcatttgagacataaattctaaatgaaagattgggctgaacaacatcctccactttaagatatacaaggcaccaaaacaaacacatccaaaatctatttttagagtggtgttcactcttccggttttctctttaaaacgagatttagttgacctattttcatgtgtttttagggcacccagacactctatacaaacaatatttgctaatcataaaacagcaaagccaaaatcacaaatcctgttatctgtgtgggacattttctccacgtgtccttacgtgccatgtctttgaaaagtctaaatatagattcactgactaaaatgtcctaagtcttccaaattctataattatatactggattgaatgccaatattatacgttcacatcccatttgaaaagtacacacacgaggtgggggggatgtgcccactacctgaaatgccaatcatacaaagaacaaagcgtaccctatcatctttgggctttcttctctcctcagttctacactgtttcgatattacaaaaatattaaacaaaatgttcaaaacttgagaaataagtgctcactaaaatggcacttagagaaaataaattaaaacatataccaatatgattaacgagaaaagattctagttgccaggatgtgtgtgtaaacttacagtcctgtaggttttacctgtggagaggacggttccgtctccactcttaaaacaattttacattctttagaagccttagcaaaataaatagcgacaacaatggaagacccacactccttcagacgggatggagggtaggaagagaactccccacccaacaatcagaacaaagcaacagcctcagcttttaagatgcagagggtttggaggctcaagggatattctgagatctcttaattgttccgatgcttcaacagccgtcaaaaacaactaagaatatgcagcgctgggcttcactaggacaaggtgcagggattgctctcttcgttttaggcaagaccgagacactgagcaggagaaaaaaaaggaggaagagcgagagaagagaaagcagcagccagagacactccgggaaaaggcaaaaatgcagactgtacgccctggcttcgatctgacccaaggcccaaactgtctgaccccacacgggaaaacatggagcaggctaccgccgaaaaaccatcgccgcccctacacctcgaggccagaaggtccccgggtaaaggcctaaaaccacggcccagaggggaggagagggacccgcctgccacccgaggcagcgaagcgggctcaggcggaagaggctgcgcagtaatggccgctgctccgcccctcgcacccggaccgagaccagctccggccgtcacccagggcaggggctgcggcgccctcgggcagcgcaggggctgtcacggtcgtcttgcctgccccagcagccaaggcgggggtggcggaaagggctgaactgtcccatcccgcctctgcgcggacagccggggccgcgccagcccaagggcgtccatctacgtaccggcccctgaccccgccgccgcccctctcaggccccgagcgcaaggccgacccggagtacgttgcggctggaggtgacaccgcgagctatgcctcctctccccgagtgaggatcctagagtggccggcgttcaccctgctcccccgagagggcctcgctccgactcccacctctccggccacagctgcggccacctcgcagtcttttctctctggcctcggagcccgcagctgccgggaacgcgcgcggccgtcacgtgaccacccggcgcgtcgcggaggaggggccgcgacgcgccgcgcacccgcacccgcaccggcgagctaactccggcgcctcatcgttctgcccctgtctcgcgccgctgtctgccggtactctcttgcctgtggggagcggcgacttcgctgcttgcattcttctggcttctttagagtgtgcttgctttgtattagggcccagaggctctgaaagagtgcagttccaacagaaagagatttggggtggaggaagtaaaacgtgtgtaggaccagcaggtggtgctgctcaaaaatccagctttgctatcctgaggaagctctggggcgcctagctgagtttcggcttaaagatcccttagcaaaagtactgcttgttccctttcaagaaaaaaaatggggaggggggggacggaggggagagagtactgtaggactttccaatttgttctcctttttaatggttgagcaatttaatcggggaaaaaatgagtattagttttcttttgaaaccccaccctttttttaaaaaaaacagaatagtgcctgagaaactgaagaaattaatctgcatgataatctaaaattaaagaggttattttgatcgcaagcctgtggttttaaacatcagaactctagcagtaattcaccattttagcatgtacatttcctttttcagaactgattaaattttcctaatttgtaggaaaatgaagagggtggaagagcagaccttttatctttagaagagtatgtatttcaacattctatgacagcgtcttctcatttgcattagtgttgcattttgggatttcattaactgtttgattcaggattggaagttttcagtgtccttataggtatagaaatgtatatgttttctgttattcctctgaaatcagtttatttcagggttctcattcatatatatcaatatgtaacccaatctcttgaagggtgcatctagttcagtgatgcttgcgcgtgtatgcaatactgttccatacatgtagaaatattgaagtgtatatcctttaactttaagcttagttttctatctttatcttcttattagccactcagttttgtccctctatcctacacagcccatgaacagagaatagctaaaatttgatatgtactcgaagattccagcttgaagaggtaatgctaatattaactaacaatgtgccaggtgttgctctaagtgctttattcatatatacccacttaattctcataataaactatgaggtaggcactattattattcccattttacagagagagagacacacacagctgagatttgaatccaggcacagactgtaagatgtcagctagttcaaccccttctcactcatacccaaggtctttgtatttcagtaaatggttgcatctttccttgttcaaacccacctttaactcctctcttttatgtcttatatgcatttggcatataacctgttggctcttccttcaaagtatatccaactacttaccacctccgctacaatctgcatcatctcttgtttggattatagtgttacggtagaccaggaactagtcttttgactctatccttaatacagaatcctaaataaatctacttaaaaagaagtgagatcgtaccactcctttgctcaaagtctcctgtggcttcccaacacaagtaaaaaccaaagtcctaacgatggctttaaaatcctcccctcattacctctttgaccccacagactgtttacccagctttgtattcccagaaagctctccacaagctgccaacctcatagtctttgcagttgtggtttcctctgcttagaacactcttccccatcatgctccctccatatgtgctcagatgtccaactcttcagtcagtccctctacttgtcagcatattttaagtcatgatgtttccattcccaatatttcatatttcctcctttactttttaatacttatcacagtgtaatggataatttattttacttactaatcttcatcatatttctcatcacattaggacgcaagacacaggaggccaggaatgtgtgttctgttttgtatctcaactgccaggaatagtgcctgacacacttaaagaggttctctgtaaatatgtgttacatgaatgagtaaatgaatgaatgaatg

SEQ ID NO: 585721 - DNA, 4001 bp, Homo sapiens
tgaacttgaatactggttttgctaacaaagatctgaataaagctgttctgttggtccctcaggaaaaaaaaaaaaacacacacacacacacaaacacacaaaataatttatttttagtacaaaacataaaactacattctctgtctatataatgtgcctaggcttcaatatcctatttgctgttcatgcttaagtgagaaaatacttttctctcccgtttatcttctcaaaacagatctacttcgttttaatcaatgtacgattttattaccgtcatgaaagagtatttagcagagcatctgtgaatcttccacaggtaaaattcagtttaaaaacaagcccaattgtgaaataacctgcaaactgttaattgcaacttcaatcctttagtttccaatacaatcttctaatgaagtggcattacttgaagttgctggcaaatatgaacagactgagaaacctagtaatcagcaggctaacaggtgttgaaatcccaaaagagggaagaggaatattaaataatcactctttgcctgacacctcaagtagctgtaatatgcagaattccaatcaacttaactgcaattcaaaatgatcagtggtactgttttcattaattactctctagcaaaaatataatttcttgcattccatatagttctttaaatgacctattccaacttatacattattttactaagttggatatacaattttatatgttagattattttccagttatcaatatgacatctcatattgtttaaatatgatttaaaacaaatcttattaacatatatacaatttccttctgaattgatcaactgtatttctgaaaatgtatctgttttctttcatattactacatgtaagatgatgtctaagtaccaaaaaaaaaagtcttcacagtcacaatttaaatctgtgcttcgcgtctgcaacaaactatcacgaaatgattgcaagggttggggccactgagaaaggtacctataacctatccagtgccccagtggcaaccgcatcgtggtcctcatcatcccactcataaacaccgatgcaaacaccgcccagctacctgcctccagaggtgctttggattgcctccctacacataaaaacaaaaggcactttccagttccttacagcatgaacacaataccttctagaaacaaaagcaatgacctcggtgccaagtatctccttgacaaagtatcggtactgctctacattctggtcttgctagtcggggaaagccgggctacccttaccatccagttataggtgcaactgcaccttccaaagaaaaaaaggtctttcgattcaatatccaaacgaacttcagaagcctcctcaaaatgcttcagccacaggcataaaaatgggctcacttttcagagattcgtaaaaatctttcgcttgtccctcttactaccctcccaacccctcctcaaagagaatgccatgaaacatgaaagtccaaaggtaaatactttcatacctttttttcccccaaaagcctcgatggcacgccaagaaggaaaataacaacaacaacagaggggcagctccctgagcaggtgcagcccgcgcgggcgctccgcagccgccctccgccgcacagcccctcaagttggtgccaggacggcggcccccgtggtgcccggagggagactccgcgcgcgggccccggcgccgctcggcccgaagtttgccgccccctctcctcggcgcgcttgggcggcccggcgccgtccaggactgcggggctggctgctgccccagcgttggggaggcccggcgtcccgccgacccctccccggccgcgggcgcgatcgccttacctggccggcggcggcccagggcccgggagccgctccggctgcggcggcgcctgggaggggagggaggttcccgtggaggaggagctcgcgcgaggagctagcgggctggcgggcgggcggctttgtctctacggcgctgagccgccgaccctgcgtcaccatggcaaccgccggggcccccccggcccttcccctcagcagtccgggtattcggagaggacaaggacccccgatgggccgccaccaccacaaacacgcccctctctcagtctccctcacaaaccgcctgtttctccccagcgagaggggaaggctaaagcggagcgagcccagggccaagtggtattcgcatcctagtaggcactcctttgcttccccacactggacattccaactcccgtcgcaccaccatcccccccacagacaccctccaccactaccaccaccacacctttctcctgtggagctgtaccctcaaaatggaaattcacttaagggaggagaaagagcaatgcaaagtgataaagtgttgagcaactggtactcggttctcctgttgcaactgccgcagcatgcacggagctgccaagggacgccgtgccgcctcctccctctccccctcctcctcctctctcttttagcaagctttgcctctgctggatgtggtctcactccacccaacccgtgtatctgtcttgttgagggctcccgtaggagagaggggaaagggggctttatctctgatgtaaacactggatacacttgtaacctcagaagctgaaacacaactttcaggctgcagtatggatctcagctgctgccacactgcgcagctactggctgtgaccgctaagcatctaccatgagccctgagtgactctgtgccaaggactggtcacgtactgcaggccatggcactcaggagcagagaaaagaaagctaactttttcctctcctgaggaaattcttagagagggagagaaaagtaccagcagacccttggtcatgcttcctctaaaggacgaactagagggcagcctccatggggggagtgagtcatccctccatactgttttcttgaaagatccgttgctgaatccaaaagctacagtgtctttcttcaaaccctggggaacatgacatttattttttggcatttgtgaatcaccaaaggaatgtcaatgatttataataaaatccacggtagctgatgttttctgggtttactacttgagaagccacaaagcagaacaatgttattgccatttgaaggtacacctatattaactaatgaaaagataagatctatttcatggtggaaaaggaaaacagtttgttcctcggagagactggccactttcttgtaatgggaatattctgaatgaagtcaataatattccagatgaagtcaaaagacaaggtctttttggcaggccattaagcatttggcaatacctgccagaattcaaaatgcacatacatttctcccagctatctcaattctagagatctgtcatacagaaacacacaaatgtgtaatgatagatataaaaggatatgcattgcagaagttttgtaatagtaaatgtttgaaacaacttatatgcccatcaatagtgatatggttaaataatgtggcacttcataccatgtaatactatgcatccattaataagaataaaatatataaaattcatagatattgatttcttattaaatggaaaaggggggctcagaaccgtatgtgtgggtgatcccattctgtacaaaaaaactggatatataggaacagaacaaaaacatagggataaaggtctataagaatgcctacctaattgctagaagtggtaacctgttaactacaaaaaaaattgaagggacagttacctcttacgatgtacaatttagtacacatatttggtttgtttggctttttcaaatgagcatttattagtaatttatcaatgaagaagcaaaaacaaaaagctttaataaatgtttgttgacctgcatgcacattactgcctgatcaaaaactgaatacagaacagggagggaccattgacttggccatccctgccctcagctgaaggcttggaaaagtccacgttgtgtccccacttagagcattgcttagtgacctggtcctgcgttatt

SEQ ID NO: 585722 - DNA, 4001 bp, Homo sapiens
tgcactgacacaagcttcatttcatgcttcggagctcttattaataagccactacaaccaagcagtgcatgcaatacatgattgttgatttctgtataccgactttattttttggcagaaaatgatgcagctctgaagaagccaaactatattgaatgttgtgcccgtgtgagctagcagcaaaggcaaagcaccggtccttactgtgctaaattcaccatggatatctccgttcttcagcactcagattaagggccacaacataaatgtttaggctagaactcacagtgtgggtttcatctggcagaaagcacggaccaagtccttgaacttgaatactggttttgctaacaaagatctgaataaagctgttctgttggtccctcaggaaaaaaaaaaaaacacacacacacacacaaacacacaaaataatttatttttagtacaaaacataaaactacattctctgtctatataatgtgcctaggcttcaatatcctatttgctgttcatgcttaagtgagaaaatacttttctctcccgtttatcttctcaaaacagatctacttcgttttaatcaatgtacgattttattaccgtcatgaaagagtatttagcagagcatctgtgaatcttccacaggtaaaattcagtttaaaaacaagcccaattgtgaaataacctgcaaactgttaattgcaacttcaatcctttagtttccaatacaatcttctaatgaagtggcattacttgaagttgctggcaaatatgaacagactgagaaacctagtaatcagcaggctaacaggtgttgaaatcccaaaagagggaagaggaatattaaataatcactctttgcctgacacctcaagtagctgtaatatgcagaattccaatcaacttaactgcaattcaaaatgatcagtggtactgttttcattaattactctctagcaaaaatataatttcttgcattccatatagttctttaaatgacctattccaacttatacattattttactaagttggatatacaattttatatgttagattattttccagttatcaatatgacatctcatattgtttaaatatgatttaaaacaaatcttattaacatatatacaatttccttctgaattgatcaactgtatttctgaaaatgtatctgttttctttcatattactacatgtaagatgatgtctaagtaccaaaaaaaaaagtcttcacagtcacaatttaaatctgtgcttcgcgtctgcaacaaactatcacgaaatgattgcaagggttggggccactgagaaaggtacctataacctatccagtgccccagtggcaaccgcatcgtggtcctcatcatcccactcataaacaccgatgcaaacaccgcccagctacctgcctccagaggtgctttggattgcctccctacacataaaaacaaaaggcactttccagttccttacagcatgaacacaataccttctagaaacaaaagcaatgacctcggtgccaagtatctccttgacaaagtatcggtactgctctacattctggtcttgctagtcggggaaagccgggctacccttaccatccagttataggtgcaactgcaccttccaaagaaaaaaaggtctttcgattcaatatccaaacgaacttcagaagcctcctcaaaatgcttcagccacaggcataaaaatgggctcacttttcagagattcgtaaaaatctttcgcttgtccctcttactaccctcccaacccctcctcaaagagaatgccatgaaacatgaaagtccaaaggtaaatactttcatacctttttttcccccaaaagcctcgatggcacgccaagaaggaaaataacaacaacaacagaggggcagctccctgagcaggtgcagcccgcgcgggcgctccgcagccgccctccgccgcacagcccctcaagttggtgccaggacggcggcccccgtggtgcccggagggagactccgcgcgcgggccccggcgccgctcggcccgaagtttgccgccccctctcctcggcgcgcttgggcggcccggcgccgtccaggactgcggggctggctgctgccccagcgttggggaggcccggcgtcccgccgacccctccccggccgcgggcgcgatcgccttacctggccggcggcggcccagggcccgggagccgctccggctgcggcggcgcctgggaggggagggaggttcccgtggaggaggagctcgcgcgaggagctagcgggctggcgggcgggcggctttgtctctacggcgctgagccgccgaccctgcgtcaccatggcaaccgccggggcccccccggcccttcccctcagcagtccgggtattcggagaggacaaggacccccgatgggccgccaccaccacaaacacgcccctctctcagtctccctcacaaaccgcctgtttctccccagcgagaggggaaggctaaagcggagcgagcccagggccaagtggtattcgcatcctagtaggcactcctttgcttccccacactggacattccaactcccgtcgcaccaccatcccccccacagacaccctccaccactaccaccaccacacctttctcctgtggagctgtaccctcaaaatggaaattcacttaagggaggagaaagagcaatgcaaagtgataaagtgttgagcaactggtactcggttctcctgttgcaactgccgcagcatgcacggagctgccaagggacgccgtgccgcctcctccctctccccctcctcctcctctctcttttagcaagctttgcctctgctggatgtggtctcactccacccaacccgtgtatctgtcttgttgagggctcccgtaggagagaggggaaagggggctttatctctgatgtaaacactggatacacttgtaacctcagaagctgaaacacaactttcaggctgcagtatggatctcagctgctgccacactgcgcagctactggctgtgaccgctaagcatctaccatgagccctgagtgactctgtgccaaggactggtcacgtactgcaggccatggcactcaggagcagagaaaagaaagctaactttttcctctcctgaggaaattcttagagagggagagaaaagtaccagcagacccttggtcatgcttcctctaaaggacgaactagagggcagcctccatggggggagtgagtcatccctccatactgttttcttgaaagatccgttgctgaatccaaaagctacagtgtctttcttcaaaccctggggaacatgacatttattttttggcatttgtgaatcaccaaaggaatgtcaatgatttataataaaatccacggtagctgatgttttctgggtttactacttgagaagccacaaagcagaacaatgttattgccatttgaaggtacacctatattaactaatgaaaagataagatctatttcatggtggaaaaggaaaacagtttgttcctcggagagactggccactttcttgtaatgggaatattctgaatgaagtcaataatattccagatgaagtcaaaagacaaggtctttttggcaggccattaagcatttggcaatacctgccagaattcaaaatgcacatacatttctcccagctatctcaattctagagatctgtcatacagaaacacacaaatgtgtaatgatagatataaaaggatatgcattgcagaagttttgtaatagtaaatgtttgaaacaacttatatgcccatcaatagtgatatggttaaataatgtggcacttcataccatgtaatactatgcatccattaataagaataaaatatataaaattcatagatattgatttcttattaaatggaaaaggggggctcagaaccgtatgtgtgggtgatcccattctgtacaaaaaaactggatatataggaacagaacaaaaacatagggataaaggtctataagaatgcctac

SEQ ID NO: 585723 - DNA, 4001 bp, Homo sapiens
tacttgaagttgctggcaaatatgaacagactgagaaacctagtaatcagcaggctaacaggtgttgaaatcccaaaagagggaagaggaatattaaataatcactctttgcctgacacctcaagtagctgtaatatgcagaattccaatcaacttaactgcaattcaaaatgatcagtggtactgttttcattaattactctctagcaaaaatataatttcttgcattccatatagttctttaaatgacctattccaacttatacattattttactaagttggatatacaattttatatgttagattattttccagttatcaatatgacatctcatattgtttaaatatgatttaaaacaaatcttattaacatatatacaatttccttctgaattgatcaactgtatttctgaaaatgtatctgttttctttcatattactacatgtaagatgatgtctaagtaccaaaaaaaaaagtcttcacagtcacaatttaaatctgtgcttcgcgtctgcaacaaactatcacgaaatgattgcaagggttggggccactgagaaaggtacctataacctatccagtgccccagtggcaaccgcatcgtggtcctcatcatcccactcataaacaccgatgcaaacaccgcccagctacctgcctccagaggtgctttggattgcctccctacacataaaaacaaaaggcactttccagttccttacagcatgaacacaataccttctagaaacaaaagcaatgacctcggtgccaagtatctccttgacaaagtatcggtactgctctacattctggtcttgctagtcggggaaagccgggctacccttaccatccagttataggtgcaactgcaccttccaaagaaaaaaaggtctttcgattcaatatccaaacgaacttcagaagcctcctcaaaatgcttcagccacaggcataaaaatgggctcacttttcagagattcgtaaaaatctttcgcttgtccctcttactaccctcccaacccctcctcaaagagaatgccatgaaacatgaaagtccaaaggtaaatactttcatacctttttttcccccaaaagcctcgatggcacgccaagaaggaaaataacaacaacaacagaggggcagctccctgagcaggtgcagcccgcgcgggcgctccgcagccgccctccgccgcacagcccctcaagttggtgccaggacggcggcccccgtggtgcccggagggagactccgcgcgcgggccccggcgccgctcggcccgaagtttgccgccccctctcctcggcgcgcttgggcggcccggcgccgtccaggactgcggggctggctgctgccccagcgttggggaggcccggcgtcccgccgacccctccccggccgcgggcgcgatcgccttacctggccggcggcggcccagggcccgggagccgctccggctgcggcggcgcctgggaggggagggaggttcccgtggaggaggagctcgcgcgaggagctagcgggctggcgggcgggcggctttgtctctacggcgctgagccgccgaccctgcgtcaccatggcaaccgccggggcccccccggcccttcccctcagcagtccgggtattcggagaggacaaggacccccgatgggccgccaccaccacaaacacgcccctctctcagtctccctcacaaaccgcctgtttctccccagcgagaggggaaggctaaagcggagcgagcccagggccaagtggtattcgcatcctagtaggcactcctttgcttccccacactggacattccaactcccgtcgcaccaccatcccccccacagacaccctccaccactaccaccaccacacctttctcctgtggagctgtaccctcaaaatggaaattcacttaagggaggagaaagagcaatgcaaagtgataaagtgttgagcaactggtactcggttctcctgttgcaactgccgcagcatgcacggagctgccaagggacgccgtgccgcctcctccctctccccctcctcctcctctctcttttagcaagctttgcctctgctggatgtggtctcactccacccaacccgtgtatctgtcttgttgagggctcccgtaggagagaggggaaagggggctttatctctgatgtaaacactggatacacttgtaacctcagaagctgaaacacaactttcaggctgcagtatggatctcagctgctgccacactgcgcagctactggctgtgaccgctaagcatctaccatgagccctgagtgactctgtgccaaggactggtcacgtactgcaggccatggcactcaggagcagagaaaagaaagctaactttttcctctcctgaggaaattcttagagagggagagaaaagtaccagcagacccttggtcatgcttcctctaaaggacgaactagagggcagcctccatggggggagtgagtcatccctccatactgttttcttgaaagatccgttgctgaatccaaaagctacagtgtctttcttcaaaccctggggaacatgacatttattttttggcatttgtgaatcaccaaaggaatgtcaatgatttataataaaatccacggtagctgatgttttctgggtttactacttgagaagccacaaagcagaacaatgttattgccatttgaaggtacacctatattaactaatgaaaagataagatctatttcatggtggaaaaggaaaacagtttgttcctcggagagactggccactttcttgtaatgggaatattctgaatgaagtcaataatattccagatgaagtcaaaagacaaggtctttttggcaggccattaagcatttggcaatacctgccagaattcaaaatgcacatacatttctcccagctatctcaattctagagatctgtcatacagaaacacacaaatgtgtaatgatagatataaaaggatatgcattgcagaagttttgtaatagtaaatgtttgaaacaacttatatgcccatcaatagtgatatggttaaataatgtggcacttcataccatgtaatactatgcatccattaataagaataaaatatataaaattcatagatattgatttcttattaaatggaaaaggggggctcagaaccgtatgtgtgggtgatcccattctgtacaaaaaaactggatatataggaacagaacaaaaacatagggataaaggtctataagaatgcctacctaattgctagaagtggtaacctgttaactacaaaaaaaattgaagggacagttacctcttacgatgtacaatttagtacacatatttggtttgtttggctttttcaaatgagcatttattagtaatttatcaatgaagaagcaaaaacaaaaagctttaataaatgtttgttgacctgcatgcacattactgcctgatcaaaaactgaatacagaacagggagggaccattgacttggccatccctgccctcagctgaaggcttggaaaagtccacgttgtgtccccacttagagcattgcttagtgacctggtcctgcgttattctgtgagacattcttccagacattcatttttccaaaagaggtttagctttatcttaaggtctgcttccattctgcctcttggagaaaattaaaagacttgtcaggaaaccatcttaaaatgtgccaccttacttaccaggggatatcatttgaataggttaagtggcagcttttagtctgtttagctaaactgaaactgaagatactaaagcttaaaaattaatgtgtggatacatgactagtctttcttattctcaccatttttgaaatgaggttaaaataatgaatttgctttcctaaaaagatctagagctgcacagtctaattcagtaactgctagccacatatgaattagctactgaattggtatgttcagtaagtgcaaaatacacaccagatttcaaagacttggaacaataac

SEQ ID NO: 585724 - DNA, 4001 bp, Homo sapiens
gaatcacatggtacggagccctgttcagtttgtcccagccaatgttattaaaaacactatgatgggcaagggactcaacatgaagctaccacatatgggactctaagacattgtccagacagtctaacaagacaagcagacacgaaagaaacaacttcagtgcatgtaagataatataagatactgtgaaagtatataagcagtgacttggagggtgaggcaacgcttcacagaagagttggcacctgaacacacagggttttgaaagatgaataggcctaggacaattggacacaggatcaaagggcatccaggattgtgcaaaacactggcagaaacatcacagattgaaaactgctggaagaacgcattcaccgtcagtgaaggaaagctggtctggtgcactctcaagctttccaagaaaaaaaaccaagttttcaaataaaagcagaggaggaaagtttcaccagtgcttgttctgagaaacctcttagcctctctttgctttgttttgctctttctgttttgcttccctcttaaagagtgctggcttaaaacctcagtgaaagaaaagtacttcaactttactgtggaaaaaggaaactgaaaagtaggcaaaggccaagggatacatttttttaaacattcactctttcctggaatatacaaatgaagcaaaattacaaattcatgtattatgggtctgaaatatttattccaattcttttctccaccagctccataaatatttattctatgcccactgcttgttagtttctgggataccaggccgatgaggcagtctcttcctctcctcctttgagcaagcttgtgcttgcaatcctgtataagaaataagaggagggcaacaacttgtatcttgtgccttctacacatgccaaccatagcctgaagttcacagcaaagttaaattccagttaagtaaaccagtgaggtcataatacacttaaataacaactgagacgtgagaaactaacagagatcctcagtaagtgtgtcggtcacctcttcgcgcgagcagggagatcagatcgagagcaggacctcctcgccagtgatttggaatgataaatggggaagagaagggggtgaagttacctgggcgctcaggtagactttgaggcactcctcgcacacggccttcttgcagcaaggcaggggcttgatgggcttgtcttccaggcacacccggcacatcagcaccatgaggggcacatagggatcccctacaccgcccaggccagagtagggtggagctcccaacaggctgggcatggagaacggctcgggcgccaggtagaactccagctcgatgctgccgccgtcgggggagagggaatccgttgggagggacagtcgggggctggggaaggaagagcgggtgctgggagggttcaacactggcggagccccaggtggcgacgcgggcggcgagagctgctccgaggcgggggcctcgggcaggtcgctctccacgcagtacacggagcagaagacttgtctcttggcgagggacgggcgccgctgacccagcacgtccaggaccagtccgtcggcggcccccacgcgggtcctgggctccagctcttcgccggggggcgcctcctgctgttcatcccctccctcttttcgatccccagcttcctcctcttcctcctccagctccaactgcagtggcaaggtctggggattgagaggcccggtgagtgccagtcccgcaggctgcgccggtgctcggctcttactccagcccgggggccccaggctcctcgcgggctctggggcgctggtgtccgcgcagccccagtcgcttccgcagccaccgccgctcggctccgcggaggcggcgcgcagcgggggcgcccgggcgctgtccccctgaggcctcgggggctcagggtggcccgcagtgccactggccagggtctgcgactcctggggcccgccgccgccgctcaccgtgctctgctcctcgcccatcgccgcccgcggcccgcgccgccgctgcccatccagccgccgggacccccacccggcgcccgcgggcagcgggggcagtggctcggctcgactcgcggctccgcttctgcttccgggtccttcctcctgggctgggacgccccaagtcccctccggggagcccgtgctccgaggctgcggcgcgtggggagcctggcccggcccgccgctcctcctcgtactctggcgcggcggggcaccgcctcgggggcgccgagggccgctcgctctgggctcgggcgcgcccgccccacatgcagctcggggcggcgccgcagccccagcgagccccaggcgggacagaggggtctgggaggagacggccgtcagtcccgcgccatcaccggtcccggctgccggacgcgcggcccgagggcggtggtcaaagggtcgaggggcctgtggcgccgccgcggcgcgcaccaggaggtgcagccggagcgctggccagccgcagggcccctgggggagaggccggagcgggcgacctccctctccccgcgcttcacctacagccctcctcgccgcccctcaccccacccctttggcgcacacctccccacacgtacacacgcgcgcaggcacccgcgcacacacacacgcacaccctgagtgggtgtgatctaagagctgagatgcgctttctcgcccggagttcacactcagcctcaacaaaaccctcagagcaggcaggctcccctttggtctccgcattcagtagaacttcctacaaaactacactcagctctggaattagtaaacgctggctatttaggatgtcgagttcagagaaataatgctaaggattatgaattctaaatgctgtatattacaactctgtttttctgcctagtggagtaggaagaatcttcgaaacccataaataatcgaaaaagcactttcgatctactcctccaactggaatccttagaagagttgataactaatttaaaatttctctctttttcttcgcctacagtgttctcttagaagtttttttttttaacccttttcagcattccaaaatggatagcacaaggtggaaaaatgtcctgacctaattaataaactggatcattagtggaaatcatgggcagtttcattagcataaccatatttatcctcaaaactgtttccaaaacaacaattatatgtgagccaggacttaattatgtgttgatctatctttattttacaggaagtattactcacccagacactggtgttttagttccctaaagccagtgaaaacatttttgggaagccagcccttgttttgttttttttctcctgagagggaattcaatttacacattcatgtaatagcaaggaactgtaaagtgtgtagaattttattttttaatctcgaagttgttattgggttgttctaaaatattttccaaatcagatgcaaatgatacaaaggtgactagcgatgcaaactaagaaagcagtgtaatgccaaagaacatttccatcatatatgtgtgtctgaggctcagttgcaagcaaaggtatgaattggatgtctaaatgccatgtcatctatcggtctgacccaagaatggaaaattcttattttgaagattaaatgctattcgaggattcttttcttttttatctcagctaagtgatttcctggtaactgctgttttctccaaatgatactttaagtgcttattgttttaaagacagagacaagaaacctacttatgtgtgccttttgagtgtgccatctgatgaccaagccactattctttccagagatataaaagtaatctgcattttccaggtgacaacaggctaagaccagagtaacaataatggatgccaaaaagtatattcccacagcgtctattggaataaaacccctcaaagtcctcttatagttttgggaacccctcctcacacacatttttcactcgtattctgagaacttgttcttccagtgtttaccattt

SEQ ID NO: 585725 - DNA, 4001 bp, Homo sapiens
atgaaaacatctcatataacccataaatatacatacctattatgtatccgcaaaaattaaaaataaaaagagaaaaacagaaatttgttcccaataatgttggagtatatattctcatacacacatcttacacaagtgcaggagtttttctgggaacaaacagtgtgtgaacatccctttttcccctatcctaaccagcacttggtacacaccagacttttggatcttgcacttttaagtgtgagacactatctggttttgctgatttaaattatcctattagtatggatcatgtgacctaagaatgagtatgagcttttttgtatacatttattggccattaatgtcattaaactttgcatttcttttctattgggtgctttgtcttttgcttactgatttgtatgagtttgtatatactatggataataaccttttatgtcttacatatattataaaactattttcccagatgtgaattgtcttttgtctcagtttatagtatcattttccccctgcaggaattctttgcttagagggaataaagctgagtcatttcctttcagagttgtatttctcaggttctaagaaatatttttccatactaaggttatacagacatcagaaaatcagttctactagtacacttaaaatttgattacacatctaggtctttaacatatctggacttcatttctccatatgatgagattaaaaaaaacctaattttttatatggaaagcctaccatccttgcacctttattgaaatgtcccctcccctccactctattttctttctttcttttttttttttttttttttgagaaagggtctcagtctgttgtccaggctggaggtgtgatcacaacgcactgcagccttgacctcacagtctcaggtgattcccacacctcaagtctccctggtagctgggactacaggcatgcaccaccacacctggttacttttttgtattttttgtacagacagggtttctctatgttgcccgggttgctgtcgaacacttgggctcaaatgatccacccaccttgccttcccaaagtgctggaattacaggcgtgagccactatgcctggccactctattttattgactatagcacaaccacaattatatcccaagttcccatacacaagtgggtctcattattagcacttttctctgttccagtaatttgtttgtacctataaaaatacaaaatgatttaacttattgctgtggtgtgaatgtttgcttctccctaaaattcatgtaacaccaaaggtgaatggtattaagaagtggggcttttgggaggtgatggagggctctaccctaataaacaggataaatatccttacaaaagaggcttcagagagcttgtgttgccccttctgtcacgtgaggatgcatagaaggtgccatgcatgaggaacaggccctcaccagacagtgaatcttctggtgccttgatgctgaactctcagcttacagaattgtgagcaataaatttctgtcatttataaattacccagtctcagtattttgttgtagcagcacagactaagacactaacccattaagtatcttttccaagagtcttatagttattacagggcaaagattaaacccaaatcatctaactccaagcctcttcctactgagccagtaagaaaatactgcatttgaaatatagccacaaagcaccataggaaattatcaattaatttcactaggggtgaaaacatcgttaggtatctcccccacacccttatgaaagtgaagcctaccacagaagatggaatagaatgactggtattagtttcagtatttagtatctacctttaattatataacctgtaaggtccttttcattagtgacaagtgaggacataaatccactaaaccatcactcaggctctaaattcacatttgtcctgaccatatttcactctctaccttaatcttctcatgtttgtgtcctcctctgtatactaaataaagtacacagtcggagttctatcccacatcttagttaccatgaaaaccaaataattaccagaatctgattgtctctacatcacaagacacaaaagccttttaaaaccagtggctctaaacctttttgggtaatggtccaaagacttaataaatgttatgggcccactcataagataaaaattgattttacataaaatttctgagcatttatgacccttctgaagacaataaataaataaatagactctcaagttaagaacctctatttgtggttgaggggggagcgttgaagaagaaatatatagaaagcttttccttaaaacaaattactctatgaagtgatccttttactgtgacacctatatgtgcttcttcccttttctttccctttcatgaaccagcagcaaacctgctagccaaggaaagatgaatgaattcccttcacagctcttcaatgtactcatcaaaggtaacacaggtgaataatgcaaccccattcctattcttctcaccaggaagtgagtaaattactttcacataccataaagtcatcaacttttgacatattttactttataaatgtatcaattatataccaaagatgacttgagaaaccagtgtttgcatatcatctagaaaccaaatgcctttagagggtaggcacataaagcaattgtttattaatactttgttttcaggcaagatctagcatagactcatatgtaaatatattattaataaatgatctataaaacggcaatgattataagttattatgtaaaatgtgttactgaaacaaaattcaatgcaggaatccttttttttttggaggctgggggtggggattagactacagaattttcccatacgtgaggtaccaatgaccacatttttgctatagaaaatatccaagtatctggaaagtgagataaatattgaaaaagtatcttgtattaccctatgaaatatcttctatttttcagtaaagttggtacttttgaggaaaaatgctaaactgtcatgattcaaaaattaaatcccatcacatttacagagaaacttcttgcaaacattgaatttactttgaagtgagttgattcttgacagaaagatgaatatgagtgtgaaaggaaaataaatctcaggaccccaaaaatcactaagccaagggaaaagtcaagttggaaagtacatcaggcaaaccttctttcccttttattcctaaataagatagctacaaaaataaaaaagctacatagctacatacctccctcacaatttgcccacaaggaaattccttgtgggcctcaagatctttttttttttttttttttttgagacagagtctcgctctgttgccaggatggagtgcagcggcgcgatctcggttcattgcaacctctgcctcccgggttcaagtggttcttctgcctcagccccaggagcagctgggactacaggtgcccataaccacgcccggccaaatttttttttttttttgtatttttagtagagacagggtttcaccacgttcgccaggatggtctctatctcttgacctagtggtctgcctgcctcggcctcccaaagtgctgggattataggcatgagtcaccgccctcggccaagatctttactctatgttaaacagttgtgttgattttcaccctggcaatatatgatagcgtatcttcacaagtccaggacagaaagtcatctctctgctcagctgaggcaaatgcatatctgattgctttctctgccttgctgtttatgtaaaaaggcagattcactgagccagactaaattgtatattcagtgaatggctgatcaaggactcaaaagaatgtaatcttttgtctcttatctacctatggcctgaaagtcaccgcccccccaaccaaaccaatgtttggtcacatactgattgatgtctcatgtcttcctaaaatgtataaaagcaagctgtaccccgaccaccttggacacacttattgtc

SEQ ID NO: 585726 - DNA, 4001 bp, Homo sapiens
agcggccccatccttatctaccttccccagtgcatcccagaaaaacatctgtcccttcctccctccatcacacagaccaaacacacacccagagccctcgggctaagagttggtatataaaagccttacaataaagctgcttcccctcttgcaataaaagcccagtggcatttattgggccctttgctttgtgtctctggaccctggccagggaggcagctagacttgaatgtgtcccaaaaggcccagcagatccacagagtactatgggagccaggagagggcactggatgctcccctccaaacactgggataccgacccctccacttcactgtctagtgctgatggctggagcaggccgatatggtggagcgggggagagagaaacaatttgcataattgtgccaattactttcagactaattaggtctatgaagacttcaaagggcagaagcaagacccaagaccagcttggctgctgggaagaagccagtcaggagtcccagacgcccaggggtcggtcgggcaagggaatgggctggttagtggccaaggagccggggcccaggagaggcgcggggggtagatgggtggtaagactgggatgtggagaggagccagaggccccagcggctgttctcccgcacctcgcctccacccctggccgctcctgcctggggccttgggaggagccgaaataacaataacaaacaacacagggcttagcttgagccagagtccgagaccaacccccacgacgctacggggaggtttggatatgccccaaccccttgctcccttcctccatcctcttgtcagtcccctcctccccagctttttctccgcccccaacccaccagcccagcctcctgctcccgctcctctaagcaggttctgccctcgcccaccatcctcccaggacccctcctcaccctcagctgggtcggctctcccttccgcccgccgctccctcccctccgccagctctcctcctcccgggcgcctgcggctgccctgccaaaacttctgcagttcccatgcccttcgcggcgactccagggctctccgcgttctatccggtaccccttctctgcctccccagtctcttctctccagcccctctcacaaggctcaggcatcggtccagcctcctcccctgtggaccaagtgtcaactccatccatcgtccttccgggcgcctctcaccttgaggacccagggtcctcgccccctcatcctttgcttttctctccccaccccatcctttgcctaaacttccacagggcctccggctccagacgtgccattcccggcttccccgggaacctcccgcttccaccaacaactccgcgacgcgcgcccagcctcacctctccgggcaggtccaggcagcccatggtggggatgcgcccccctcggcgtctccccgcacgggccccaggctcagccagcttctctcgcagctcgcggctgattcgcacctccaccgccagccgcacattagacctcaggctgcggcggggacacggcaggccgcagcagggacaggcggtgggggaagcctcggtgccggtcgccggcggagtcccccagcggcgggccagacacgcgcggcagaagctgtgctcgcacgccagaagcaccgggtcctcgaaggagcccccgcacagaggacacgtcgccagctgctccagacgctccaccagccccgggcccagctcgggcgcatccatggaaagccaggatctggacgccgccccttccgcgaccaccgtgaccgccttcgagcgcgcagatggcgggccgcccctgctgcttgctgtgtagatgcccttctctccgactcccgcattaacttttgccgctttccgcccctctcctgggattgcctctctcttcaaccagagtctcagtctcgtcaaatctctccaccacatcaggctttatagggagggaggaggctcccacgggaggtaaacaccaggccttgcgtaacgcctcatctggttctcctgcttcccgggtaaggtttgggggagcagggaggggagaatagcacacctggttcccagagcctaggaggcggtcactagagggcgctctggggcggggtagccctgtgtggggagggtagccccctgtgaccccccgaagagccccaattttaccttcccctccgcctgtggtacgcgcatgggccgggtgcccaggctcactcttggcatgtgcgcccacattgccaaggtgcgagtcattccaggtggctggcacacctacatctgggggctgggggccggaagcacagatcctggtttgtgtggctttggcaagcctctgagtgttgatgtgtggttttcattcctggtgcctctcgcctttccatcttccttccttacctattaagggcttaagggcattctgcagctctggggtaaggggtggggagcaggcgcccacacttcggcctcagggagtcggggcagagctctttcagctctacctctggccagctcccagggcctctccttactttcttcgtaagtctctctttctggttctttctctctgtttttccccgtgtgtgattttattaccagttttctctttccttccttctttggaatgtacccggtattatctatttcaactctggtagttcacagaggcccagagaactggaatagccaaggtcacatagcaagggaatgaccagaagtggagccctaccctggtcttctgacttgtgttcttgctgtgagtcaaccctgcctttttcagttgcagatccctgggaccccctcctgcttcctgatttttttctggtgttcctttgtgccttcattcctcacctccattctctctttttctccttacctgctcctctccccacctctcctcttcctccctgctccctcctcttcctagcttctctacccttccaatgccaggcctagctaactggatactcatgggggtttgtgcataagtaaacatccagatgtctacaactatgatcacccacactgttatataacatgtgtctgcatccatcagtgtccaaatgcccaaatgtgcacaaacttgcagacagaagcattcatgtaatacaaacatcacagctaaatataatgtgtatgaatagcctcatatgcattgaatatcactgggataaatgtccagtattatttaggaacagacggacatgctcaaagaaaacaggcaaagagacagatactctatcatcagttttattattaataagaataacagtataacagcagtaagtctttatggagcagcaggactttattaggcaccccctccaggcactcttcttctgcctcccccatacttatcggggagacactcaaatatgacaccctgataaacaaacctacacaaacaaacacacgtacattcatcttggaacaaccctcccggctcagtgctcataaaacacacagatacccaagcataagactacagttgtgactgaaatctattttgtaaaagatgcacttctatgctctgataggtagcatagagagatagcagcatgagaagtgatcggcctgacattgctggctttggagactgaggcaggaagccacaagctaaggaagtgggtaacctctggaagctgcaaaagacgagggaatggattctctagcagaccattcagaaggaacctagcactgctgacaccttaatttttgcccagtaagacccatttcagactctgaactacagaataataaagtaacaaatgtgtattgtttcaagctcctaagtttgtggtaatttgttacagtatcaataggaaactaatacacaagattgccttttctcctccagtctctgactctctgagtctgtttgcacttctgtgttgttgcaccttccagtttgtcatattttctggatgtctctgcctctcttgaccttcttttcagtctcatgttatctcttttccttcattgtcctggcttatccccaactc

SEQ ID NO: 585727 - DNA, 4001 bp, Homo sapiens
tcagcggccccatccttatctaccttccccagtgcatcccagaaaaacatctgtcccttcctccctccatcacacagaccaaacacacacccagagccctcgggctaagagttggtatataaaagccttacaataaagctgcttcccctcttgcaataaaagcccagtggcatttattgggccctttgctttgtgtctctggaccctggccagggaggcagctagacttgaatgtgtcccaaaaggcccagcagatccacagagtactatgggagccaggagagggcactggatgctcccctccaaacactgggataccgacccctccacttcactgtctagtgctgatggctggagcaggccgatatggtggagcgggggagagagaaacaatttgcataattgtgccaattactttcagactaattaggtctatgaagacttcaaagggcagaagcaagacccaagaccagcttggctgctgggaagaagccagtcaggagtcccagacgcccaggggtcggtcgggcaagggaatgggctggttagtggccaaggagccggggcccaggagaggcgcggggggtagatgggtggtaagactgggatgtggagaggagccagaggccccagcggctgttctcccgcacctcgcctccacccctggccgctcctgcctggggccttgggaggagccgaaataacaataacaaacaacacagggcttagcttgagccagagtccgagaccaacccccacgacgctacggggaggtttggatatgccccaaccccttgctcccttcctccatcctcttgtcagtcccctcctccccagctttttctccgcccccaacccaccagcccagcctcctgctcccgctcctctaagcaggttctgccctcgcccaccatcctcccaggacccctcctcaccctcagctgggtcggctctcccttccgcccgccgctccctcccctccgccagctctcctcctcccgggcgcctgcggctgccctgccaaaacttctgcagttcccatgcccttcgcggcgactccagggctctccgcgttctatccggtaccccttctctgcctccccagtctcttctctccagcccctctcacaaggctcaggcatcggtccagcctcctcccctgtggaccaagtgtcaactccatccatcgtccttccgggcgcctctcaccttgaggacccagggtcctcgccccctcatcctttgcttttctctccccaccccatcctttgcctaaacttccacagggcctccggctccagacgtgccattcccggcttccccgggaacctcccgcttccaccaacaactccgcgacgcgcgcccagcctcacctctccgggcaggtccaggcagcccatggtggggatgcgcccccctcggcgtctccccgcacgggccccaggctcagccagcttctctcgcagctcgcggctgattcgcacctccaccgccagccgcacattagacctcaggctgcggcggggacacggcaggccgcagcagggacaggcggtgggggaagcctcggtgccggtcgccggcggagtcccccagcggcgggccagacacgcgcggcagaagctgtgctcgcacgccagaagcaccgggtcctcgaaggagcccccgcacagaggacacgtcgccagctgctccagacgctccaccagccccgggcccagctcgggcgcatccatggaaagccaggatctggacgccgccccttccgcgaccaccgtgaccgccttcgagcgcgcagatggcgggccgcccctgctgcttgctgtgtagatgcccttctctccgactcccgcattaacttttgccgctttccgcccctctcctgggattgcctctctcttcaaccagagtctcagtctcgtcaaatctctccaccacatcaggctttatagggagggaggaggctcccacgggaggtaaacaccaggccttgcgtaacgcctcatctggttctcctgcttcccgggtaaggtttgggggagcagggaggggagaatagcacacctggttcccagagcctaggaggcggtcactagagggcgctctggggcggggtagccctgtgtggggagggtagccccctgtgaccccccgaagagccccaattttaccttcccctccgcctgtggtacgcgcatgggccgggtgcccaggctcactcttggcatgtgcgcccacattgccaaggtgcgagtcattccaggtggctggcacacctacatctgggggctgggggccggaagcacagatcctggtttgtgtggctttggcaagcctctgagtgttgatgtgtggttttcattcctggtgcctctcgcctttccatcttccttccttacctattaagggcttaagggcattctgcagctctggggtaaggggtggggagcaggcgcccacacttcggcctcagggagtcggggcagagctctttcagctctacctctggccagctcccagggcctctccttactttcttcgtaagtctctctttctggttctttctctctgtttttccccgtgtgtgattttattaccagttttctctttccttccttctttggaatgtacccggtattatctatttcaactctggtagttcacagaggcccagagaactggaatagccaaggtcacatagcaagggaatgaccagaagtggagccctaccctggtcttctgacttgtgttcttgctgtgagtcaaccctgcctttttcagttgcagatccctgggaccccctcctgcttcctgatttttttctggtgttcctttgtgccttcattcctcacctccattctctctttttctccttacctgctcctctccccacctctcctcttcctccctgctccctcctcttcctagcttctctacccttccaatgccaggcctagctaactggatactcatgggggtttgtgcataagtaaacatccagatgtctacaactatgatcacccacactgttatataacatgtgtctgcatccatcagtgtccaaatgcccaaatgtgcacaaacttgcagacagaagcattcatgtaatacaaacatcacagctaaatataatgtgtatgaatagcctcatatgcattgaatatcactgggataaatgtccagtattatttaggaacagacggacatgctcaaagaaaacaggcaaagagacagatactctatcatcagttttattattaataagaataacagtataacagcagtaagtctttatggagcagcaggactttattaggcaccccctccaggcactcttcttctgcctcccccatacttatcggggagacactcaaatatgacaccctgataaacaaacctacacaaacaaacacacgtacattcatcttggaacaaccctcccggctcagtgctcataaaacacacagatacccaagcataagactacagttgtgactgaaatctattttgtaaaagatgcacttctatgctctgataggtagcatagagagatagcagcatgagaagtgatcggcctgacattgctggctttggagactgaggcaggaagccacaagctaaggaagtgggtaacctctggaagctgcaaaagacgagggaatggattctctagcagaccattcagaaggaacctagcactgctgacaccttaatttttgcccagtaagacccatttcagactctgaactacagaataataaagtaacaaatgtgtattgtttcaagctcctaagtttgtggtaatttgttacagtatcaataggaaactaatacacaagattgccttttctcctccagtctctgactctctgagtctgtttgcacttctgtgttgttgcaccttccagtttgtcatattttctggatgtctctgcctctcttgaccttcttttcagtctcatgttatctcttttccttcattgtcctggcttatccccaac

SEQ ID NO: 585728 - DNA, 4001 bp, Homo sapiens
gcagggaccctcaatactgattcttctctggctggaggtgggcaggaagcagacatagctcaaatactgagcagccaaaaaaagaagaagatggcgagaaacaggaagagggaatcctgccagctggaggctgggtgaccctgtcccagatccacacctgtgggagagaggaaagctgtggaagcatatgctcctaggctgggagggggcctgaggggattcacagggctccctgatgggagctgagtgtgactcttacctgtaccccggcggaaaggctcatgggcattgaagacggtggtgaaaaagccaaagggaaaagcaccaacaccaaatgagaagtggaagcccccggtatcaccaaatggctggaatccctagggaggcagaaaaagtcagacaggaagccggcaaatctgtcaaggaagggacacaactggacaagaagactcacccctctgctctccggagctggtctctggccctgggggcggggtggagtttttaatctgaggaagtggagagagaaagttaacagggatttttctcctcccatcttccacaccgttttccaagggcagaagccttcaatcttccctaagcaacacctccagtctctcacctgggatcctggggcttctggctccctcgcccataaagcgggacaaccttctctctgctgatcccagctttacatactggacactcttgccgttctggccgtgtctccagccactggggagaaaaaaggtggtttccagtatacaagagggtcttacagctcctcagacctccccatttccctcttcatctcctgagtacgcacctgatgaagacatggccaactggatgggggagaaaaaaaaaaaaaggtcaaactagctacagaaaagagagacacagaccctagacttcgcagaatcccatctaacccctcttcccaagcaacctgctgttgcttttcagattttctgcaacctctaccatgccagccaacttagttagccttcctgcttgtctgatcttccaacacctaaagctctgtccatcctcaacacactcaaccctctcctttctcctctccccaacaaacacatacaaattttcgtgccctctcttttctgcctttcaagttaatttctaatttccttcagccacctctttctgggtctcctcttttcaaccccaaccccatcactccaaaccaaacccctttactagcacattcccccattactcactttcaagctcaataatgtccctatctttatgaccctttaacctttcaagtctgcctctccacagtgcccttataccagccccctcccagatctcatctgaatgtgatccatatttcctggttctccccgactcaactgatgcgtgcctcccttaacctttgtgtctcacttgtttccacctgcacagctaagacccctcacttctctggggtaaggtggctcgggtctcacattgtcctgccactccccgccccaccttctcttctcagcacatcacgtgcctcagctcctggttcctaagacctttctttccacagatctcgaccgttatactcccacccacacataccagcaaagtcttatgtctcctgtcgggcttcacctatgggaacgtgccctccgattatctgtatgactgtatgattattcgctcctagcctctccagtatataagcgagacccaccacctcccgcccccctcctcgattctcaccagtacaggtggccacacacactgaccacagcttcccgagcagtctccaaacatatattacattcgaaggtcgcgcccgccccgccccgctcgcgatttggcccttcggggcccccgtcctcctcctccgctgctgccatggccggttttgtttcgccccacgtacccttcagtccccccaaatacacatacacacgccccaacaaaccagaaaccacctcctgcccacgatcgttgggcaggcttcaaggtttcctaatcactattggtctgaatgcctgccagtcacaaagaattcaaaagaaaggattggcccaaagggtaggggcgggaaaaggttagtgcagtcctgccttcgcacaatggctattggctgatacggtctaagtcaatgtgcaatgccaagggattggtaataactcgctacacgctgtcgcctggccaaggagggctttattcgtctgagtagttgtcagtcataaccaaagccataagcaatttgctcgggactacctatagacctcgcccactataagcccctttctttccttcgcttcctcttttagagaatgtccggattgctattggactttggagcgtatggctccaaatcaactcattggctaaaacttgacggaaaatggtggttaggtaaaacgcgcctgcgcagcacgcggcgggacgggggtgggccaatcctgtgagggtttaaccttctctttttccacctcttcacccctatcttgtcgccatggtgactgctctacaattggcgaggcttgcacttcaaagtcctaggctcgcttcatccgggtccttcagctgtggactttctgctgattgggccttttccttttcccctgattggccgacatcgggaaagacggcgaagagctaggaaaagagggaaaacactagggtcgcagggttcaaaatggctccaacctcctttggtgacgtagagagcagaacttgggtctgcccctcccttttagttaagggagcagaactgggattagcccgacgtttggatagtgggaacatcgatctgcggcgctggtgttaacccaactcattcggctggacgactcagccctccccatattaggtgatttacagagcaaaactgaactaaaggcccacccctttcttaatgttgtacacagagtagaacaggattgacttcaactccgttttaaaccttcagagcaggaaagctctgggctcaacccctttgtgagtggtgcaaaagggacaaagcccgccccttttaaggagacccgcggaggctagacccgccctttcctctttataatttgcccatcagaaatagggtcttcttcccaggttggaccccggggagtttgggcttttcctacaatcactgaccctcactgtgactaaaggagcagaattaggtaacagtcctcccactaccaatcctcttcccgagggcatgtaaactaatgcagggtaaaggtgtggctagaggggggaccttgataaaagatcccatgtgactcaagagtaaggaaagatgagaagttagcagttgcgtaaagaaggactggggcagatgaggattcaggaagcttgaggtttaggaaggaagatattgagagggaaaggtggaaatgaaggagagtgaagtgatggaatgatcctagtaaagggataatgggagtggaggaagagaagagggggtggaaaactagatacatggctaccaaattaaggaggcacgcgcattccagaggaatcggcattcttcctcactttttatttttctagaaagcacccctgaagccaaatttccattggaagaaaagatgtacccatattgtatgttgtgagaaggggttgtctcagcttgggcaagtaaggagactgatacgaaggaagtaggaaagaaaaggtacagaggtaaaagagcatggaaaaggaaagggtcagggataaggccaaagagatctcttctctttaaaggccagagaaggcaggtggaggggggagctggactgctgggagatagtgagggacaaagggcaaaggaaaccagaccagaggactggagagtgagatggagtgagatggagtcctggagagaaaaagaagagaggtgaacttaatgcttgtcatatggtaggtagatgcttgataaatgtttagaattgaatgggtacgggaaaaggggtccttaagaatagttggggggaataagcagcagataaccggagttgagaaaaaaagagaccaagtaaaagtgg

SEQ ID NO: 585729 - DNA, 4001 bp, Homo sapiens
tatcttatgaggttgtgtgtatgcagggatcagattaagtaatgtatgtgaaattaactaatagttatgcacaaaaataatttatttttgtgtgtattattcaggttattattcaggtgttcgtgttttaatttgttaaacttcccacaaacatatgctgttggaaagggccaggcagggaaagatcagtgctcaagctaaaagaatgaatgcttaatgtggacttttaggcactaatacctggatagaagaggtatttggaggcagagatgttttcttggtgttcctcaaaccacagcatacaagtaaccctttataacactccctaatctagcaattaaatttgtgcctagacatgaattcctcctctgacttgaagaactactgctctgggaaggaactaaataatccaaatcttagcacttgatcatacagcccatatggatgttctttatacgatgactgcttcattgtataaatcctctctccccactcaagccttaaactcttcgagcgcagaaattttatttgtcctcattgtacaccaaacaatgttaaatactcagtaaatacctggcagactgaattgaggcagtacggcttataggaaaaatctacctgaacacacatgagactcaaaatacttcttgaatttacatcatgaccaaccatccacttttactgcaaagagaacttttcatacagattatttccaaaacccaaatggttcccagtcatcacaagcttgtccctgacccagttctccttctcaacctgattgcaatctaactccctcctcccttccctcgtcttttcaagatgcaccacgctggtgcatcttgaaccgtgccaggaacggtacctcatctttccccttaaaatatttttcatttgcaactgcattaataaagacgacaggcagcctctggagagaactctgaatacctgcccgacccacctcagggagtgccactcggccgtaccgagcctcacaggagaaatgtggcccagcccaagccgcccatgttcctcagagttgggaaggaggaagacatttctacgtgaaagtttgattgctttaagggacaaaacccaaaatttgcaatcgttttcaaaacaaactcgagaaagttcaggcgccgggccctgcctcggcttcccggcagctcgcggcccccgccaccgttccccgacctggcaccgcggggctctgtgcgccctaaacgggatctggccagcccccgccctcccctcctcgacacccccgcatctcctcacgttccctgcgcgtccctctcctcccagtccccggcccagctacccgctgacccaggcctctctggacggggcccgcttctcgccccacaggccgcgggtcagggcctccgtcctcgccccaacccttgtggcccccccgggctccccagagccgaactctcttttcttcctttctcccactcggcccctatttctcccccaaacacctcccaccgcagacccttcagccgctcgcgccagaaccgctttctcccttctctccccaggaatccaccccccccacagacacttcgctcctcttcctgatgcccgcctcctctctgccattcattcagcccagcaagacaccttcctccctccccggagccccgctccctccagcccctgccctccgctccacaggaccccttcccccgtacctcgcacccatcttccagcagcagccacccggcgctcatccccacccgccgcaggcaccagctccggccaccggcgcggtctcctgtgacgaagaagccgggctcccccatcgcctactcgaccccgggggcggtcagcaccgagcgagaccctgacctaggttctggctgcctctgtgcatcccctcagcttccatatctaaataacagacagaagcaatcgccacacgctcgcgatcgctgcgaaagcaggctccgctcgcccgccctcggccaggaagcaggagcactacgcctgcgcaagaggacggcggccgccctggagcaaagagggtgggttgggagccaatccggccctgggcggggcgggcgcgattcgagaggtctcctcgcctcacaccttccctcgccgcctccagaaccatcaccccagtcctagccgccccagactggaacctcttctcacctttcctctttttaaaaaagtcatgtgaaactatagcccacttttaaacaactttaaactttccatcggatttaagtctgcctagtctgttgctaaatagtctctattttgcacgacctacttatattaccgaagtaaaaaataaattacactaggcaaatctacaaagacaaagagcacagttacctggggcgaggtgtgggagcgggtattgaatgcagatgggcttgaaaaaattggaggaaagcggtaatagaaatgttctaaaagtggattgtggtgacaattgtacaactgtataagtttattaaaaagtcatggaagtgtggccggacgcagtggctcacgcctgtaatcccagcactttgggaggtcgagacgcgcggatcacttgagttcaggagttgtgaccaacctggccacatggggagacaccgtatctacaaaaaaaaaaaaaaaaaaaggaggaagggagggagagaaaggaaaaaagaaaaaaaagaaaaattagctaggtgtggtggtgcacacctgtagtccggctacttgggaggctgaggtgggaggatcacctgaccccgggaggcagaggttgcagtgagccgacatggcgccactgcatcccagcctgggcgacagagtgagaccctgtaaagtgaagaaagtgtaaacttccagtgggtgaattttatggcatgtaaattatactcaataaagctgttaattttattattattattactgattacagacagggtctcgccctgtcacccaggctggagtgcagcctggagtggtgcgatctcagctcactgcaacctccgcctcccgggttcaagagattctcctgcctcagcctccagagtagctgggattacaggcacgcgccaccacgcccggctaatttttatattttttggtagataccgggtttcgccgtgtctcctggattcaagtgatccaaccgcctcagcctcccaaagtgctgagattacaagcatgagcccccgagcccggccaattaaaaaattgtttttaaactcagcctctcctttggattttccatatagtgtgatagctgctgcctgcagtgagtacatccaatggttgagccccttttgtcttttcagttttccaacacccagttaacaatttctttcttctttctttccttccttccttctctttctttcttttcttttttctttctcttttcttctttctctctctttctttctctccttccttccttccttcctcccttcttcctctcttttttttttttttttgcacaaggggaaagaaggaaaacaattttcctaaataaaattctgtcaaaaaaccagccgggctgggcatggtggctcatgcctgtaatctcagcacttttgagaggccgaggcaggcggatcacctaaggttgggagttcaagaccagcctgaccaacatggagaaacaccgtctctactaaaaatacaaagttagcccagcgtggtggcgtgtgcctgtaatcccagccactcaggaggctgagccaggagactcgcttgaacccaggaggcagaggtggcggtgagccgagatctcgccattgcactccagcctggacaacaagagtgaaactccatcaaaacaacaacaacaaaaaaaacaaaaacaaaaacaaaaaacacacacacagccaagtgtggcggctcacgcctgtaatcccagcactttgggaggccgaggcaggtggatcacctgaggtcaggggttccagaccagcctggccaacatggtgaaaccctgtctctagtaaaaatacaaaaatgatctgggcatggtggtgagcacc

SEQ ID NO: 585730 - DNA, 4001 bp, Homo sapiens
ttgtgaagtgtccaaattttttgctagtttttaagtcctttgaatttcttctgtataatacattgatggtgggactatcaagtgttaccactttggaaaagaggttggcagtttcttaaaattcttaaaacatacacctaccatatgatgcagccattcctctcctagagacttacacaagagaaatgaaagtatatgtccacacaaagaattgtacatgaatgttcacagcaggtttatttgtaatagctaaaaactggaaataacccaaatgaccatcaatagatgaacaggtaaacaaattgtggtatacccagaacaataaactactactctgcaataaaaaaggaataaactattgatacatgcataatctggatgagtatcaaattaattatgctgagtgaaaaaagccacacacacttccttccaccccaagaagagtactcactatatgtttccatttatttaaaaatttctagaaaatgcaaaccaatctataattacagaaagcagatcagtggctgccaggcgaaggagggatttaaaaaggggcaagaggaaactttgaggggtttcatggttgtttcctaggaaagagatatatttgtgtatatacagtcaaaatttatcaaactgtacgctttaaagcttattgtattcaagctcaataaagatgaaaaaaactacaagaaaaataattaaaaaaaacaaaaacccggccaagcggggtggctctcgcctataatcccaacactttgggaggccgaagtgggagcatcgcttgagtccacgagttcaagaccagcctgggcaacacagtgaaaccctgtctccacaaaaaataaacaaaaaaattatggccaggcacagtggctcacggctgtaatcccagcactttgggaggccgaggcgggcggatcacttgaggccaggcgttggagaccagcctggtcaacacgatgaaaccctgtctctactaaaaacaaaaattagccgggtgtggtggcacgcgcctgtaatcccagctacttgggaggctgaggcagtgagccgagatcacgccactgcactccagcctggacgacagagagagactatgtctcaaatatatacattataaatatatatatactttaataaataaaaaaattagccgggtgcggtggcaggagcatgtagtcccagctacttgggaggctgaggtgggaggatccccagcccgagcaagagaccctgtctcacaagaaaataaaaataaaaaactaacaaaaacaccctccagattcccagtctcaatgtgaccccatttcaccgctgggaaccgccccttccctccttaaccctcctccatctcaatactgatattcatcccttctttcgaggggaaggttgaaccctaacaggttcgcaaactactaagactcaaagtacgcccactgtattcctggatcctcacctcctgccaccaacctcctgtctaccttcacattcgcacagttagccttgcaggaatagtaacaagtgccccccatccgccgaccatcccctcccgttcatgttcccattcatccacgaagcgtaatccgacggagcatatcccgctcctgaaataccactaatgggcacagaaccaccaaaagctgagctcctcagtcggcccacccccgggcacgttggagtgtggggattcgaacgccccccagtccaggttacctgccaccggctggccgcgccggggacagttcagccaccgcggcgggatcttgttgtgagccatgtcttggggctgcgcagagctgccctccctcaccaacgttcaccgcgcctttggagccgcctccccgtggtccggtgcacaccggggtccgagacacccgaatcgcagccgtaatctgaattccaacctctccgatccgggtaacgtcaggggcggcgcgccactttcattcaggatcaactccacagctccaggagaacccacaatgcaccgcaacttccgcccccgaaagccccgccccctttccgaggtcagagggaaagaagaggaagctcagcggaaggatagcaaagagttaaggacgcgacgaatgggaggagcgggccttctctcgccccactcggcaccgccccgccccgccccgtcccgctccacggacgcgcccggacgctactggttcgcctttgcgcatgtgcaattgccctcgtaccgaactccgcaggacgaagcgtgtatttttttcccatccagacaacctagagaaacccaaaaaagagggaagccaagcgcctttccatgcgtagattgcccgccacttccgttaaggcatctattttactgatgaaaagaggccttctgagcgttaccacagctcaagcttggcgtcccagccggatctaggtttgatttgcaattagggaaagttgttcaagggaacaagtcttaggagaattctaaggacatgagattggagtaccagaaatggggaatttttcttttggtgagtacttacgaggatctatgaagcttctgaaattaattccagaacacttagagttttgtttgtacatttctggatcaaagtttcaaagcatactggggagtttgagagggtccatgtctccaaaaaaagttactaattaatgtggtataattgacaaaggtaggaattgatcagtggagaacctcttcgtggcgttgttctccttggcctaccaaataaacagtgccttttattttcccttcgagttaagcagaggtgcttgaaaaatttttataaatgccgtcctttaacgagcctttcctttgttaccagattaaagtgttaaatataaagctggatgatggcgaatcaattataatgtagtttggctttaaacaccaatgctatattggaactgcaagaacgtaaggctgcagggaatacatttttaaagcgtcggtggggaactttctgggacgctcaaccccctgaatgcctggaccccctcagtaagagtcccatcaatagaggcagtccaacagcaatctctctgaggcagcctgagttaggtcacacttctggtctgtcctgctgttgcatctgctcagaactgttagtgaaggtgtaaactcctcccctgacagaacaagataatacccagtttcctttaaggccatcagtctacccaaataatctccgatgaattcccttttctgctgatagagtgtgtaccatgcccaaagtggtaaaaaccttccatccccagaccccctccaaggatgggaaaggtgagcctgatcctggaagagtatcttaccttccccttctggggatgactccccttggtgactccccttcccacacacgctatacccagtagctcagtcctaggcacacagaagcttcataccactggcgagcaactgttattggctgtaaggcagcaatgtgcactggatttttattctgctatccagttatgccctctccatactcattgccacagaattgggaggaccctgtggctaccttttgtccacaatagagagtagagtaggagagtggcatcccgatgagcaggcagtttctctctgcctgtcaggaatgccttgcctgatgtgtgtttctgcctatattgctcctagtcccaagtttctactactctgtgagaagaaaaatagatgctcacagacagaccaacatgattcctcccccgcttcctggaacccctgacaccctcccagatatgtcttgatctcctctttatcagatgtagattctcttcattggtgagtctttcatcaaacatccattttgcccataaggaagagtgtgtacatgtaaaaaataagattgaacgttctcttttggcaaaagagagagatcttatctgtcttcccttttcctaggacttttccttgagaaaaacctatatttattaatccttcctcttcactttgatatgtagataaatcttttgtttttgcagacagggtctcactttctcacccaggctag

SEQ ID NO: 585731 - DNA, 4001 bp, Homo sapiens
attcaattgtacattcacttcacttttgtccctccaggccctatgtgggaacatgtagtactttcactggtcaaattggcagaccgtgtctctcttgctgttgccacacatcagctgtgccattctctgtaggtggtgaacggaaggcaactcaacaaaggaacaaactgtctattcctactgccaaaccctggaagcaaggagcccacacaaaaagataagaataaataaaacgacagtaaaataaaatggagactgcaatattggaaacaactaaaatcagtttcagtagcagggaaattaacaaataaattatggtggtacattcatataatggaatactctaaagataataaagattctgtttctaaaaaaatctcagggtctaggggaaaactcacaatacaatgtaatgaaaaagctggttgcatagctgggtgtaaattatagatatatatgtatacatatatatatatgaggaaaaatactaaaagaaaattcaatcaaaagattactagggctagaattagaagttttttattcttctgtagttctctatgttataaatattttatttaaaatgtatactcttattataattagaaaaaagttaaaatcttttttagaacatttagttttccattcagtagttgaaacatttagtagttccattcttccatttttaagtttgggttacaaatataaaaaactaaagcatgcaattctatattaaaggcaatgaagtcttcggcaaagatttatataaaatactaaacttttaaaaaaatgctactaaccatggtaaacctaagtagtgttttaaactacagtttaaatcaaaagtgtataagtgcaagtttctttttaatctgccacataattctatctccaatactttagaataatataatgaatactatatttagtacttgcattatgtttaaaagtatggctatagatagggtcatatgcaaactatcatgatattttatttgtctttagacaggaagagtgcattttctctgtctatagagtacttggtttttaaagttaattcagtgactgttttaagcacaactaaattacaactgaaaagagatggtacaatagttagagaagggatgacacccagaaatgagaatgaaagcatgaatttccatataaaaaactcactaactaaaataataaatgcacaaacagaaataaagaaatgtacaaataattattgctttaaaatattattttacatggcaactgtatctgcttcctttttcatccagctccctacacagctggaattagcaggcattatcctgtggccaaaccgatttcaggtttcaagacaactactaatgactttgtaataaataagtttaaatagaaagtttttaagtgtgcaaaattggcaaaattgattccatttaaacctcctttacccagtcctctagcccaaaaaatatatgaccacataccctaaagaaataaaatagcctgctttatcttctgcaattataagggctcctaacttatttaagaaaaaataatctatcttgccttgttgccaccacttctcataagaaaactcctcataaagagaaaacaattctatcagttataacaagctgaatgctacatgttctagttcctgcaaagacaaatattagattgtgagacttaccagattagttacacacgactttaggcagctatttaaaactgtacactgcaccacagaaatccataggcagccaagagttgcaaaattgacaagcttcggaataagacagtaaatgttcttcatcacttcaccaatggcagatttttagatggccggtctaattttctccattttgctatatgaattatttgggcttcatcacttcaattggaggagtagctgatggattttgctttgtttgttttgctatattaggatatacttgccttttgaaataatacttagcctttttcatttagacctttgaatgcttgaaagcttgtaacagttccataagagctatttcataacagcttccttttactcccataaagtcacccagtgactaaaggttagttcttagaagtgcacttcacatggaaattaaagaaaacgaattgtatttcagcaagggtgtgacacatgcagtctgaaactggaacatttcagtgggtcgtccaccaccttacttctctgagctcttttcagctctgcagggaattgggttttgaccacgtatgctttagcaaacagtagcactattataataaagaattattggaaaaatagaggcacccaaatcaagcaatgcaactgagagagaaaacagaactcagaagccaaatacatatttttaaatttaagagcaaacaaagctgaaattaatagacaaataccctgggagagagttaaaaacaaggaagttggttagagtactctcagaactttactacatattaactaaaatactgacttatcaggtctatcgagacagctgaaactagttaccagaaacctaagatatgttcaagtgtctgctttgagaaggaaacattgtacaagcttccttcctgcctgccttccttcctctctctctctctctctctttctttgagactgaatttctgtctgtcgcccaggctacagtgcagtggcatgatcccagctcactgcaacctccgcctcccaggttcaagcgattctcctgcctcagcctcccgagtagctgagactacagacgcccgccaccatgcccagctaatttttgtatttttagtagagatggggtttcaccatgttgcccagagtggtctcgatctcttgacctcgtgatccgcccacctcggcctccaaaagtgctaggattacaggcgtgagccaccgcggtacaacaggccaacctccttgttttcttaaataaattatactaaatgtaacttaaccttttcttaatgatataaggttctccctatgagtaacacatgcatgaggttttgttttgagctgaacgtcttttgattggatttttgtttgtttgttttttaatttttgtgggtacatagtaggtgtatgtatttatggggtacaggagatgttttgaaacagacatgccatgtgaaatgagcacatcatgaagaatggggtgtccatcccctcaagcatttatccactgagttgcaaacaatccaagtatgttctaagtcattttaatatgtacagttattattgactgtagtcaccctgttgtgctatcaaatagtaggtcttatttattctttctacattttttgtacccattaactgtccccatctcccatcccccaccccacccaccaccacccttcccagcctctggcaaccatccttatactctctttgtccatgaattcaattgttttgatttctagatcccataaataagtgaaaacatgcaatgcttgcctttctgtgcctagctcaattcacttaacgtaataatctccagttccatccatgttgttggacgtgactgaatatggctgaatagttctccattgtgtatatgtaccacattttctttacccattcatctgttgatgcatacttaggttgcttccaaatcttagctattgtaaacagtgctgcaataaacattcacatgcagatatttctttgatatactgattttctttcttttaggcatatacccagcagtagaattctagatcatatggtagctcaatttttagttttttgaggaacttccaaactgttctccatagtggttgtattgatttacattctcatcaaaaatatacaagggtttccttttctccacattgccaccagcatttgttatagcctgtcttttggacataagccattttaactgggtaagatgatatcccattgtagttttgatttgcatttttctgatgattaatgatgttaaacaccttttcatatgcctgtttgtcattcgtatgtcttttgagaaatgtctattcaaatcttttgcccatcc

SEQ ID NO: 585732 - DNA, 4001 bp, Homo sapiens
tcgctctgtcgcccaggctggagtgcagtggtgcgatctcggctcactgcaagctccgtctcccaggttcacgccattctcctgcctcagcctcccgagtagctgggactacaggcgcccgccacgacgcccggctaattttttgtatttttagtacagacgaggtttcaccgtgttagccaggatggtctcgatctcctgacctcgtgacccacccccccgcctcagcctcccaaagtgctgggattacaggcgtgagcctccacgcgcgagttacaattcttatcttcactttacagatgaggcaattgaacagacaggtaatgtgcccaagatcacacagcaagtaaacaggccaatttttaaaatgagctagggctgggaggtggcccacagcctgtaataaaaacactctaggaggccaaggtggatggatcactgagcccagaagttcgagaccagcctgggcaacaatgcaaaaccctgtctctacaaaaaatacaaaaattagctgtggtggtgtgcgcctatagtcccagctactcagcaggctgaggtaggaggactgcttgatcccagggaggtcgaggctgcagtgagctgtgatggggctactgcactccagcctgggtgacagagtgataccctgtctcaaaaaaaaacaaattttttaaagctagatttaaaaattcgtctagaccaattaccctgtaaaatatgaagggaaaataaattcattattctgactttatgatgtgacagtaggagtggcatgtttttacacacttctgttcaaaagaggggcttcacctctgcttcctctacaatgagcaccttgcttttcagacagttctctgccatctactgaaagaattcttcctcccaaataattatgaccctccctcgtccagtcccatggacactttgggaagaaaaagagaccatacatacacttaagtttcccatgtagatttttaaaatactcctccagatataatgtcacatataaagcttctgatcatttactggttgataaagatacaaattattctatcttttgtatctcattaaacagcaacaaatgcaaatagcaattaacatgttttattagctgcctgctcccaattaacgtgtgaactagtcccaatacctagtaaactactctttgtagtccaaacagctagaggcatagcaggtgtgcaaaatctctgaatgactaaaactgtcgttttggatacatgttaacttaggtaaatagcaagaaaatcacagcaagtaacagcagggctgtttagcccaaatattcttgaacaaatttaaaacaggtatcattcaaggataactcagaggagtgtacaaagttggaaggaaaagaaaaaactaatgaacatttctacgtgctgcagcaaaggctctacatacattctcgaaactaaccctcacagctctatgaagtatgactatggtgagcgctattttacagaataagctaagatttagagatatttaatgacccaaagtcacaaagctttaagtggacgcgccagactgtcactcagatctgtcggattccgagggctgtgctcctaaccccactataccatctgtctcatacttcggaagtcagacgtttttcaactggctaggataaaagcggccaacgcttcaatcccacatccctcccatcccacggctcccacttgagagcttccccactgtctcctggcaagcagctcgcgctgaggaggacccgggctggtgatcgatcggcccccacccaggtaattagaggggtaaccaggaagagtgagaggccgagacagtaccaccctcatcacgggaccctttcaccccaacgctccccggggctgagacccagcgcacttacactactcgatccagagtgtccatcgctaccgctacctgcaactcttaaccagggggcatgcacgtgccctcggcgattacgtgcgccggaacaggcggaaccggaagctgcgcgtaacgccacttccggggacggcctcgtagagggcgtctagaggcgctggcggccatcttgattggaatcgcgccctgttgtcttggttacggatttttgccccggctctttcctggagttacaggtgcgaggtaatacttttaagtaacactggccgggcgtggtggctcacgcctgtaatcccaggattttgggaggcccaggcgggcggattacctgataacaggagttcgagaccagcctggccaacatggcgaaaccccgtctctactaaaaatacaaaaattagccgggcgtggtggcgggcgcctctaaccccagctactcgggaggctgaggcagggagaactgcttgaacccgggaggcggaggttgcagtgagcggagatcgcgccactgcactccagcctgggtgacagagcgagacttcgtctcaaaaataaaataaaaataaaataaaataacatagaccctcgcagtttgatgtacgcgctagtgtgcatacctggagtcaggtattcagaaaccagattttattcttcaaggaatcccaggatgctagaaaggttgattgattgcacggtaggtactcacataagcactaaaaacattgatgtgaaaggggcactattgacaactatgcgatctgtgtgacagaatttatgactaccacagttgcctagtacataaaagatgcgcagaaaatgtactgctgttcgtgatttttccccagtttttaagttaccatatacttcacataccataaaatgtacccctttacagtgtacaattcagtgatttttggtgtattcacaaagatgtgcaaatatcaccactaattccagaatatttaatcacctcaaaaagaacccccctgacacacacacccagtagcagtccatgccccacttccccctcctgccagcccttggcaaccaataatctactttatgttcaatggatttgcctattctgaacatatataaatggtttcgtgcaacgtatggccttttgtgtttgacttctttcactatctttttgaggttcatacatgtagcgtggatcagtacttccattttgttaggactgaataatattcctttgtatggatataccacattttgtttatccatttatcaacctaggtactttttttattttagacatagtcttgctctgtcgccagggctgaagtgcagtggtgcgatcttggcttactgcgccgtccacctcccgggttcaagcagttctgcctcagcctcccaagtagctgggattacatgcacgcaccaccacaccttgctaacttttgtattttttagtagagacagggtttcaccatgttggccaggctggtcttgaacttctgagctcaggtaatccacccgccttggcctctcaaagtgctaggaatacaggcgtgagctactgtacccggcagcttatgtacatttgaatggttcctattttttggctattatggattatgctgctttgtgtttttttgttttgttttgctttgctttgttttgtttctgagacagagtctcactctgtcacacaggctggagtgcagtgatgcaatctcaggttactgcaacctccatctcctgggttcaagtgattctagtgcttcagcctctcgagtagctgggaccacaagcgcgtgccaccacacccagctgctttgaatattagtgtacaaatttttgtgtggacatacattttcaattctctaggagaaaaattgctgggtcatatgctgactcttaagtgtaacattttgaggcactggtaaactgttttccaaagcacctgcaccacttaaattcccatgagcaatgtaagagagtttggtattagtttcctatttctgttgtaacaaattatcacacatttattattttatacttcaggaagtcagaagtctgaaatcagttttgcaggtctaaaatgtaggccggaagcagtggctcacacctgtacccagcactttgga

SEQ ID NO: 585733 - DNA, 4001 bp, Homo sapiens
ttagaccctgccaacaccttcacccatagcaacccgccagacccactcaccttcttcatttggaacttgattgtggacttcacctcatccactttggccaccatgttttcgttgtgtgtgagcagggaagggaactttcctgccttatttaaacctgggccgaggattcgtggaatctgcttgatcagagactctgaggccaaaaacgcatcatacttcttggctgatagagagaggaagccattggcattgcttagaacctggtcaccaaggcacacctcaaatgtggcaggccagaaacgcacttgaatcaatcatgtaagtgacctccaagcagcaccctctctaagaccccgcctcagtcttttccctagcccaaacggtttccagaaagtcctctggaccttcactggtcccaaaacatgctctcagaaaaccaggctgacccatgatccatggcataaccgctgtacaacggatgctctggtcaagactgcctgggctcgaattctgcctatttcttagctgtggaccctggacacgtgacaactgggaatgtctgcttcctacctgtaaaagcagtctaatgccactgcctaaacaacgcagcgtaaagatttccaaatcatagttcaccagcacctggctggtcaacttacaatgcctggcctccctcatcaactggaatcctcatagcaatacaaacatcaaaccaccccaaagctaaaacagcactcaggcaagctaggcaaccaccgccgatcctttgctattctaggcccctcatcatttaaaaatcgaaaatggcagaaaagcctttctaccgcccccaccacacatctcacatgcaaaaccacagcggccggactcacccagcttcttgaccagttttttattcttgttgagttttttcagcgcctcgatgtccatgtgggggatatccacggccttagcctcgtcacagtgctgctggtcccccaggacacacacagagaacttagggcggggagtggacttaagcctgcgttttgggggacagcaccaacaggttacgcctagccctgggtcccaagggccggtgaagggtctgggaccgcagcagccaccgagccttacccggagcgttcacattcaccagcagccagcctggcttctcaggctggccggcgggctcggccgaggcctacccacgcctcccctcatgttttaagacccagggtgggggtccgtccagccgcgcctgcccggagcagggggtctgaactaccctagcacatcagtaccgacgtgcccgcctccggctcagcgggagcctgcaggggaggggcaagcacgggggcactgagggctgggtgggatcagaacggtgccaacctgacggtgcccgagaagcgcttgtccttctggggatcatagttcttcaagctgatctgcaactccaccgtctccaggaaccttcgagagaggaggggggttaagcacccgccggccctcgccacccgcgccgtgccccagggtcggcactcacttgcggcgcttgcgctggttcccgtgcaggacttcccgcaccgcctcgtacagggtgtcgcgagagactttgctgctgcgggagagaagcgacagggcgctcagggccgcggagtccacacgctcggactgcctggaagcctccgaggtctaggcttcgagacgggcgggcggcccacggcggactcccccgtagattccggacaccaagtagagcgacgggagctcagacccagacccaagccccggtggaagagggaggctctcagtgatcggacctggtaggaagggcgacccgcaggccgacccgccttgagaaatgccccgcggcgcaggtggcgcaagggtccgcggcgcggcctacaggatccgaaccctcggcggggcacctgaaggcgcggatgaacgcggatagggctttcaggaccaactcacctcatggcttctcacgccgcgctaaccggaaaagagactagcatgtcttgcgcatgcgctcaaatagtggccctgatctcgcgataatgctttgctcctcggtcctacccgcagagcggttgggtgggccaaccccgagaagcgcggccttctctggccgctggggggcgtcgctgggccgctaggccggcgcggtaacccacagagttgtcgcagtcctgagcgccccgcggtcccccggtaatgtgccgattcgcgcccgctgctgctggacccctagggaagcggctgggttcggggctcgagcttcggtagtcacacgtactggtacagcccagtgatgttcactgacagcgtggattccggcacgcttgtccctcaaacccctctcccctcgcgccctccgcaccagcttatgttctcaaaaggaagcctggcccgacctccctccctcagcaccttgctctaacgtggactcgtggtaagggaagtgtccggaaagttctgttcctgtcctttcaacgcctgcagaggggaagagctgggaaagtccttaagtgaactttcacttgatagttaatttgataacatctacgttttaagtgtgactgctatgaataaggcgtctagccaggtgctacaggaatacaaggatgtaaaacaggcacacagcactgcacacccataaggtgtcttctctgctctttcctctgtccaatgggtctcatcctcttagccacagtaacccccagagcccttcagatctctcctcggattcatctgcccaaaacccttcccgaactccagactgagtcactcccacctttaagatgcccattctcacctacccccctgcctggtgggggcagctcctataggatggggtgggtggtattacacattatttggccctcagagggtgaataagataccctacacccttcccctcaccaggaaaaagatgttccttgtcattgagcagggaagtggagggggtgcggatgggctcaatacccagaattcatgggaaggaaggtactgcttctaataagacattggccaggcgtggtggctcacgcctgtaatcccagcactttgggaggcaggcggatcacctgaggtcaggagtttgagaccagcctcgtctctactaaaaatacaaaaatgagcgggtcatggtggcatgcgcctgtaatcccagctactcaagaggctgaggcaggagaatcgcttgaactggggaggcagaggttgcagtgagccgagatcatgccattgcattccagcctgggcgacagtgcgagactcagactcgaaaaaaaaaaaagaaaaagacattattgaacttgcttttattcaacaccattgataaattattcaagtcagaaacaaaaacacagaaggtcataatatacatgagcacaagagcttcatctgagcccactggtaccccagacctcctggagcatcccatgcccactctgggtcggcttgatcctactgagccctatcggaaagtttgtccctgcagcctgagaattgatgaggagtgtgcctggggccagcagcctttggaaatatagctctggcctggtgtggtggctcacacctgtaaatctcaacactttgggtgccaaggcaggaagatcacttgagctcaggagttcaagaccagccctgaccagcatattatctacaaaataaaaaattagctgggcatagtgtcatgtgcatgtagtcccagctacttgggaggctgacatgggaggatcgagcctgggaggcagaggttacagtgagccatgatcaatcgcatcactgcactccagcctggatgacagagcaataccttctctcaaaaacaaaagaaatgaaaaagaaaatatagctgagctcccttagcccaggagcctccctgctggctgggaagccaatattccctatgcagcctgtaacagggaggcagttgcaatctgggatggccaggctcagcctttatcctcaggctagggctcaagacaaggtggtgaagaaagaaa

SEQ ID NO: 585734 - DNA, 4001 bp, Homo sapiens
caaaaattagcagggcatggtggcacatccttgtaatcccagctacttgggaggctgaggcaggagaatcgcttgaacccgggaggcggcggaggttgtggtaagccaagatcgcatcactgcactccagcctgggtgacagagtgagtctctgtctcaaaaaacaaaacaaaattaaattaagttaaaaaaaaaattagccaggtgtggtggcgcatgcttgtaatcctagctacttggttggctgaggcacgagaattgcttgagcccagtaggcagaggttgcagtgagtcgagattgtgccactgcactccactctaggcaagagtgagactcttgcctcaaaataaataaataaataaataaagctattaagcaatccagagaggatttaaactacataggcggaaggagtatagattatatgcaaatactacaaccagttatttatttatttatttattttttgagagagtgtctcgctctgtcgcccaggctggagtacagtggcacgaacttggctcactgcaacctccacctcccgagttcacgccattctcctgcctcggcctcccgagtagctgggactacaggagcctgccaccatgcccggctaattttttatatttttagtagagacggggtttcaccgtgttagccaggatggtctcgatctcctgacctcgtgatacgcccgcctcggcctcccaaagtgcagggattacaggcgtgagccaccgcgcccggcctactacaaccattttatataagggacttcagcagtctgagatttaggcatctgtgggagtcctggaaccaaccccttaaggacactgagagacaactatacctggtctgtcaaaccgttggggggagctcgtcaataccaaatgtagtccaacacatgcgggataaaactcaccaaataaaaattctaattactttctcttggttccccaccattacctccttctttgccaaaagtgcctgctttgcctgggtggctttgagggcttgataagccttcctctttttcaggagattttctggaaccaaagggatttttctttgcctgatgcagaaaattgagatcagagataacatttagaaaagaacacttggccgggctcggtggctcaagcctgtaatcccagcactctgggaggccgaggtgggtggattacctgaggtcaggagttcgagaccagcctgaccaacatggtgaaacccccgtttctactaaaaataaaaaatcagctgggcgtggtggcgcacgcctgtaatcccagctactcgggagactgaggcaggagaatcgcttgaacccgggaggcggaggttgcaccgagccgagatcccgacactgcgctccagcctgggggacagagcaagactccgtctcaaaacaaaaacaacaacaaaaaagaaaacgaacattcaatggatttccaaaccaattcaatatcctgggctttagggaacattactgttttcaagtatctgaagaaagattcccctgaaacctgcggtttctgactccaggcctcataaatccatccctaatagtcactcatccccaaagcctcggaaaataatgaatcctttagcctctgggttcgtataagttaacagggttttcacggccacagttcttcataggcactagcagcgacgaatctatggggttggggcgggggcaggcctatctgcagagttaacacttgtcgggctgggtgaattcaactgtggcactccagcccgctgcctgaagtcaatcctcgcctctccagataacccgaacttgaccgcggtcccctccctcctccgccacagcgctactcctcctcacccccaccctttgtaaactgtggccttttctattcctagagcccacaggaatccgccaccaaggcataaacaccgtggatggcaccggatactcaagaccccactccagatattcaaagccccaaacactcactcttgctccgccatctttctagtggtgcagctactgatcatgcgcaaccccaccacatggggaagacagcacacgctctgtttacttgaccatagagacgtctgttctagctcacgctggaggaccagtcagcgttcacttagccgcagtgagcccttgaggtcccgctaaccccgattcctgccaaaagttgcaccgcttcttagggtttttagagcctgtgttattttcaaaacccagcccttttcttgtaagttacagtttcatcacaagcggcctggctgtggacagcaaagtgcttcccacaatgcacctatggcgtccgctcctagctacggcgccgcacttccggcgcggctgtgctgcgtctctggggaggaagacaggcaaactccgcgaaacattttcgctctgtggaaaaacttggaggctatggctttggctctcacgtgtaggtggaagtgtttgttgaggacttagagtggtaaagcaggtagctgcaattccgtctgcttggccccgtcgatgcgtccttgaacacgttatttaacccctctatactgcggcttcattacccataaaatgggtgtacagtaataataggtctacctaatggcgttacgaggattacaggagattagataaagcgtttagcagtgtctgtcagcactatgtttgttactattactgctggaccgaaaactacaacatgcttccttcccgtctaaaaccgttacacaggccgggcgcggtggctcacgcctgtaatcccagcactttgggagggaggccgagacgggaggatcacctgaggtcaggagttcgagatcagcctggccaacacggcgaaaccccgtcttgggcggaggttacagtgagccgagatcgcgccactgcccaccagcctgggcgacagagcaagactccgtctcaaaaaaacaaaaagaaaagaaaagaaaaaaaaagaataaaaataaaacccttatgcagctctcatcgcccggaatttgcgttcttccctcccagtctatatagaatcctgaaaaacagtaggtcgggccggtggctttcacctgtaatcccagcactttgggaggccaaggcaggtggatcacttgaggtcaggagttggagaccagcatggctaagatggtgaaaccccgtctctactaaaaatacaaaaaattagctgggcgtggtggctcgcgcctgaagtcccagaaggcggaggctgcgtgagccgagtttgtgccacttgcactccagcctgggcgacagagcgagacagtctcaaaaaaaacaagaaataaattttttttaaaattaaaaatcctgaaaaacaacacaagtcttatcatctctggaaacctccagagcagcgcttctcaagcattaatagtgaataggagtcacctgaagattttactaaaatacagatttttattcaggaggccgggtggggagctgatattctgctttttttttttttttttttttgagatggcgtctcgctctgtcgcccaggctggagtgcagtggcgcgatcttggctcactgcaagctccgcctcccgggttcacgccattctcctgcctcagcctcccgagtagctgggactacaggcgcccgccaccacgcctggctaattttttgaatttttagtagagatttcaccttgttagccaggatggtctcgatctcctgacctcgtgatccgcccgcctcggcctcccaaagtgctgggattacaggcgtgagccaccgcacctggccaatattctgcatttttaacaggcttcagagtgacgctggtgctactggtctatgggctgactagtaagactctagagtagtgtctgatttccctcaggacattattatatttttaatatttcttccacatgatactagggggggcaggaaccatgactgcttactcatcactgatcctaaggatctagcaccaatttctcgattttggcactattgatactgatactggtggcagctaaaggcctc

SEQ ID NO: 585735 - DNA, 4001 bp, Homo sapiens
cccttgtttaaaaacagcagcagtggcatcattctctccagctcttcagtcagcaattatggctgcccaaacatggaatgccctaaggtggctcaggacattgatagggaactggggccatggccttggaaatgcaagctgctgagtgaggccaagtggtctatggaaatcacgatctccctgcatggtgggattacaaaggtgaccaagaaacacagacagaaacagaagaaaatggaattaagagttgaaatacccacagaacagaatcatggaatgtaaaacaagtaaactttatttgggagatggggtgaatccatcactggttactggaaccctgagtctgcattttctcctcaggaaggcggtctgaaatggagtgggctgtgtttggcaagggttgtagtggtttggaatctgagtaaatgagcagaatcagagaaacagaattagttttctgactgtggtacttctcacaccaacccagaacctgtccatgtgtcctcttcactctacgttctccattgtccctatcctctggggtgtcctccattttctccctcacctctcacctgcttggctcccgagctgggcctcaggcctgtctccccagagtaaatgcccgggatcattgaggaagcgttggctgcgctggcatgttaggcaggtctgtacggtccagcgctgtcccctgcagcctagggtgaacatgggaaaaagactgtccacgtttagaagtaacggtctcttgctgccagttttgcctccagtgtttttcagtaggtatccccgctcccccaccacacccccaatttgaatgcacatttgatggtgtcaggcctcggcataagctccatcgatttcctggaactctttaagataaagttcaaactccctaacaagacttcaagaactggcctgtttccccctccagtctcatgttttgccctcctacctcaaactccagcctcctgaactctcatttctttgacagcaccacaagctctcttgtctcagagtctgcacacatgcctagaatttccatctctcactccctttgcttatcataaacttcgccaccactggcatgagtaagtgagcattctactcccccagttaatctttttctacaccattttgtttcttagtctgtcccatcagaccgtaatttcaatgagaataatgaatctagcacagtacctgacacattttagaaaataagtatttgcttaataaatgaatggtgatgggaatcgtcctccacaaagccgaacaacatctattattgtgcatgggtggggttgcctcttaaaagttattatttattgcccacactggaagaaaaaaaaaaaaaacagccgagcccaaaccctagtttgtgcaagtggcgttaggaacttaatccaaacccgaagaaggaagactcctgcgaatcccacacccaacatccatctacagtgagaaaggcgctgttggcctccagtgcccgccccccaccccgcccccctccgcgcccccaatgctccgcagtcttccacctccgttggagcactcacgtctctggcgctgggtgcaggtgaggcccgggacgaggagggaagagcagcctcgacagagagtcctcttcaccgagggatccctgggggcggaggaggatagtggtctggcgcccgcgctccctctcgcgttcctcccgcgtcccgcccgccgcccgccccgtggctgtctcaccgccgcaagacgagccgcttcgcaatggtcctctcagtgtagcagtaaaacctcgccagcgcctggttctcggggtcctgggcaaggacacaatgggcggcctgcgggaggggagcagtcactctgggacgccgagcaccgtccccgtggggcccttgtcgcagactcacctggtacaggaagttgagcctctggaaggcctcgcggtccttcaccggccccgccatcaccgccgcgctccagggcctcccgcagccccacccctcgcacagccccgcccgggcgtccgcgcgaggcctcctgggaaacgtagtccccgcgccctcgggagcctcccggaggcctcacaaactcatcggtttctaaacacaaccccagcaatccatgcccagggtccctttatgaattttcagtgcttttgtcttcctcaagctcatgaccaattatatcacctagagacctagtggagcaggtgaggatcttaaatcggccattttcaggacagaaggctggtctctttatgtagctacgttggggagatggttatgtgcaatttatacccagctagagcttctgccctactctcctgaggtccgaggcagatgcctgtaagatctacagacggaaggcacagaggtaatacattaaaaaaaagcactggtgccagtgggggtgaaagtgggaaggatcatgagggtgctggagggagggaaaaggactcccggtcctcagaaagcacagtttactcctactattccacctaccaaagaaacacacttcctgttatgcagtgctggacacacagtaggtgatcctcactttctgagtgaatggtttctaactcctaggcttaggtacagcacagaaatctgtcaacagcatcccctgcccctgaaacttcaccccactccccacactgacattcacctcacacccctccctctgacctcttctatcttccagttcttctgtctggtgtcctgtgactcatagtgactatcagttactgaagtcagaagcagagggacatgaattggaggggtagaagatcaatgaaccctgagatggggagggcagcataagtcaggagaggatgacttctctccaatttcagacccagtgccaggcggggacagacaagcagggctccagctgggaggaaggacatggctgaaacctcctctggaactagtttcacaagggttttcggactcaaatgagagtggtgtgtttaaaatgtagatgtaggctgggcacggtggctcacacctgtaatcctagcactttgagtggctgaggcaggtagattacttgagttcaggagttcgagaccagcctgtccaacatggcaaaaccctgtctccactaaaattagccgggtgtggtggtgcatggctatagtccatagtaatcccagctactctggaggctgaggcaggagaattgcttgaacctgggaggcggaggttgcagtgagctgagatcaccactgtactccagcctgggcgacagaacgagactctgtctcataaataaaatgtagatgtccggcccaccccagaccttgactaaccactaagggtgagacccaggaacatgcatgtctaacacccagtgattcttacacatcagtacaaggctgtcaccaaattaccacacaacacagagatcacttcagtggatcctttgttccatattattttaaccaaccaaagtatcttgccacaaagaaccacagtcaaggcacaaaggtaagaggaggagagtctggacaaagtcctgttgaggtggtaggaggaactgaaatgccctcagtaaactgcagattcttctctcagtcatttctgtgaagattacccgaatagcagataatccaaattggtttagtttggtttggcatgcatcacttttaccttttatgacaacatatgtaccctataagttgtttattttggcctaacatgaaaatcatttacattctctgaaaagggaaatggcaaagggtgagggatggcaacaaacaagcaaaagcctggcttaacaccagttccaggccagatgcacacaagccaaatgaagttgcctatctggcccttccctatataccaccctcttccaccctgtccttagggtgagaaagactccataaccttttttcctttctggcttggacaccttggccaggtaagaaggctgacaatttgggagtagctactaagtaacattctttaaggccagggctttgtatacaaatacccttctctttcctc

SEQ ID NO: 585736 - DNA, 4001 bp, Homo sapiens
tccagccttgttcacagccatttcaggtttttcttacctttctttataaaggtactgatgaattcaggtgtaattaattcatgaagaggtaaattcttcacaaagtaatagggtccagtgttcatgaccaggtttttcagttcttccgatagtatcccacattcaggaatgagaaatgaaacctattggaatgtgtaatacaaacaaggtcttacttccatgaagatgaacacccaggtttttaggaatgaaacaaaatcatgaaagttgttatttctccacgagtttcactggaacataaaaacacgggcaacaaaactcttatgttaacttacctatctcaggcaaagagaaatctgactacttaagtttttcatttctgcattcaaacgtacagtacaggaaggggattgaacagaatacttttaatggaaaactcgtgcttgcatttaatcttttgcaaattagcaatgctgtatattttatgtcctgttcctttcactattttattttcaaggaaatatagtataattgaatatcccttgatttgtttaccctggtgttatcctggaatgaaacaaactatctgtcggggcataaggaattaatttatggacatccaattactaagaatctatgtgcaagcaatggtgctcctgtatgttttcattttcgagacagaaaaatgcaacaggcgagttaaagtatacatccctgactgctgtgatgagcttgacatccaaaataggtgttaaaaacagggcaggcttcaaatgttgccacattgtaaaagtcatcactgtcccaaggctcaaacaccagcctgttctgactgatcaggtcaccacttaacatctctgaaacactgctcagtcaaacctgagttattaagctgatccatttaaagtgtaaaatgtttaatcccccatgataaggttagtttcttgaagtctctcagatatcaaattagttccaacaaccaatttagaaaatcagtcgcttcggccgggcgcggtggctcacgcctgtaatcccagcactttgggaggccgagacgggcggatcacgaggtcaggagatcgagaccatcctggctaacacggtgaaacctcgtctctactaaaaatacaaaaattagccgggcgtggtggcgcgcgcctgtagacccagctacacgggaggctgaggcaggagaatggcgtgaacccgggaggcggagcctgcagtgagccgagatcgcgccactgcactccagcctgggcgacagagcgaaactccgtctaaaaaaaaaaaaaaaaaaaaaaggaaaatcagtcgcttcctgggccgagcctaggcaggatgctctggtgagatccacaggtacgcaggtgggagagggattcaagctggggaggaggcagtggtggggaggaggcgcgagacccgccctgatttggggaaaaagcgaggtgcacgtggctgccccacagcctaactccctggtcccggccctgaacctcgaatccctccctggactcactcccagttcggcgggttgacacgagtgagcagccagaacgcccctgacaacagctccctccagactgggtaccgcccccacgcccggcgcatcctgggagttgtagtcctgtagccctgcaagccactggcttagagcagttaagagactacaactcccagcaagccgggcgagggccccgcccctccgcgtaccgccggcggccccgccccgcgaagcctagcactctccccaaacctctctcgcacgcggggactgagcacggcccgaaaagccgaggacagccggactcaccctgtagttatagtagtgcgtctgcacaagatgccggtggcgcgacttgtggttgccgaagttggatttctcgcaaaccagtaagtgccgcggcgcctcccgaagccggcgcagcgtggccatgctctcctgggttcctggtcctcccggcctccgctggcggggcacgccccgccccttcctcccgccccgccccttccctccggccgcatacccgctgctgtgcgcccctggcggcggtggagtggggatggcggcgctggatttctgagcagttcttagacttcttaggagcccacgcagccgctctttggtggatgtctgaagctgtaaattcactgtcccagtggctgggaacctggctcttgccttttcaacgccacttttcctccgtccccgccatcccttggaattgccctaaaccctctctgtgggccccgcctcggagcgccccttggaccccagcctggcgccggcgcatacctcggtcaggcccctcagagggaccgcttcctgccaccgttataaaaggaaaacatcgcatggaaaggcccagttcctttagtatatggtcaagaaatgtagccgcacagttaagtaaccccctaagctgctttgggggccacacccagctgctttctgacttctcacactgtttggttcacaggactctgttacccattggggacctcttggccattattaacacaggccaacaggactaaaagtttgtatcagtccttcccaaaacattagggaaggttgtgcgggaaggtaaagcacaatttttgccttacaataggactcctttgaaactactattgagttcccttttaaatagcccttcagaaccgcttttaataatgtgttgtttctgggggttaatagtgataattctcctaagtcatttttccatttcgtttttctgtcacgggcttggagcggttaagagactgcggctcccagcatgcggtacgttactgatcagggcaaaatcaagtatgttactacatgcttctcaaactagagaggcacagccccaattctgcactggcaggatacaaaacagcagaatattggtgatacatcttcctggaacatcagtttttctatgagatgtggaagaaatggaattaagtagtttacaaggtaaataattaagaatttaaaactaagccagtcacagtgggtcatgcctgtaatcccagcactttgggaggctgaggtgggaggatcacttgagcttaggagttcaagaccagcctgggcaatatagtgagaccccatctccaaaaataaaaataaaactaagacaaggctggaaagtcatctgccattataaacatcagtaatctggccgagcacagtggctcacgcctgtagtcccagcactttgggaggctgaggtgggaggatcacttgaactcagaagttcacgaccaccctggacaatatagtaagaccccatctcaaaaaaaaaaattaaaactaagacaaggccggaaagtcatctgccactaaaaacatcggtaatctggctgagtgctgtggctcacgcctgtagtcccagcaatttgggaggccgaggcgagcagatcgcctgaggtcaggagttcaagaccaccctggccaacatggtgaaacgctttctactaaaaatacaaaaattaacagggtgtggtggcgcatgcctgtaatcccagctactcaagaggctgaggcagaagaatcactcgaacctgggaggcagaggttgcagtgagtcaagatctcgccactgcacttctaggctgggcgacagagtgagactctgtctcaaaaaaaaaaaaaaagtcaaaatgtaatctatgactgaaatgtcacattttctttccaaggaaaaacctaatgagaacctgtttcccattattttaaacagcagaattataaggcgtggcaagttaattaaaaaaaaccctactaatttcctagatcacaatatggcagctagatgttttataaataacagctactaataacatgttaagatgtaaaaggcttaaagcattgcttcttggtcacctcatatttaatgtaattgtcaccagacagttgctttgtgtgtggtagcagtggcccaagactgaaacatcacggatgtacctctcctttgtcgacattccaaaactccacaaagtgactggtg

SEQ ID NO: 585737 - DNA, 4001 bp, Homo sapiens
gagcaagactccgttaaaaaaaaaaaaaaaaaaaaaaaagcaactgtgagctagcaatgatcccaagaatcagaagataattctcctcacaccacacatgcatgcatatcctttcacatcgtggtatacaccatccgttctccactccagtttctaatttcttctcctgttggcaagaaaactacaacactcttgtttctttcgaggtggtaaatggctttgctttggacttctcgggaatagtacaacgcactctgcgggaaaagttactcaatattctataccacatgtatctggatgtttgtacaggtgtgggtgaagaaagtgacagactatctgtgcttaaggccatctcatggatggcctgaagaactgagtctagttctattccaagtcccaagccatgggacaaaggttctagcacttgaccaaatgcctgcaggccagagccctctaaagctgacatcagctaagaatgcttttgtcccttacacaaaagaaactatcttcaaatagctgaagggatttgtgtgggaaccatacctttaggccgaggcctgccagtctctggacggctacggcgtagggtggcaggcacaatctccgggggcagatgaaggtaatcacggagatactggataccctcattggtaaggtaccagtagaaatgtctccaggcaaactgttccttcacgtagcctcgggacttgagagactgtaaggcagaaaactactgttaaggcgttaagtagaagcttggatcatcctaggcaagtctccagtcccagccagcccttcaagttagcaagcagcccccgcagtcctgacctccctttttgaacttgccttgaaccttaggggaagatccctccatcccattccatcccatcccgggatgggatcccggggaggaagatccatcccatcttcctcctcaccctcctacctgcatggccttcatgacatgaaggttgggcacattcttgtctgccagctccgggtgcttaggcatgtggacatccttcttggccaccatgactccctccttaaaaaggagttcataaatggcaatccggttcttcttaggcatcaacatctgcaagaaggagacgattgtcaagagcacttctgagtaacgaggccggggcccggtaatcaagttcttgatcctaaagtgacccacacaaaaccgtagacaacatgctggtgggaagactcaactccacaaaacagattcggcagaggccagctccgtcagtccccacccccaaacacaattcaggtggaaaagttgacagtatgttaaaaccaggatagtggtgcacattcgcgccaaacttccttaagttctcatcaattacaaaggtcaatgggggggagaggagcaaaccctgtattatcgggagcagttggaggccatcagcgaccgtacccagcgcggaatctcgcggctgtaccataaggtacgcagggaaggcccggaggggtaaagccccggcttcttgaaggcggcagaccccaaaccaaagggctaaggccttcgcaccctcgtctcctacctaccacttctcccccaaactagagctccagtgccaggcaaggaggcagtcgggggagtcctgttcccaagaaaaaagcgtgtcggtgggacaccgtctcgctagtctcacctggcaagtctccgccactcactggcttcatcctccccctctccctcggacaatcttcgcctaccagcggccccctaccccataaaataagcctccagcccctatcgctactcagaaatcggtgtgtggggagtgggagagaggccccctgcccgcatcctggggagaagcagccgctaaggcggcaggatagcccggatgggagccgatggaactcgaacgccacagaaactcacctctgcggctgcagggtccggtaccggggctggaaaggaaggagcatgcgcggtgctgcgtctcttccgggctggcgtggacccgccccccgccaggacccgcggggagcctggggtggcctcggcggtgcctgaagaactggcggatctgaccacggagcctgaccgcctgagggactcacgcacgcactaggaaaccgccgccgggaacttctgagcttgcgtgctctatcagtacagggtcacttattttgggctgtcgttttagaaacgcttcttctttttttcccggccaaaatctattatgcaagtgatatatgctcttggagcaagaaaagagagagaacatataaatcagatgacgataaaagactaaaaacataatcccatcaaccaaagaaaatagctattaacattgtggtatacacttttccaaattcatatgcactcacacaagtagactttttttttttttaataaaaaacagaggccgggcacagtggctcacgcctataatctcagcactttgggaggccgaggtgggcagatcacaaggttaggggttcgagaccagcctagccaatggtgaaaccctgtctctactaaaaatacaaaaaaaattagccggcgtggtggcgggcgcctgtagtcccagctactcgggaggctgaggcaggagaagcgcttgaacccgggaggtggaggttgcagtgagccgagatcatgccactgcactgcagcctgggcgacagtgagactctgtctcaaaaaaaaaaaaaaaattgactcagcattttgggaggctgaggcaggagaactgcttgagcccaggaggtccagactagcctaggcaatggtgagacttcatctctacaatttttttttttaattaactgactgtggtggtgcacgcttgtagtcccagttattgaggaggctgaggcgggaggatcgcttgagccaggaaagtggagggtgcagtgagccgggttcgtgcccctgcagtccagcctgggtgacagagcaagaccctggctctatttaaataaaaaaaaaaaaaaaaagaggctgggcgcggcagttcaagcctgtaatcccagcactttgggaggccagggtgggcggttcacctgaggtcaggagttcaagaccagctggccaacatagtgaaaccccatctctactaaaaatacaaaaaaattagccaggtgtgttggcgtgcgcctgtaattccagctacttaggaggctgaggcaggagaatcgcttgaaccccgtatgcggaggttgcagtgagccgagatcactccactgcactccagagcttgggcgacagagcgacactccgtctaaaaagaaagaaaggaaagtggggccgggcgcagaggctcacgcctataatcccagcactttgggagcccgaggcgggtggatcacctgaggtcaggcgttcgagaccagcctggccaacatggcgaaatccgatttctactaaaaaaaaaaatacaaaaattagccaggcatgttggcgggcgcctgtaatcccagctacttgggaggctgaagcaggagaatcacttgaacttgggaagtggagcttgcagtgagtcgagattgcaccattgcactgcagcctgggcgacaagagcgaaactccgtctcaaaaaaaaaaaaaagaaaagaaaagtggaccgggcacggcggctcaggcctgtaatcccagcactttgggaggccgaggtgggcggttcaccggaggtcaagagttcgagaccagcttgaccaacatagtgaaaccccgtctctactaaaaatacaaaaattagctgggcatagtggtggatacctgtaatcccagctactcacgaggctgaggcaggagaattcgcttgaacctggaagacagaggttgcagtgagtcaagatctcgtcactgcactccagcctgggtgacagagcaagattctgtctcaaaaaaaaaaaaaaaaaaaaaaaaattagccggacatggtggcgggtgactgtaatcccagctactcatgaatctgagttttgaggattgcttgagcccgtgggtcaaggctgcagaaccgaga

SEQ ID NO: 585738 - DNA, 4001 bp, Homo sapiens
agagttttgtaacaaagaaccataacctagataaaatacaggccaagcacggtggcttaccaccgcactccaggctgggcaacagagcaagactccgttaaaaaaaaaaaaaaaaaaaaaaaagcaactgtgagctagcaatgatcccaagaatcagaagataattctcctcacaccacacatgcatgcatatcctttcacatcgtggtatacaccatccgttctccactccagtttctaatttcttctcctgttggcaagaaaactacaacactcttgtttctttcgaggtggtaaatggctttgctttggacttctcgggaatagtacaacgcactctgcgggaaaagttactcaatattctataccacatgtatctggatgtttgtacaggtgtgggtgaagaaagtgacagactatctgtgcttaaggccatctcatggatggcctgaagaactgagtctagttctattccaagtcccaagccatgggacaaaggttctagcacttgaccaaatgcctgcaggccagagccctctaaagctgacatcagctaagaatgcttttgtcccttacacaaaagaaactatcttcaaatagctgaagggatttgtgtgggaaccatacctttaggccgaggcctgccagtctctggacggctacggcgtagggtggcaggcacaatctccgggggcagatgaaggtaatcacggagatactggataccctcattggtaaggtaccagtagaaatgtctccaggcaaactgttccttcacgtagcctcgggacttgagagactgtaaggcagaaaactactgttaaggcgttaagtagaagcttggatcatcctaggcaagtctccagtcccagccagcccttcaagttagcaagcagcccccgcagtcctgacctccctttttgaacttgccttgaaccttaggggaagatccctccatcccattccatcccatcccgggatgggatcccggggaggaagatccatcccatcttcctcctcaccctcctacctgcatggccttcatgacatgaaggttgggcacattcttgtctgccagctccgggtgcttaggcatgtggacatccttcttggccaccatgactccctccttaaaaaggagttcataaatggcaatccggttcttcttaggcatcaacatctgcaagaaggagacgattgtcaagagcacttctgagtaacgaggccggggcccggtaatcaagttcttgatcctaaagtgacccacacaaaaccgtagacaacatgctggtgggaagactcaactccacaaaacagattcggcagaggccagctccgtcagtccccacccccaaacacaattcaggtggaaaagttgacagtatgttaaaaccaggatagtggtgcacattcgcgccaaacttccttaagttctcatcaattacaaaggtcaatgggggggagaggagcaaaccctgtattatcgggagcagttggaggccatcagcgaccgtacccagcgcggaatctcgcggctgtaccataaggtacgcagggaaggcccggaggggtaaagccccggcttcttgaaggcggcagaccccaaaccaaagggctaaggccttcgcaccctcgtctcctacctaccacttctcccccaaactagagctccagtgccaggcaaggaggcagtcgggggagtcctgttcccaagaaaaaagcgtgtcggtgggacaccgtctcgctagtctcacctggcaagtctccgccactcactggcttcatcctccccctctccctcggacaatcttcgcctaccagcggccccctaccccataaaataagcctccagcccctatcgctactcagaaatcggtgtgtggggagtgggagagaggccccctgcccgcatcctggggagaagcagccgctaaggcggcaggatagcccggatgggagccgatggaactcgaacgccacagaaactcacctctgcggctgcagggtccggtaccggggctggaaaggaaggagcatgcgcggtgctgcgtctcttccgggctggcgtggacccgccccccgccaggacccgcggggagcctggggtggcctcggcggtgcctgaagaactggcggatctgaccacggagcctgaccgcctgagggactcacgcacgcactaggaaaccgccgccgggaacttctgagcttgcgtgctctatcagtacagggtcacttattttgggctgtcgttttagaaacgcttcttctttttttcccggccaaaatctattatgcaagtgatatatgctcttggagcaagaaaagagagagaacatataaatcagatgacgataaaagactaaaaacataatcccatcaaccaaagaaaatagctattaacattgtggtatacacttttccaaattcatatgcactcacacaagtagactttttttttttttaataaaaaacagaggccgggcacagtggctcacgcctataatctcagcactttgggaggccgaggtgggcagatcacaaggttaggggttcgagaccagcctagccaatggtgaaaccctgtctctactaaaaatacaaaaaaaattagccggcgtggtggcgggcgcctgtagtcccagctactcgggaggctgaggcaggagaagcgcttgaacccgggaggtggaggttgcagtgagccgagatcatgccactgcactgcagcctgggcgacagtgagactctgtctcaaaaaaaaaaaaaaaattgactcagcattttgggaggctgaggcaggagaactgcttgagcccaggaggtccagactagcctaggcaatggtgagacttcatctctacaatttttttttttaattaactgactgtggtggtgcacgcttgtagtcccagttattgaggaggctgaggcgggaggatcgcttgagccaggaaagtggagggtgcagtgagccgggttcgtgcccctgcagtccagcctgggtgacagagcaagaccctggctctatttaaataaaaaaaaaaaaaaaaagaggctgggcgcggcagttcaagcctgtaatcccagcactttgggaggccagggtgggcggttcacctgaggtcaggagttcaagaccagctggccaacatagtgaaaccccatctctactaaaaatacaaaaaaattagccaggtgtgttggcgtgcgcctgtaattccagctacttaggaggctgaggcaggagaatcgcttgaaccccgtatgcggaggttgcagtgagccgagatcactccactgcactccagagcttgggcgacagagcgacactccgtctaaaaagaaagaaaggaaagtggggccgggcgcagaggctcacgcctataatcccagcactttgggagcccgaggcgggtggatcacctgaggtcaggcgttcgagaccagcctggccaacatggcgaaatccgatttctactaaaaaaaaaaatacaaaaattagccaggcatgttggcgggcgcctgtaatcccagctacttgggaggctgaagcaggagaatcacttgaacttgggaagtggagcttgcagtgagtcgagattgcaccattgcactgcagcctgggcgacaagagcgaaactccgtctcaaaaaaaaaaaaaagaaaagaaaagtggaccgggcacggcggctcaggcctgtaatcccagcactttgggaggccgaggtgggcggttcaccggaggtcaagagttcgagaccagcttgaccaacatagtgaaaccccgtctctactaaaaatacaaaaattagctgggcatagtggtggatacctgtaatcccagctactcacgaggctgaggcaggagaattcgcttgaacctggaagacagaggttgcagtgagtcaagatctcgtcactgcactccagcctgggtgacagagcaagattctgtctcaaaaaaaaaaaaaaaaaaaaaaaaattagccggacatggt

SEQ ID NO: 585739 - DNA, 4001 bp, Homo sapiens; identical to SEQ ID NO: 585737

SEQ ID NO: 585740 - DNA, 4001 bp, Homo sapiens
ccttaccttaattaggttgatttggtgttcagcacaaagggcctccaccaacttgacatacataggctcatcacagttggatgcaagcacacaaagatgggcttggcgcctgaaattcaaattacaatgaaaatggagctaaaactcagatccaaatccatcattcttgcattttaggagggttatctttgcactaacacttgcgaaacataagcagccaatccactgaacacataaatgcgtacaaaattgcttgagtctgaagaacctgctagggagcatatacatcttcaattaacctacaactggtcttcagtaaaacctctgtccctgacacactgaattggtgtaagtcatttttaaaacttctggccaaaacccaaccataatagctttcttgtaagccagcttcatatacctaaagaaacatgtgaaaggccgggcacgatggctcactcctgtaatcccagcactttgggaagacgaggggggcagatgacccgaggtcaggagtaccagaccagccagagaccaacatggcgaaaccccgtttctactgaaagtacaaaaactagctgggcatggtggcgtgtgcctgtaattccatctactcgggaggcagaagaatcgcttgaacctggtaggtagaggttgcaatgagatcgcgccactgcactccagcctgggggacagagcaagactctttgtctcaaaaaaaaaaaagaaaaaagaaaaaaaaaagactgtggcattaatggaacagttatgaaatgccatgcaataatgccgaaatagaaatacagaagactcatactaggacctactaaatacattaaacaataatgccgtttccatcggattgaactggctagattacaccaaaacgaacttgtcctgtaaaaccttaaaactgcatttaaattcagctcaagagtaggttgatttgtcaatgccaccaccctaaaaaacacattaactcgatccattcaaatacattaacaaatatcccaaattcaaataaatcacagctattatactactaaattcatctaggaccaaatgcttctgaaacctgagtttgaaattccattaaattaatgcttgttttgcaaactaccagatgtaatgtggctctccatctcatctatctgccagataagtataagactgactagctccacaacctacaggtttgtcagactcttatgtttcactcataaaaggagtgaaggggtatccgacaattaaagtcatcattcaaacactgtagttttgagtgcttatccccattccaaacagcaacccacacattttaagtgggctttatagatctgagttctgataccttttcctaggtttccggtaggacggatgccattcagaacttttgcgctaacaccatgaactccatgccttcttcccttgggtggcagttttgttccggttgcaagaacccacagtattgagactgatacacgtacttgtctaaggctttggcagcttcgcgaattccacgtgctaggccatcgtggatgagggcagtcttcagaacctcttgtaaagcagtattaacgtccattacacctccagcagcaatgcttaaacgcgacacatcagaaccatcagttaaaatcctcacaccacataaggccttgcactcagcaaaagctaagtgtacaacagacgcgcttacggcgacccgtttgacccagtcctgttccgccagctctagccccacgcctcagccgcaccccgaccccaactccaaccccggcccctgggctcacccttcctcggccatggcggtgggttacgggtgaagttgaatcttgaacgcactaaaaaacaaaagcattgacttgttaaagaaccagatactcgtcacgaatcccagcaagaacgcaacgagccacaaattataaccaatacacccccctgccgcctcgctcaacttaccccaagcctccgcctccgcgcgactcggcggcggcagggaaagaggcctcatccgcacgcatgccggtatttaagggtttttcaggtcccctgtgcgcatgtgcactcccaccctcgaaagaggtggctcccgcagtgccgggcctggggagtttctgtttccggattgaggcggttctgaggcaaacgtactgcgagttttctatctctgccaggccggtccttggcgagtgcaacaggcactacgcgggcagcttcgcgttgtccttctttgcggaggcgtggcccaccgaggcccagggaactcattctacggagcgcgacagaagccaaacaagtgtgtccgcgtgttctttaaggcacctagagccctgtatcccgccgagcgccagttttaaccctttccacaccacgttctactttcctgttgcttctacaagacccagcctccccaggcagcgcactttgttccttcgcttctaagtcaccctgagagaccatgtttgtgtcgttgtgggtgtgatcctcatctttgtcttcatgaaacgagagcctacatgctttcactcttccaggctggagtgcaatggcgcgatctcagcttactgcgacctccggctcccggtttcaagcgattctcctgcctcagcctcccgagtagccgggattgcaggcgcctgccaccaccctggctaattttttgtatttttagtaaagacgggatttcaccatgttggccaggctggtctcgaactcctgacctcaggggatccacccgcctcggcctcccaaaatgctgggattagaggcgtgacccgccgcccccggccgctttcactatttctaagccctttccctgcggtgtgttggtaaagcggaaccctgcagccaggggtcaattctagtttctaagtatagcgggagtcgcttctgaacgaagtttgttctgctttgtttggtttttaacgacgcgttgtgctcggaatacacagttccgcgcaactcagaattcctcaggtgcattttcaacacctacaatgtgcctgacgcagggccaggtcctgggactacagacatgaaatatccagtctttgaggagtccattttcttccaggaagcaatattttaaatttggaagtgattggccattccccaatccccacttccaaaccaaacgcacgaaacactactgaatatgatcaatactgcctttgtgtttaatttcctctcctgggtagtcagccgccaaaccagtgagcaattattaggcgcttggcacgtgccagcgctgtgaatccagtgggcagatactgttagactggtgagtgcagcgaaaaaaacaaaaatgggtaacgcagtaagagcaccagggagttcaccagaacagagacctgctgtaatgttaataaactgatagagttcagtttactgatagagttcagttttagattttccgctggtttcagtttcatttttaaagcgttgaagctgcttctctgtcagtaactcatgcaaatgtttattgagcttttgatttaaaaaaaaaaaaaaaacgaggaatttataaagatgattcattcctgtagccctggtttgtttgtggtgggattaagattttagacaaaaatcagaatacctcagggccacagaggagatacaaagtggcagggggttagggagtggggatggtgtgaaaaggtaagaggacctcaggcttctggcagcattcgaaacaggctcaaaacaaaaactaagagattccaaatcggtgagcatggaaggagaggagggtattctaaatggatgaaagtgtaggggcaaaggcatgaaatccttcttgccttttttggaggttataattaacacgtttgtatttttgaaagagaatgtggcaaatagtctttcagcgcatttctcattatctaaagacagtacagttgatatgctaagcatattagattccttccccaaacaaatttttaaggaagaagcagggaatttgggaaacctaagtgaaaacattcactgccaaacagcatatttat

SEQ ID NO: 585741 - DNA, 4001 bp, Homo sapiens
cgtgtgcctgtaatctcagctacttgggaggctgaggttgcagtgagataagattgcaccattgcactccggcctgggtgacggggtgagactctgtctcgggataaataaataaacatgaccaagggtcaaattattaggttgattcagaagagagcagggtctttcaaatttattaattaaatgacgaggtttcaccatgttgaccaggctggtctcgaactcctgacctcaggggatccgcccacttcagcctccgagtgagccactgcactaagcctcaaatttaattatatgtttacaagtgaaaagatttacttcaaaatgggtgtgggaagagatatagatgaaataagatttctaatttttagttagatacatccatgaaggttattctctattacacttatgaatgctgcacctctacttaagcctcacagccggtctctgaaataagtacagtatttcacactgccttattagtttcacagagcacccaacagaaggaatttccctctacaaattcctcaacagagccaacagtatccctactactatccattccctaacgtcgcctaagtacctaccatgcaacagaagccaagaagacaggcctagccctgcacgcatggacacatactggtaggctatttccacaactaactacacattctgacttaagggaaaaaaaaagaacgttatgtatctagaaagccaagaattcattaggtttgtggagagaaatactcaagtgaaataatattcttgcattcattgattcgattcttaaaagccaaagaaagatggatgtactccttcacacttcgacaggaaaggagtgtcaattatggctcatctgagtaaatgtcccactcagacttcttccaccctccatctacaggcttcttcacactttttatctgttggtatttctacttatccctcaagatgcccaataatcctccaattctcagggaatataaatttcgcaggaagggttgctgttatgatggtgggatgggtaaagaaaccgaatctagaagaaatctcacaagctcgtggttcaggaaaatcttagcgaattcgggtgagcaaccatacctcctccccacttccccaggtgaaatgttttggcttgaccttagaccactatcttggctttaatcacttattttctgtggtaaatgctaaaggggtcagtctctccctaaaccactttcttttcttaatccagcagtcaaggtgatctggatgagactcaagtctccccagccttgcttcatttttgcttatgtcttcacaacccaattctcatttacattccctattccttaccctacttcacttaccttaatggcagtgatggcaaaggctattttccgccgcccatcgatgttggtgttgagtactcgcaaaatatgctggaacttttcagggatcactagagactagttgaaaaagtacgggggaagaaatcagacacagtaaactatcaaacagtaaggccgataaggcaaacgaacttcatacaaaaaggttaagcctgtcacacaagtggcaagacacccgccccccattccttaggttttcacaccacagagcaaactcctcagtcctgcagagtaggcacatgaagcgttcaagcttgggaaaatgcaacctctggagagaggaagcaggtctcctgcccattcccaaaagtgcgtggcaaaagccagagttccccatatacgcccaagccttagacagctttcgtgcgcccgagcagtgacccttcctcgggcccgctctccggaattggaaatctttggtgtccctttccagggacgcgatccaaggctccatacagaaagtcgcaggccctcagggcaggacgtttccagaaccctgacagccggctttccttgcccgagctgcgatgccgctggatcacggcacggattccagtcttaccatggctgcagcacaagcggcggcgtgtaggcctcctgtggaagagagagcggaagtgacgcgatatcattatatagcttccaggaggaagaggcggtgcgatctaggagaagtgcttccggaaactgtttcagcgcgacctggctggatttatgagagtatggcttgggtaccacaacttccggtgcgcctttctttacagttcgtaaggttcataggtaagagaacagcgaaggttccggggctagtttgtgtttcagacttccatatttccatttgcagttgggtgaagtggttagagctgaaaggggacagctggagtcaaacaacttaactcaaatatctgggaacgatttcgcgctgaggaagaccctttgggacttgtagctccactccggggaacggactcgccgggactgacagttgccggaagtgaggctgcggggaatggccgccgctgcgaccatggcggctgcggcccgggaactggtgttgcgggctgggacctcagatatggaggaggaagagggcccgctggtgagagcgcggagctgtttctcctccgtagttccggtgctcctagcttcagaaagacctgagctgggtttaggcacaagggtgggaacttggctgctacccgtgatattacctgtttggctccccgtacccttccctgtgatcagacccgaccctgagcgggaccctagtggctgaaactcatgttctggggcacaaaatttcaacttcactccacattttggggtagagtcacgaagtagtatagtgtaaaggttaagaacatggcctctgaagccagactgcctgagttctatctctgccacttacacgctgtgtgcccttgggcaagttaaccagcttctctgtgccatcatttctcacacctttaaggtgaggaagatagaacctattgtatacatcgtcgttaggattagatgaatatgtgtaagattgcacctggcatgcaggtaaacactatgtgttttgacatttctagaaagcctggggttccccagaggtgtgatagaacacccaagatggcaggagtctgagggtcttaaatttaagtgcaagttctgctctatcctctgcaattcctagctttcctcattcggtcatctccactgcacttttttttttttttttttttttttgagacggagtcttgctctgtcgcccaggctggagtgcagtggcgcgatcttggctcactgcaagctccaccttccgggttcacgccattctcctgcctcaacctcccaagtagctgggactacaggcgcccgccaccgcgcccggctaattttttgtattttttagtagagacggggtttcactgtgttagccaggatggtctcgatctcctgacctcgtgatcttcccacctcggcctcccaaagtgctgggattacaggcgtgagccactgcgtccggcctccactgcactgtcttgtcttttacctttttttgttttctttagacgggtttccctgtgttacccaggttgaccttgaactcctgatctcctcaaacaatcttcccgtctcagcttctaagtagttgggactacaaggagcccaccaccatgctgggctacctccactgtctcactggatcgtctcactccttgtcgtattccttacccatcagcacaaaataggagagtgggtacaacgtgagactcttagaatttttcaaagcagtacctgtggctcccagtaaaagcagctccttctcacttgaaggactggggatatccaattatattttttctttctgtctttcaccgtaccctactcccattaacttatccctttccaggcgggtggtcctgggctccaggaaccactgcaacttggggagttggatatcacttctgatgaattcatcctggatgaagtggatggtaagcgatggcatggggtgggtgcagtacctgtaatctgagaggcatgggggctggaaggaataaggtagggattggtgtgcagatactcaatgtggggagagggagctgtggagctggaccc

SEQ ID NO: 585742 - DNA, 4001 bp, Homo sapiens
aagaagcctgaaaaaaatttattttgcttcaagagctatttaatgtatccaattttcctcaaaacctttaccatctgccctctcctggggctggcaaggcagggcagaccatcagtcaactcggctccaaattcttgccacttgcaagtgctttctaggctcatggcatggttttcaaatcatgggaatctattcattgctgatccatttatgagcgatttgagaaatatgtgaaacacaagctgctcctcatggctttggtcactggaaataatgtaaagaccagggtcccacctggaattgtaaagcccctggccccctctctcccatcctttctgagcccagggcggaatcctccctctggacaagcccttcattcgtgagggctgagcaccttacagcttcagcacaagccaatgtgctgacgatgaccagctgggctataggaagcactagtaaatgagaaaagaacttctagctgatcacttgctcgttcactaattcaatatttagaaaaattgaatctctctctctctcaaaaaaagtagacttgaaatggcaaccgcagtaagggaatggatctttccaaggcaccatcctcaacaccaagaacaaccccatgtacaaacagaagaatcagtaacagtagggagccctggtgtcatccttctcccaccccaggtactttccatgagcagcagtatctgggctgttccatctaaaacaaatggacttcaatgtccgtgctatgcccaacagtctctgctaaacatcaatacatatgtcgagcattatttagcttggctttccaagaaaactattcaatatgaagcattcagtaaattctcttctaaaacagaatctctcattcagttcaaaggtatgttatgtgactatctcaagacgtacatataagaataaataaaatttaaaatagcattgaatttataagtacagtgctgggagtaggagataggcaaaaattaaattggactttgaggaggtttggtgagtgattacaaatgagccatgtttaaatgccatttgagttgctataaacacagaacaggtatatctaataatttagtagacgttaataaatttggggaactttctcttctaggaaaatgtatgttgaccatctccaattcaaatggagcaaatcagattccgtggagcagaggtttgcgtgtccccagggaagcatggagtgaaaaactctcagcagtgattcctgcacacccaccagccctgggacgggcaaggaacactttgatttcattatcttttctgtttatctttaatcacacctctttatctgaccattcatccttttaaggttgcattatcttttttcgtttaagatcacattatctttatgctctctgttccttgattcatcattgatttttgccttctggtttcatctttcactgtagcaaatggaaggcttctaatttaaagccacttgttgaaggaaaatcaaactgatgcagattagtttggaaacgggaatactttaagacttacatagactttaagaagcatcctgaagtttccttaagggcaacaatttgtttcttgtactcattatcatttatgtatttacaccacacacaatgccgtgcgtgtatacacacgcaatgtttatccatgtgcatacacaacgcaacatatacatccacacacactggatagccaactctctgacccatcatagtcacctaatggacatgaactgattatagtaaatgagcaatgcattggctgcagagttcggattcttgaggatgctgtgaaaagtgcgttctctcctgcactcacctctatttccataggctccacctcgatctttttccatagttccagcaactgtgcgattggcatttttaaactttccttttctgctggtcgagtattgatagtaggaaaggaaataaacagaggctcggaccggcacagggggacggccagacgggatgtcggaagccaagggacgcagaggccggcgggtggcggcgatggagaggacagatccggctcccagaggaggtcgtgagcgcggggcctgcgccggccggaggagggacccggggggctgcaatatggctgctcgggcgccgtcccctccctgccaagccagggctctggggagctgctgccgcttcccgctcgggctggggcgaggaaaggaggggacggcgctgcggcttcggaatctgtactgcgactttggcagagtaaacgctgcacttgcagcttcgaattgaatttcctgcctctcccccctcccttccctggccacgctcttccctcctcccctcactattttaccttaattggctctaaacgagggtgaaagttgagtctgaggatgccgctgccatagaaactgcatagcaaccaagggctggggaggcggggggggggggcggcaggtctttcccccccacccccagcacgcgcacacccttccccacctccccagcccgccgcgcctccccggagacccacaccgccacctcccgccgcagaacgggagggacaggaacacggacggagggaccgggacgaggggagggctccacgcagcacagctgctttcctgcggagcgttcaggagactcgggcacctctggaagcgctgcggactgagctgcccgcggctgcccccgccccgagggccgggacagcacctcaggagaagagggacgaagagggacgacagacaaatagctggggagaggcgggggggggcggcccgtggggtccgctgggccctacccagccctgcccggagctgcccgaaacagcactcaggcctctgcgggccaggatgaaaggcacgtgggccgctggggctcccagtggcagggcccgagggacagaaacattaattcaaacaacgtgtatcctgcccctcagctccttcaggtctccaccccgtcctatttcacaggtgacaaagtcctgaggctcagagaaggaacccccgaagacacagccaggcgcctgcgggagagcaaggcctcctgggccaccgctccttggaaaggaaccaggggaaaattcccctccctgtttcccttttttgggttgtggagtggggggatctctcttgcctccctccttactcccttctgtcctggataatgaaaggtgcgtgcgggtgaaagacatattcatttctccaatcgtccaagtgctaatcctgaagcattatggttccctcttttaggaaagggtgttaaagttaacacaatttaatgctgctttgggagtaagtgtattcatttctatagcaaattcctttatctttgagagaaatatctttttaaaaatagcttaatgttctccaaaattatcaatccctttttctttttcgactttatgcaatcactaagaaattcaattcactggaaaaaaagaaaaacccaaatcccagatactttgtatctcatagcaaagtagagtccaaagttaacagaggggttctgtacttggtgttgatttatgacagtcactttatctttctacaaaattaggccagaaggacctttaaaatcaattgcattcagaattttaaaaatagcaatattgttcgttttcaaattggagattctgtgattgacagagcagagtgaaggttttcttgtgttaacaatcataaggtgattttgtacatgctgtaaaaggtcacagattaaaaacagacaaagccagggtggtggctcatgcctgtaatcccagcactttgggaggccaaggcgggcggatcacctgaggcgggagttcgagaccagcctggccaacacggtgaaaccccgtctctactaaaaatacaaacttagccgggcgtggtatcgcatgcctgtaaccccagctactagggacgctgaggcaggggaattgctttaacccagggggcggaagttgcagtgagcggagatcacgccactgcactccagcctgggcaacagcgcgagactctgtctcaaaaa

SEQ ID NO: 585743 - DNA, 4001 bp, Homo sapiens
gacctcctacatcgctgatggtttatgtatgacttctagaaattttatttctacatggaagaaacctcgtttcctattcccaccacccccccacccccccccccgcttgtttcccactgtattctttccggaggcacgcctgcagcccagccctccttgcagaaccctgtgacaccagaggcgtgtgtatccagaatcaggcagattcctgaactcccactggtcagccagtgtctagtgctgctcttcataaacaatgcctggagtgtgctcacacgtgtacctcttcttggcaaagacagtaaatggaaggagacaaggagttgtctaataaacttggcattgagatgaaacaggaaacaaagacatgtatccggataaagataaatactgttctgagtttctgatcttgtcaacttcagattttttaagtgcctgtgtcccaggaaaatgatttgcctcactggtgtgcttcatttctttcaatattagacttaaaagcaagccctcctccagtactggattaacagttttgtttgaaagatgtgttttaccctcgggaaccggccatactgatcctatctagtacttccaattctgatttagggatgccataagagaaactttttaaacaagtaattctcttctacttttttgtctattcctcaggtctctcaatggttacagaacccatgtctgtgtctaatatcatggcagctgggacaaagaaaaccaagatgaaacatttgagattgttccagctgaaacaaaccaaccaaaaccccacaggtgccagccttgaggcaaaggcgggacagtgtcaggcgaaatctttgggtcccagcctcagtctccccatcaccatgtctttttcacttaaacacgtttcactgttttgtcatctatagattcaacaatgtgatttggacactgggaataagagaataagatttgatggttgaaataaaacacaccacgagagaaccgtccacaaggaaactctaagatgccaagatgcgggacaggtagaaaggacagggctttgggagtactctgggttttcaggacgaatctgtatcagcctcggcgctgcgaggatattgcatcaggctctttactcctgaacgccgttttagacgcctaagcagattgtgctgctgcctgttcttccccgttctgtgaattctacactgacttcaagtgcacgaatgagctacaagataaggtggaacctgccggccgggcacggcagacagcacctgatcagcgcctcggagggcggagctggggggcttctccactcgggactttgagggacccccgcggagcgctccgcgccactcggcggtctagctgcagagaaagcccctcctcacccggggctccctgtggcccacaggggaccatcccacaccccgtgcagccagcggcggagaaaccagctggaaatgcagtgggggtggagttgcccccgcgaggacccacggaccgcccaattactacggagtcccagcgataacgtttggagccgtttggttcgattttcggaaccggaccagctttccagtaacttgaactccctgacgggtctcggggtccacccaggggtggcgaggcgggctcgggcgaccacggcccgctcagtgcccggcacctgcgcgccccgagggcggccgcattacctcgagccggctcaggctggagctcttggagcgcgacttcctgcgcaggtacacagagaagaacctgcgcacggcgaacttcttcatgctcaggtccatcgccccgcgcccagcccggagcagccgcagggccgggggacgcgcatccccggcatcccaggcgcggggctcaggtccgcgggcgggcacgcgtggccagggagcccggcacggcggccatgggcgcggggcgtggggcgcgagctgcggtcacaaagggcaggccgcgccggccaccgcggccggggccacaatcgctccctccgcctccttctccgcctcccctgcgagtaccagcgccggccacgcgccacgcctacaccacgcccaccaccactaccaccaatcagcgcccgccgctccgcgccccggcacgcacacctcctcctcctccgccccgccccgccactacggccaatcagcgctcaccacccctcccgttcccacccaccaccagcactgccaatgagagcccaccgccccgcccgggagagccccgcctctgccgatacctccaatcatcagcgccgccctgtggttccaggtgcccatccctcctcctctttctactccttcctacaagaaccagctccgtgcagccccgcccccacgcggttccgcccacggccccgcccacagcactgcccgccaatcagtgcccgcagccgccgcatacctaatgagcctcggcccgggacagctcccggcccgggcgagttgtgcagctgctccggagccgcgcagtcgcgggcgttcctgtcacgcaacttcggcccggctgctctttcttccagcttggggccgtcattatgttttccttccttaaaacatccctatgcacactttgtcatcatgtttttctctgccgaaccaaactttaattgttgatcagcaaacgcagccaaaacctcagcggcacagcgagcgagggaccgccgcctgccagcgggccctgcagctcggccaggagccgccctccgcggaaccggcgccttccctccgccggagcggacaaaggcgcccgagggcgggggctcaggcagccctcggggcgcctccctcccgcggctgcagaacaaagacgcatccgccctccgcagccggtcccgctctaggaaacgtctacacagatggcttatcagggcccgcgctgggaatacccgggcggggtgacctgggtctagggcaaggccctcagacccgctgctggcggcagcgccgctcgggatccgccttaaagggaaacacttttttcttttttttcctagaaatgctcaccaagggctgcagcagggccgagaatgcgggctcacgaccccgtgcagcctgctctgttttcctcttgtgcacgtgttgagtttgtatttaaaaacagggagaaaccgagcccattgacatagcaccatcaccacctgcaaagagcagaaacgagtgcggtggtgagttgacaagtcttgcttgctcttttgcagtgcgaactgcaaaatcctcgcgttgttttgctccctggactagtcagatgttgcgttaatacttgtgtagtctattttggctaaggtgggtagagaggtcagaatgtccttaaataagagctttaaagtcatgctgcatccgggctgaggtgaggtcagataggctctctgggtttcctggagacccgcgttgagcggtgctgctccggagtggaagccgggagtttagcaccacgactctggcgctgccccttccttgcttggtgaacttgggtgccgttgcacgttgttcccacgactcatctctaagaggaaaatacgagtgaaacctgtctcacctcccttactggataccaagaggcttatgcaagatcacggatgtgggagtgctttgtgaatttaaatagtgcaattgattttcatattatgtattaaaggatctataatgactattctttaaaaacagaagtgcaggaccccacaaggacaccaaacaccactttttgctccttttcaagatggtgtgccagttaagtgcccatgaaaactgctttgcctgcttcctttaaggttctgctgggagggtagtaatctgtgctctcagaaccagcctcttagtgccctgtatccctgctgggaccctcaggcatcctggctctaggcaaacacaaagacactctgtacccagcacgggaagaggtagatggacctccaactggacacagactccgggaatgagggaggaccaacccgaccatgcttccctcggaaggggagccagtaatactggccggagacaggagtgctg

SEQ ID NO: 585744 - DNA, 4001 bp, Homo sapiens
ttttttcttttttaaaaaagagaatcccacacacaccctactgtgtccaccatttcaaataccttgcaaatacatccctattctgcatctctccggagtcttctaagaatctgggaggagctaacaaatggaatttgaataataatgaggcgactgaacaatttaattacggaaggtagctctagagactccaataaaacggctgaaagcctttatctacaaaaatgtggcctggtgctcaacggtaagaccaattaccgggagtgcagaagacagaaagcacaaaggtgcacacatcagtttaagcaaatgaggaattagcacaaatcatcccaagagagaaaacgctatgaaaaagggtgacttgagaggctgctttctcatctaccaggcgcaaggcatagttaactttatttcctttctgattcattgaaagtcgtgcctgccagatgtagaataatgaaactaccctagtgagaaaagctttgcatagagaatttaaaataagttcagtgaattctcaataaaagttctttaaaaatcaatagtcacaaaggtacttgtatctctcacacaatttcttcagtgtgaaacattaaagttagttccttctcttggatgcatacagtttcactgagaataacatcatgtttaacagccgctttctattgacctttccaagtgaccttacagtaaaggaacttttgctcgcttctgagggaaactaaaaaaagtttaacctctctggaatactaaaaggctctcaacttccttacaccttaagaaaatgcaggaagcccccacaagctgaacgattgctaaaacccgcttctagaacaggaaaaagagtttgcttcactattgaagcaaagaattccccgccgcgcgctcactcccgggcaggcactgccatgtccaggtggtgataccgagagcagataaggtgtcctgacaacggtgtttgcgtggatcccgggaaatctgcggcctctcggagactcccacaacagcttggcgagcatccccccgccgccccgcgggtctccccagccactacctgggtgggcccctcccgcggcgacgcggggcgagactgacacccgcagctgccgacgaccctgccagtcacgccgccgccggctgcctttttttagccacgacatctgaccctggcttcaacagcaccgttctgggagagaggtcccagggcgcgcccgcggtcccctcccctccccaaccgccagacgctgcggagagcttggggtgaggggcgcgggaggcaccggctctgaaaggggcagaagcgcgcgctcctccagcccagacgcttactccctccttccccttttccaccgatcctggttgcccctccgccaccagcaccgcgctccctcatttggcagctcgaggtcgggcttttggcgtccctccccaccccaaaccctcaactggacccgctcccctggaccccctccaagtcggtggctcgcgcacggccgggctgggggcgggaaggcgccaaggggaggaaaggggcgcgagccgaggacgcgggggccgggcgctcacctccctcctctgtgccgctgtccggatcggcgtcggaggagtcgggcccgtctccgtagtccgctagccccaccagctcatcctcctcctcctcctcctccgcgtcgtcctcgtcctgcggctgcggcttccccagcacctggctcatcgtgcccaccggccggccggcccggggacggcgggggtcccggggtgggggccaagcctcctagccggccgcccgcagcctatttctgaagcggaggtttgtctagagctcagcggggcccggcggaagcgggggccgcgcgtcccccggcgggcggcgcccaggtccgggtcccgcggttcccagcgcgcccgaagccccctcccccgccccgcccgccggcggaggagtcagccggagcgcggcagttcctcccggaggagggagagagagagagactgcgtgacccgagtcacctgacacacactgtcacatactcacatacacaccccgcacgggcgcgcgcgcgctcgcccggccgcgggcaccactcggcggggcgctgggccgaggacacacatgcacacgcacacgcacacgcacgaggagaccggggaggcgcggggcccctgcaccctcccagactcacaccgacacacgccccgtacacggggcccccgggacgccggccgtcacccaccgcggctgcgcgccaggggcccccacgcgcctctccttcacgtggtccccgcacaggcaggggagggggcgccgcacaccctcaatgtcccccccgccgtcccactcccacacgcccgcagagcgtctaccgtgggcggatgcctcctgcttacagtcctgagctagggtcccaagcgggtggcctcccaacactgtggcgcccagatcccccaccccagagcagcgtgcccaggacaccctgtggacgctcaagagccccaggcggagaactcagataaatgcacagtggaggcgcagtctccatagcaattgtcttttagtgtgcctttatggttcaaagtgcttcccaccaagaatatttaaaaagcaggcctacccagacgtaaatgtttctgaagaaatcacatgactcgtggctgcttagactaaataattcctctgcagccctttggaaaaggtctcagtgtataacacactcgggggctattcatggccacctcctcatgtctcattgttgcatagactgtaatcccacatgaataaaatatttcaaggcttttgtgggagtaggggagtggcggtggtgggggggcaattctcaaataggaatagcagcaacgtggagtgagactctaaaacctgcattcctccttcacaagcttttcaccacggaacacactgtacccaccctttctgggtactgcaaaaaattacgtggatgaacttccttctgtggagcacaataagaaaaaaccggccggtcagcatgatgatccagctcctacaggtgccagcagctcagccggtggtgcggtgcagaagcggagggaggaagctagggcaggagactctcagggcccaagggtgctaacctccataggaaacatttattaaccacctcctatatgcctgaggctgggctaagtagagggtccaagaatgctcagggcagtgttcctgccctgaaggagctcacagtctaccaaatcatgactcatgtcctggattttttttagtatttctgagtgcagaaggtggatgcagacactttccagaaggtggctgcttctaatgggaaaggtcctgagattttccaagggaggcaggcagtataatttggtatgactgtatcagttaaggttcttcccaggatgaaacagacggtatgtgcaaagactttaactgaagccttcaagtgaaggaacaatttacaggggtgtggacagagtttagggaatcaatgcaggtattagcgatagtgggaagataacaccacccctaaatttacaggagtgaggaagggagctagagtcctggagaggggccacaaaacaggagctgtaactgatgaggaagctgctgctgccagaacggcctcacatcaaggagagagcaaagacctctctttctctccatccatcctccctccactctcctgtgtctcccattggccaaacccatctggtagccagaaggcaagggagcctggaacctagtccaggacagagattggatagggagggcagggagtgggtccctgggtggggtgaggtgcaaggagcatcaccaacacaagcaggcactacatactcccatcagaggcaagttacttatgcccttctaaacccgattgcttatcaatagaacatcactccttctaaggattattaggaagattaaatgaggcggaaaaaaaatctcaggtacttacaaagctcatttcctaggagtaattttcctagcctattttcatcccttccgt

SEQ ID NO: 585745 - DNA, 4001 bp, Homo sapiens
caccaccatcacaagcagcagcagcaggagcatcctcaaacgaagaaaacccctccaaagtgccccgaatgtgtgctgctgctggctctgaagccgtgtagaatttcgtaatggaatgtgaactgctcgtccggatctgggctcacgttctatctcctaaccagtaaggagcgagggagggcaaatctgctgagcaaggagaaatactttcctcctcttttataacccatcacggatgcacggcggccgaggggcgcgagctgcacgcggcgcctgtcaagcggcccgggcccgcaccccgtggggtccccgcgtcccccagctccccgccccgcccggagagaaaggtggcctcgcccatcggtgggctcggccgacgcgccccgcactcacgcgcggccgcggagcaggtcacatcctcgacgcgcccttggcccggtccagaaaacacgccgcttcccagggagggggtcggcgacgggaaggacctcccctgctccttagcaaccattaaggtcgcagtttcctaagagaccgcgagcggggagggggcgcggggggcccggcccaaggcttgtgcgggaagttgggggcggggggggcagcaacaggccccctccccccacccagctagacgccgggggccgggatgggaggaggaagggaagccccagaactcgtgaaaaactggtccagcgggcggcggacaaaagtttccgagcgcgctccacagctgggcggcggagcgggccccggcggccggccccgcctcggatgctcccggcctccttcctgtgctcgtgacggcgccgagccccccaccccccccgcccgcgaggcaggctagctccacaccgagggctcccacgaaaacactcaccccgccaacggaagggcgagggaacaatacgtgcccgcacggctagggcccggtcccctcctccccaggccccccggggcggtggtcggcgtgaccacgaccgccagccgggaacccgcgagggcgcggggctgcccgcggccccctcccggccggcgccgtccgcccgggaggttcaaagtccgcagagcagggcgcggcggatgctcccaccgagcagccccgagcaggcacccccgcgcgagcaccccgggcaggcacccccggataccttagggcggcggcgggagggcgggcgccgtcatctccgcgcttcccggcccgagaaggactcgaaagtatgtaggagaaaagtttcccctcccacatgggggggaggatgtcgagggagagagggcggaagatggagagcagcgctgggaagatgtttctggccggcggtgcgcgcaccatccgagtcccggcggtgctggttaaaaataaactcggcggcgcgggtcgggccggattcctgcgctcggacggctaatatggatgcgcatcaggtcctgctggcggggcgctgcggcggctcgcgctgggagctggttggcagagccggcggctcgggaaagggaaaagagcggaggaaggggaggaggaggaggaggaggaggaatggcccggcgcgcagcccgaggggagagggctgccccgctcatccctggccgccccgccggcccgagcgcacgctgcgcggagtggggcgtgcgggtccccggctccgggacacaccgagtttcaaaagtacaacgcgctctgcagacttcaccctccccatccccaaagttctttaaaaggtcgctccggctgtgccccagacttctcgctgccgccggcgtaccgcgagtcggaatccggggcacgtacttacggccgggcaggacgcttggctccctggcatgatgcgttggggaccggtgggcttcagggagagaccgaggagagatgcaaacttgttccggaaaaggaatcaaaatggcgtttctggatgtgcaaagttcatcaactccgcagtcacttcccctcctcctcttctcccacagggagggaggtgggcgaggagctggcgaccccggcgccccagccgtcgtcccggcccccgtctcggccccccgcccagcttcctcgcccgcacgctcggagtctcgctctccccctctcaccctgataagtagacacatcacgtgttgctcctgcgagtctcctggggacgtgttactgagcggccgcggcggcggcggcggcggcggcggcggcgctcggactggggggggtgagggggaggaccgccgcccccgccccgactttagcagggtgaccgcagttgccatcccgggatggatggaggtggagtcccctccccaccccccaccgcagccccaggtttgccctacgccctcccaaggcgccccgggccatgggagggccgggctgcccgaggggaagggtccgggaggccgcgactggctgcgatcccaatcgtcccgttgctcgcgggccaccttattcggccaccgcgccccctcccctgcagcccctcgccgcgggcgactccccgcccccggctttccatcacttcactccgcagtttcactattttaacggaggcgggggagacacggtgatgcctcggaattgcgagaggggcacctcagaggcgctggagttggggggatggggggcgtagggctcggggccctggcctgacgccgcccctctgggtctccgaggcatctgcgagggggagccccgcccgcgccgtttcctttccacgcggtcctcgctctgcatccaggtggggcgagtggatgatggggcaggagattaaggagcaggcgcttcaccccgcccctagcttcgagccgtttctctcccggggccatccttcttactcgggctgccgccctgagtgtgctcgccgtctaacaaactcaactccgacccgactttggtccccctcccttacccacaccccacaaaggatgcttcagcggggaactgccgtggccgccaggggctgaggacggttcctgccgccactgtgtccccaccccgcgatggaatggctgatgctgtgtcatccacgtcgccctccaaggcttcagagaagccacacgcagtatctctttctctcagagggctcctgtttcaactctgaaaagcaggggcccttctccgagccgctctccatctctccagctcctgccaccacgcttcgcactggctgccttgccccaagttatcacggagcccagagaaaccaggcctgggctgtgcttcctccataaagcagctgacatgtttccaactgttaatacttctcctaccgaggttctgaaaggggtctgttctcagcctttggaaacatcttcagaaagataaggatgattgtggttgttgaaaataaacacgcccccccccccccgcccccgtagttctaaagaagaatgtccaaagaatactacagtagaattaagcgtttgagtctggttaggcaagatgatgttatgcaggcagaaagctggctactttctatttactatgacctttgaccctggctccaccacaccagctcctctgagaaggcttgaacaccatggagagttgtaagcccaactgtgggcctttaatttgagcccttccattgacctctagttttcagggctgcagacagaagtgtctgtctcgggatgggtcctggccagaatagaactctttagaaccaaggaaaagcagctggacccttaggtctgatatgagataagtaggctaaaccactgcccaagaaggagctgattcagctggctgtttctctgactttcagtcatcaaaattaagttttcggaacctgttatgtttcccagggtctactgtttactgaagaaaactccatccagagaaattttagcggttgcatttttctgagcctcccccaaccccgccgcccccaaatgtattatcaaatgcttttttgaagacaggccagtcgtggaggagatgggcaggtctctagacaggaataatagttcacattgccatcatagaataggtgtcttgtgtttctaagttgtaatgtgtt

SEQ ID NO: 585746 - DNA, 4001 bp, Homo sapiens
cgagctgcacgcggcgcctgtcaagcggcccgggcccgcaccccgtggggtccccgcgtcccccagctccccgccccgcccggagagaaaggtggcctcgcccatcggtgggctcggccgacgcgccccgcactcacgcgcggccgcggagcaggtcacatcctcgacgcgcccttggcccggtccagaaaacacgccgcttcccagggagggggtcggcgacgggaaggacctcccctgctccttagcaaccattaaggtcgcagtttcctaagagaccgcgagcggggagggggcgcggggggcccggcccaaggcttgtgcgggaagttgggggcggggggggcagcaacaggccccctccccccacccagctagacgccgggggccgggatgggaggaggaagggaagccccagaactcgtgaaaaactggtccagcgggcggcggacaaaagtttccgagcgcgctccacagctgggcggcggagcgggccccggcggccggccccgcctcggatgctcccggcctccttcctgtgctcgtgacggcgccgagccccccaccccccccgcccgcgaggcaggctagctccacaccgagggctcccacgaaaacactcaccccgccaacggaagggcgagggaacaatacgtgcccgcacggctagggcccggtcccctcctccccaggccccccggggcggtggtcggcgtgaccacgaccgccagccgggaacccgcgagggcgcggggctgcccgcggccccctcccggccggcgccgtccgcccgggaggttcaaagtccgcagagcagggcgcggcggatgctcccaccgagcagccccgagcaggcacccccgcgcgagcaccccgggcaggcacccccggataccttagggcggcggcgggagggcgggcgccgtcatctccgcgcttcccggcccgagaaggactcgaaagtatgtaggagaaaagtttcccctcccacatgggggggaggatgtcgagggagagagggcggaagatggagagcagcgctgggaagatgtttctggccggcggtgcgcgcaccatccgagtcccggcggtgctggttaaaaataaactcggcggcgcgggtcgggccggattcctgcgctcggacggctaatatggatgcgcatcaggtcctgctggcggggcgctgcggcggctcgcgctgggagctggttggcagagccggcggctcgggaaagggaaaagagcggaggaaggggaggaggaggaggaggaggaggaatggcccggcgcgcagcccgaggggagagggctgccccgctcatccctggccgccccgccggcccgagcgcacgctgcgcggagtggggcgtgcgggtccccggctccgggacacaccgagtttcaaaagtacaacgcgctctgcagacttcaccctccccatccccaaagttctttaaaaggtcgctccggctgtgccccagacttctcgctgccgccggcgtaccgcgagtcggaatccggggcacgtacttacggccgggcaggacgcttggctccctggcatgatgcgttggggaccggtgggcttcagggagagaccgaggagagatgcaaacttgttccggaaaaggaatcaaaatggcgtttctggatgtgcaaagttcatcaactccgcagtcacttcccctcctcctcttctcccacagggagggaggtgggcgaggagctggcgaccccggcgccccagccgtcgtcccggcccccgtctcggccccccgcccagcttcctcgcccgcacgctcggagtctcgctctccccctctcaccctgataagtagacacatcacgtgttgctcctgcgagtctcctggggacgtgttactgagcggccgcggcggcggcggcggcggcggcggcggcgctcggactggggggggtgagggggaggaccgccgcccccgccccgactttagcagggtgaccgcagttgccatcccgggatggatggaggtggagtcccctccccaccccccaccgcagccccaggtttgccctacgccctcccaaggcgccccgggccatgggagggccgggctgcccgaggggaagggtccgggaggccgcgactggctgcgatcccaatcgtcccgttgctcgcgggccaccttattcggccaccgcgccccctcccctgcagcccctcgccgcgggcgactccccgcccccggctttccatcacttcactccgcagtttcactattttaacggaggcgggggagacacggtgatgcctcggaattgcgagaggggcacctcagaggcgctggagttggggggatggggggcgtagggctcggggccctggcctgacgccgcccctctgggtctccgaggcatctgcgagggggagccccgcccgcgccgtttcctttccacgcggtcctcgctctgcatccaggtggggcgagtggatgatggggcaggagattaaggagcaggcgcttcaccccgcccctagcttcgagccgtttctctcccggggccatccttcttactcgggctgccgccctgagtgtgctcgccgtctaacaaactcaactccgacccgactttggtccccctcccttacccacaccccacaaaggatgcttcagcggggaactgccgtggccgccaggggctgaggacggttcctgccgccactgtgtccccaccccgcgatggaatggctgatgctgtgtcatccacgtcgccctccaaggcttcagagaagccacacgcagtatctctttctctcagagggctcctgtttcaactctgaaaagcaggggcccttctccgagccgctctccatctctccagctcctgccaccacgcttcgcactggctgccttgccccaagttatcacggagcccagagaaaccaggcctgggctgtgcttcctccataaagcagctgacatgtttccaactgttaatacttctcctaccgaggttctgaaaggggtctgttctcagcctttggaaacatcttcagaaagataaggatgattgtggttgttgaaaataaacacgcccccccccccccgcccccgtagttctaaagaagaatgtccaaagaatactacagtagaattaagcgtttgagtctggttaggcaagatgatgttatgcaggcagaaagctggctactttctatttactatgacctttgaccctggctccaccacaccagctcctctgagaaggcttgaacaccatggagagttgtaagcccaactgtgggcctttaatttgagcccttccattgacctctagttttcagggctgcagacagaagtgtctgtctcgggatgggtcctggccagaatagaactctttagaaccaaggaaaagcagctggacccttaggtctgatatgagataagtaggctaaaccactgcccaagaaggagctgattcagctggctgtttctctgactttcagtcatcaaaattaagttttcggaacctgttatgtttcccagggtctactgtttactgaagaaaactccatccagagaaattttagcggttgcatttttctgagcctcccccaaccccgccgcccccaaatgtattatcaaatgcttttttgaagacaggccagtcgtggaggagatgggcaggtctctagacaggaataatagttcacattgccatcatagaataggtgtcttgtgtttctaagttgtaatgtgttccaatgagggcagaggaagggccctgtggggaatgctactttatttactcactttgtctctgattcaggagctagcctttcctggtctccccattcagggataagttttgaataggaaaaatatcaaaattggaattttatgcataatttagcaaatctccaatgctatatgaattttcatgacaaattgccacctgtataatgccatctagaaaatactggcaacaaaaaagattgaaaacagttttactacaac

SEQ ID NO: 585747 - DNA, 4001 bp, Homo sapiens
cgatctcggctcactgcaacctccgcctcccaggttcaagcgattctcctgcctcagcctcctcagtagctgggactaaggcacgcaccaccaagtccagctgattattgtatttttaataaggacgagtttcaccatgttggcccagatggtcttgatctcctgaccttgtgatccgcccacctcggcctcccaaagtgctgggattacaggcatgagccacacctggacttaaattttatttattttgaaaaaaggtcttgctctgttgcccaggctggagtgcagtggcctaatcactgctcactgcagcctcgacctcctgggctcaaactatcctcatgcctcagcctcctcagtggctgggaatacagacgtgggccaccaccctggctaaatttttttatttttagtagaaaagcgggtctcattatgtttaccaggctggtcttgaactcctgggctcaagcgatcctcctgcttcagtctcccctggtgctgggattacaggtgtgatccaccacacccggccaggataggagtgtttgactactttattcacaactatctccagcagctagaactgtgccttaacaaaaagcctgcagcatttgctgggcacagtaatcctgtaatccttgggaggctgaggcgggtggatcacttgagcccaggaactggagaccagccctggcacctggtaacatgatgagacctggctgggcgaggtggctcacgcctgtaatcccagcactttgggaggccgaggcgggcggatcacgaggtcaggagatagagaccatcctggctaacacggtgaaaccccatctctactaaaaatacaaaaaattagccgggcgtggtggcgggcgcctgtagtcccactactcgggaggctgaggcaggagaatggcgtaaacacgggaggcggagcttgcagtgagctgagatcgcgctactgcactccagcatgggcaacagagcgagacgccgtcaaaaaaaaaaaaaaaaaaaaggtgagaccttgtttctacattaaataaataaataaataaataaacaaacccatccgtgcaggcgtggtgacgcgcctgcagtcccagctactcgaaaggctgaggtaggaggatctcttgggcccgggagttcgaggccgcagtgagccgtcatggtgcaactacactccagcctgggctacagggcgagactttgtctcaaaaaaataaaaaatataaaaaatttaaaaaacaggctgggcgcagtggctcacgcctggaatcccagcactttgggaggctgaggcgggcggatcacgaggtcaggagatcgagaccatcctggctaacaaggtgagaccccgtctctactaaaaatacaaaaaattagccgggcgtggtggcgggcgcctgtagtcccagctgctctggaggctgaggcagcagaatggcgtgaacccgggaggcggagcttgccgacatcgcgccactgcactccagccttggcgacagagagagactccgtctcaaaaaaaaaaaattaaaaaaacaaagtctacggaatctgctgaattctgatctactaagccttcagcagccatgcatgccttttcctgcctccatgctattgcacatacgttccccatcgccgaaaaccctcatcctgccgtgaagaaacttctcaggatgtcctaatcccggaagcatctactctcaccccccactttccactgcactgggggcacccctagtgtagcgtctgcctcttagagaacttggcagtcttaccggcaccgtctctgcaggctcagggccccgcctgggaatctccttcccctccccagcccgccctgccccatgccctcacccctcaataggtcgcgggccacggccgcgggctccaggcccccgccgtcctcctcgcggtcccgggccccgcggggacgtcgggccccggccccggccccggccccggcgcggtagttagctcccggcatcagctggcagtagcgctcggaagacgaatggcgccgcttccgctcacggcagcccctgccccgcctcttccggcgttcccggtctcaacgtggtgacgaatgggcagaaaactgcgcggtcgagggccagggagccgggcccaaaggataacccgctctggagacattgtcgcaaccttctgcccgagtcgcagggtgctgggttccacgcccgagaagcttggaccaggccttggtggcatttggtttcctaatacccttggctgagaagccagaacctcagggtgcttgtcctcggcaccctgcccccactgcaaactccagccttctccaccatattccacaaaaacacacaacacgtttggagattttaattaatttttataaaatctgagctggctgaacttcagagtacagcgacagctcaaggaagggtgggatttatctgctggtccccacctccccaagacggggagaaggaggtctcatgccaacagctgcaactcctttcagctcccagtcaaggctcaaggctcaagcagaggggaggggataggcaaagggggagggggaagctcctgaggctcagacactgcttgcttctcccttctccccattcccttcccttcccagcagaacctggctggccctgggcagagctgaggcccaggagcagctgaaaggaggtggatggggacagagcaccaaggggaaggggccctcggcccaaggggggaggaacctagcccccaccccgctacagctccccactgaattcacagcacagagaacacctctcgcccaacaactccacatggaggtataccaagtccaggggtcaaaggagcaggtgggtgacagatgggcaggggcagtgaagatgacagcaggctcaggaggggaggtggcagaaacttcctcctacccatgggaggagacgatggggcgactgatattgctgttggtggtcatggcattcagctcccacctggaaggccaacaataagagacagaaagaagagggggccctcagcccaagctaagggatgtttgaaccaagctaaaaacacaccagtctctccaacttcctaaaggtcaaccacccacagccacctcttacttaagagacctactaggttgaacaatcagaacccacccaccaccaaatccaacaccacccactcctctacctccaagctcatatggatttccggtttatgtttatgtatgtatgtatattgcagtgtccaggcacctgagatctgtgtatacatgtcagtcaacatcccaacctgcctttcctgctttgcttagagccaaccaggcagcccctccaccttaccctcaccaggaatgcctcaccccaccaggaatacccatttttgctcttaactcccatccttttaaggctctgactcagcactcctatccttcctgaggccttccccacccacccaaccatattaattttttttttgagtcttgttctgtcacctaggctggagtacagtggtgcagtggcacaatcttgactcactgaaacccccgcctcccgggttcaagcaattctcttgcctcaacctcccaagtagctgggactactggtggctgccactatgcccagctaatttttgtatttttagtatagacagggcttcaccatgtggccaggatggtctcgaactcctgacctcaactgatttgcccacctcaacctcccgaagtgatgggattacaggtatgagccaccatgcccagccagcaagagttaaactgaactgatacaaagagacgaagtatctcagaatgacccagacaggaaaaattatatacaaagtaacatctggtggttaatttgaacctgaaaaattatacataaagtaacatctggtggttaattggaacctaagaacgaaattcaaagggaagcagccagatcttctggaaccaatgtgatccagaggctcctaaacttgtctttactttgcagctaggttctaagatttaa

SEQ ID NO: 585748 - DNA, 4001 bp, Homo sapiens
ttttgctgggtgtggtggctcaggcctgtaatcccagcattttgggaggccgaggcgggcggatcatgaggtcaggagatcgagagtatcctggctaacatggtgaaaccccgtctctactaaaaaaatacaaaaaaaaaaaaaaaaaaaaaaagagccgggcgtggtggcgggcgcctgtagtcccagctacttgggaggctgaggcaggagaatggcgtgaacccgggaggtggaggttgcagtgagccgagattgtgccactgcactccagcctgggcgacagagcgagactccgtctcaaaaaaaaaaaaagaaaaaaaaaaaggcttatgttttgttttttttctttcctatgtatgtttgaatatttgcaactgttcatggatgtaaaaacacaaactgccgtccgggcgcggtggctcacgcttgtaatcccagcactttgggaggccgaggcgggcggatcacttgaggccaagagtttgagaccagcctggccaacgtggcaaaaccctgtctctactaaaaatacaaagattagccgggggtggtggagggcgcctctagtcccagctacttgggaggctgaggcaggagaatcgtttgatcggggaggagtgggggaggggggcggaggttgcagtgagcggagatcgcgtcattgcagtccagcctgggcgacaagagcgaaactccgtctcaaaacaacaacagcaaccaccaccaccaccaccaccaccaccacaaaaaaccaatctgtggtcctgcatggaagaataatcttactcctgctcaaagcctgccgaagagatttactcggctcccattttggatatgctactgttggatatctttgcaccgcggtctcctcatctgcataatggagttataaaatcaacttcacagcactgtggattaactaagaaaacgtatttgaatgccccccgtaaggtgctcagcacgtagttggccctcaatacacactggtacaattcaaactttgtgaaatgagccaattcgtgtacatgttaaggaccacggcagcaactcatatcactaaaagttaactgatgcccaacccatgccccttcctgcttcactcctccacaccacgggagattccttagggcagaacttttatttcggcagagtgcagccaagggaagacagcataagcagcttttttgccagggcgaaggggccagaccccggcctggggatggggtgcaagtatggaccacacaggggctggcttggtcactcacggctgcgtcaggctgtcccggtaacggctgcgctggcagggcagtgctcggggccggctggtgtaggtgtaggtgctcggggcccgagaggtgcgatcagtcagcgctgaggccatgtccgggggctgactgcctcgctttcggtggagcttggctttgaagcaggtgggcgctaaggtgttgtgggacccggagagatgtaagtagtgccaagggcaaggattccgcgacgcgaggagaggcgacaacaagggaggcgggcgggacgggaggttaccagcgcaggaggtgggagctatactgggctcgctcccagcaccacagagaccagctgcgggggccgcatcggttgcccagcaacccagggttctgtctgggggcgggaactccgggcagttccggtccccaggtttcccgggaaggactgcggcacaagggacttccggctcttgactccgcccagccgcgccacccaggtaggtgcgcctgcgctttgcgaggttcctggctagggaggcggccttggctggcttgaccgtcatccttgaggcctgcggggcaacggtggctgtccttggcccggctttggaatgtggctttgcagggctggtgttggcgccattctcgcaggcccacgtgctcctgctcttccagggtgtcctcggctgtttctcctgccgcggcgcagcagcgctcccaggctgcccccgcgataacacgcccctggcagccaggctcccagctctgttacgtgcccgggcggggaagagcttcctggtgtctcccggctcctgcccttctcccgccccaggggcgggctgccgccgccctctgcagctgagtcagtgcagttcctcacctaccttctctgctcaccgctgtgtgctagcaatcggaggacccttggcacacggagcgacaggggcctcccccacagacacctcattttgggaaagaagtgagcaatttattgagtcttaaaaaatacaaaggcatagttccccttaatctatcaggcttccagctctaaagaatgtctctagtattgcggggtggggctgcgcttaaaaacgcagacgctttggttttagtaccagcaacgttaaaaatcttctatcttgtatgagtgaatgtgtatcccttgtgatcagttatttgcatttgcagttacaccttcattcagctaattgctgtcttgatttgaatccaggttctagaatgtactagctccgaaacctcaggcaagttaaatgtttttgtgcttcattttcctaatccacaaagtggcaatagaagaatttatctctttaggttttgtcttgaggattaaaaccgttaatacttagagctgtgcctggtaaatggcaagcctttatattaagatctggaccgttctgtgctttgaagtgtatgacctaaagcagatgtaggcattctataagtaacactagcataaaggtgtatggtaaattctagaggtgaaaacactcccaacatattttaggtctgatcatttaattttgaggtaatttctgaaagggctagaggagaaagtgacatttaagttgtgtttgataaatgatagtattttaactggccagcctcttgggggaagtgcattcggaatggcttgatcaaaggctcaagaagcccaaggtgcatttggaaaactgtaagcaaggtttgtgtagatgagttgtagaaatatatatagacaggctgacaccacatcgtggaaacagtaaacactagcatattaattagaatattttttccctcaagtaacaaaaaaccaattccaagtggctgaaataataaggaattcattattttacactccccaggttggttaacctggagggtaacttgggggctcagcacattatcaacaacacgttttttcccctacctttccactctgtcacctgggttgttggcttcaacaaagtagtaatagaagtatctgctcttttgtctttattggaagagcaaaaccccctcgtaaactcccaactgaccagaattacatcatattgatttaagcttaggatctatataagaccaccatatttggattagaccaggtaaccggtctttctaggcctccaagaaacacttggccagggaggaggagaacaaattctgttaggaggatgttggggcagaattgagtgggtattaagtgggtaaacaatagtgctataccagccacagtgggctttataaagaaattgatagccactataggttcttgtacaagtttctttctttttttttttttttagatggagtctcgctctgtggccaggctggagtgcagtggcgcgatcttggctcactgcaacctccgcctccccggttcaagtggttctcctgcctcagcctcctgagtagctgggactacaggcgtgtgccaccccgtccagctaatttctgtatttttagtagaggcggggtttcaccatgttggccaggatggtcttgttctcttgacctggtgatccgccctcctcagcctcccaaagtgttgggattacaggcgtgagccactgtgcctggcctgtacaagtttttatccacagcctgtttctcttcttgtactttctcccagggcagtcccatttcacgtctgtaatttctagtaccacctatatactcagggtagcaaaggatgtatctctaacctagacttctccctcaggtgacagtcctggatatctgactattttgtgg

SEQ ID NO: 585749 - DNA, 4001 bp, Homo sapiens
gtagagtgagagaatagaaaaagcattcatttcttcttaatagttgctagcattgtgctaccactaagtatatagtggtatacaaaattcagagtccttgctctctgggggcctccaatctagtgggagagtcagatattaaaatataagtctgtctctctgtataaaaaattataaatgacattaaatgctatgaaggaaaagaataagctttttagtagtgttccatggaagctgagttctgaagaatgaggagccagccagccaaagacttagaaaagaagccttctgggcagagggaacagccatggggctagagcttagtgatggagggagaggtaagagtcggtaagtgttgttagccactggaatcttgagcaaattaggttctccatgacttggtctcctcatttacaaaaacaaatgagttgtattagatgttttccaaaagcccttctagccctaaaattctactgaccctatcattatgtaactctggaagcaaaaatctatagaaatctatacatgtcataagttctaaaattaaagctataatgggatgggcagaacatatgtagactattgatcatcacattttaagagacttggataaaatggcatgtgttccaggtagcttgtatagtgaccaattctccgagtttgcgaggactaaggggtttcttaggataaagaactttcagcgctcagccaaactgagatggtggtcaccctagcactgcctgggttgggaactcaaaagccatgcaagcaatagcatctacagatgagagacgtgattgctttcactggtagacaattatttttcacaagcatcctggagagatgcttggactttatggtctttatggtctttttcaagcccgagattccataattcctaagttttattttgttgtgtgcctagggtctttaaagaagctggaggaaaaggacaaaaaaaaaaaaaggttaagaaaaagaaggtacaagaatctccattaatgacctgttttgagtcatgtgatccagagttatgtcattaactctcttttactaacacaatctttcaaatatattttgattcacccacagaaacacactctcacacagagatactcacacaccctcttgctttgccaaacatttatcttttttccctctgagacttacagattaaagcccgaattgctgctagtcttcagcaggtaagccttagcattctgaatggtgatctcaagcatgctgggggccacttcagagcccccaggcgccggctgctgtaaatcatagtcactgtttgagtcttcctcctgaaaaacgtcaaatctcagctctttctgtttagcgttgttatagctcacgtcccttcgtccacacaggtggggtttgggttgctgagactgttgaaaggtgtttccttctgactggcttgtgtgatgaggagttgattctcttttatcagatgattgttccaaaggatcaggataaggtgtcccagcttcaggaatcacactcgtggtcctgtccgactgaggtggtgccgcgaggtcttgtctggccggagccaggggagaaggagaggaagagggctcccgcggagagacaggagcaggtgatgatgtttctggtcccgcggggccacccagaggcgtcttggctctagactgcgggctccaaggacggctgcttcgggactggcgtccagtttctggcccctgcttcgcctccaagggctcagacgactcaggctcagaatattggggagaagctgctgtctttccttcccatggccgccttgtttcccctagttcttcttggttttctttttcttgcttcggggaggttgagtcctccatggaagcagttcaagaaaaaaaatgttctggatgaaaggggcgtgaaaatatggaagaaggcaactcagttaagttactttgccgcggtctcttaagcgatttctgggtcctggttgctctgtgagttgctgcgtcctatctccatagcaaccccaggccgggttcctctcagaaaaactcaccgcgcctgttgccaggattcgagggcggagactaagagagaacgagagagagagatgaaaatcctagctttgtgattcggtacaacccctgcccctcgttctatcgcagccaatccgacctagactcgaccagtcttgcttggaaaccgagaactccagatcctgcgccttgagcacaaagtaggaagaatggcgaccccatgcgagagacctttaggggtctgagactgatccaagttgtgctgtgaggagcgagtcgtgcgttagtggagggacagtgtattcatgaagcgtgtgtgtggagggtgtgtgtgtgtgagagagagagagaaggaaggaaggaaagaacggaggaaggaagggagggagggagagaggagagtgaggggtagagagggaggaagagactgaccttggtaatctcggaggtgcaggtaacaatgggaccccagtgtgctgaccaggagaccccaagcctcacatttagcgtgcatcagctacaaccaaccaactctaaagactcggagaatagacaaagcagtcctgagttttgttcttcctgcttataaggaatctcctggtgattaggcagaatattatacttgagaaggcaatgcagaaaacctataaataggcaattcatgggttacccgttttctaataattgaaattcaaattaacactaaactatattggcataatataatttttatttgataatgtaaatgtaaatgcataattttgcaatgatttaagttcaagattatgactattcatttatagtatacagtctccaatatgaagaaggtatagaagattggaccatatctggacttaactataaaccatatattaattaaagtctttaatgttaattgttttgtatttctttctctttctaaatataccaacaaatacttggcatttgacagtttacattgatatagcttctatttagcaagatgttgctctaaattctaacttcatggaagaacataatactcctccattcagtgtggtgagggaatcacagactaaaataatttgataaaaactgtgtgcacacacacaaaatgttgaatataacttctgctggtacagagactctttaaagtcaaatgtctgggatttagaatgcttggatttctaaaaacagaacattaagataaactagaacaataaattctggggttttttggtaattggtgcaagagttgaggaagttagcattttttcccccttaatttctcccttgcagctggcaagctgtaatggaggctttttttttctttgaaagacaagccagagggccaggtgtggtagctcacacctgtaatccaagcagtttgtctttttttcaccaggtaatcccagcacttttgtgttttttctttgaaagacaagccagagggccaggcaagatggctcatgcctgtaatcccagcactttgagaggccacggcaggtggatcagttgaggtcaggaatttgagaccagcctggccaacatggtgaaactgcatctctacaaaaatacaaaaattagctgggcattatggcgagtgcctgtaatcccagctactccggaggctgaggcaggagaattgcttgaacccaggaggcggaggttgcagtgagccaagatcgtgccactgcactccagcctggacgacagcctgttatccaggctggagtcagaaaagcctgtgtcaaaaaaaaaaaaaaaagaaagaaagaaaaagaaaagaaaagaaaaagaaaaaagaaaagaaaaggaaaaaagaaaagaaaagaaaaaaagacaagccagagaagggtagtagggccaggagaaagaacgcatgaaggaacagacatagcttgcttatctctccagtttaggagtgaagagcacctgaaaggaacaatgtaagtgtccgttattattcctgcttcattttcagtccagagctttatcttgact

SEQ ID NO: 585750 - DNA, 4001 bp, Homo sapiens
accgagtagctgggactacaggtatgcaccaccatgccctgcaaattttcctttttttttttctttttttttttttgagacggagtctcactctgtcacccaggctggagtgcgtggcatgatgccagctcactgcaacctccgcctcccagattcaagtgattcttctgcctcagcctcccgagtagctaggactacaggcgcccgccaccacgcccgtctaatttttcgtattttcagtagtgtttcaccgcgttagccaggatggtctcaatctcctgacctcgtgatccgcccaactctgcctcccaaagtgctgggattaaaggcgtgagccaccacaccctgccttttttttttttttttgtagtgatgaggtcttgctatattgcccaggctggccgaatggactgctttgtaaggtagtaagctcccctttagtcaaaaagaggctggccgggcatggtggctcacgcctgtaatcccagcactttgggaggccgaggcgggtggattacttgaggccaggagttcgagaccagcctaaccagcatagtgaaaccctgtctctattaaaattacaaaaataataaataaataaataattgccaagcgcggtgggtgatcccagcactttgggaggctgaggcggacggatcacgaggtcaggagatcgagaccatcctagctaacacggtgaaaccccgtctctactaaaaatacaaaaaaaaattaaccgggcatggtggcgggcgcctgtagtcccagccactcgggaggctgagggaggagaatggcgtgaacccaggaggcggagcttgcagtgagccgagatcgagccactgcactccagcctgggcgacagagcgagactccgtctaaaataataataataataataataaataaatagccaggtgtggtggcacgtgcctgtaatcccagctatttgggaggctgaggcaggaaaatcgcttgaatccgggaggcggaggttgcagtgaaccaagatagcgacactgcactccagcctgggtgacagagcaagactctgcctcaaaacaaaaataaataaataaatagctggatggtcctgtatggtagtgaccagggaattttccccagctctctccccattccgcattcgttctctatttccaaaagcgcctccagctccagagcagatacctctatcaaagagcaccaccctctccctctggcgtctgactcttctccaaactgagccttctccaaactgagccaggcccagcacttggctggaacctggcttcttctccaggtccgcattttccagaaaccttcccactgcttcacctgcgttcttggccctgtctctcttataaacccatccgcatgtaagtttctcttggcctcctcaggcggagaacaagctctcgcaaggccccgccctccgggggacatcgcccgtccattgccccgccctctcaggctccgccctagcctcagattccgagacatccccatccccgccctttccctcaaccacctcttgaccgtccccaggcccgccccccagggtctcccccattccactcatctcagatcccgcccacacctcccttggccccatgggccccgcccctttcaattgctgcgacccgcccaccccgccctgcctccaggtagccaccctctggggagcccgtcccgggggcctcctcacctatagagcgtcttgcgcggtgcgagctggtcctcactcaggccctgcgcgatgtagtaatcggcgacgaggccaaggatgcggccccagaagagaacccgatcatagcggtagtcgcgcttaaccagcataagagacgtgagcagcgaggcccgacggtccgggctgaggccctgcccactgccggacgccagctccagagacagcaggaggctgtcggcgtccatcaggtcagcggctccgctcaacgcccgtcgagttgctaggagaagccgcctccatggagacctgaagctccgcccttccgcctagctggacgctaggttccacccaccccaccgcctaccgcccagacctcctccccacggaggcctaggcatcagccccctccctcatcctttccagagtttgggacgggatgtcttcagttgccacggccacagtatggcttcccctacagttaggctacagttggggttgtaagtccaaacccagcctttttccatagatatttggccttccctgagccctttcacatagtcgacatttagagtctttactgtatatggacctggggtctggaaagaaaacaatacaaaaccccaacactgacactaactgtactatttcaccccagtcatgtcacttcttgacctcagaatgatctgtgaagaatttgagattcctcctggctctaattaagattctgtcaacccgactacctccacccgcaccccaccccaagccaggtcttacagaatgaggtccatccattctcttccatcttcaccagctgtcttctttatctaccctttccatagaaatattctaagtgacaaatgaaaatctaggcaatgggggcaaggtatagggtaacaccttgggaaaggagggtgaggagagagatacaaaaagggggacttttatagactacactttctcatcaactaccacctttctcatcaactaccaactaccaccaactgttgtttttagatccaaatggtagcaagagatgaaaggccagaacctcactgcaactggagcttcactccctgggctagatcacttctccacattcacttcttgagtccccagccaaggacaaacaaacaggttcctcagcaagcttgttgccacaggagatgggctttatcgttaatgttgctagttgatattttcatttctggattcctttgaagagcactcaggaaatcagaatgacctgggccccagctgataaataagtgtgtaaataacccagataattacttttttgattgtctgggcattgttggttttcgggggttgagacagggtctcactttgtcacccaggctggagtgtagtggtgtgtgatctcagctcactgcagcctcaacctcctgggctcaagtgatcttcccacctcagccccccaggtagctgggactacaggtgtgtgccaccacacccaatattttttgtatttttagtagagacggggttttgccatgttggccaggctggtgttgaactccgagctcaagtgatccactcacctgagcctcccaaagtgctgggattacaggtgtgaaccaccacgcccaggcttaggcattgtttaggaaggcattgttatgagatcagcctgaccaacatggtgaaaccctgtctctactaaaaatacaaaacagccgggcttggtggcccacagctgtaatcccagctactcgggaggctggggcaggagaatggcttgaacctgggaggcagagattgcagtgagccaagatcatgctaccgcactgcagcctgggcaacagagcgagcctgtctcaaaaaatacaactaactaactaaataaataaataaaattagtatttgagggagttgatttggcttaatgtgttatctcaaaacaatttatggctctcttgttcacaaccacccccactccctttaggcagacctctcagcctttcctttccctgagcgggagatacggctcaatctctcttctataatagcattaaacagaaaaacagtcaaaattctggctggcagtaagggaggagaccacccctcatattgtcttatgccaatttctgcctacaaagaagtaaaaactaaaaggcagaaatgaaatccacgggcagacagcccagcaccgcgccccgggcctggtagttaaagatcgacccctgacctaatcggttatctatagattacagacattgtatagaaaagcactgtgaaaatccctatcctgttttgttccgatctaattactggtgcatgcagccccccgtcacgt

SEQ ID NO: 585751 - DNA, 4001 bp, Homo sapiens
gcgtccgggccggaatgaaagagtgggtggggagttaccagagtacacaccattcggaggccaagaataataaatcggatgccctgacatatttagtttgggctctcctgccccctgctaggtgatcctaaaggcggtgaggcccggccagggcccctgtcgctctggcactgccacctttttaaaaggcaattttcaggtgaatcaaaccttgtctggccgaggccagcaatacaaagggagctttcaggggaccctcatgcccaggggcagggcagggacaaacagcggccgagaagcgattactaaatttccatctcacacaagccggtgttgtgtcctccgcgctgccccgacgtctgccccgaaaggcttcccgggcgggacgctgggagagggatccccttgggaaaccaggtggggccgctgggcctgggctgcacgccgcggaggtgcgagagcccagagcagcagcatcgcttcctgcccctcgcgagctccaggagaagtttcctcctccctctctccaccagcgcccccaaccatagagccagggtcgcccctgctctgagatctgcgaaaggactccccatgggaacacagacactagagcagcgagggcgccaggctaccctggagcgaggagaggtgacaccttcgcatctgtcccttcatcttgggaagattctacctttcagacagaccaacccaggttgaggctgccgtggtggtgtccgcttaattccagctaggacaccgtcttaagaagccatcacaatccaaccctccaaataacagcattaagggcagcgaggaggcgaatctttagggagaccccactctctgtacgtgtgtgtcccaggggacacacttgaaagggccagagatggtacagacgctcacatgtgacaagagagaacctggaaactccgcacctccggctccccacagctggggttttgctgtcttcaaccctcgggcgggggacgtccggcagctctgcaaacgcgcagacacgcgaaccccatcgcctcgcgcgccctttggctccgctggtgcgtgtcggggatgcggccgcgcaggcgctcgctccctggcttcctggccgggtagcgggcgttcggctaccggagtccagcctaagggcccagccgaggtctccccgcgcgaggcggttgcgctaggtgagcgggtaccgcggccgcgcctcccttgtcatttactcagcggtcagaggcatcctgcgtctgggagtcccaagtgccttcggctgggtgcccctgtccgatcctcaaaaggaaagcacaaatcccgggtgcgagtctaacccaggaccgaactttcccgcgaacctgaagttaccatggggcgggagccaccttagcgccgcgtccgcccgcccctcgcaccggctaggatgctgcggaaggcaggggcgccgagaggcaagggtgaaagacgccgtccatacccccaaagcccgaacctgcatctcctctgcgaggcgcagggcgggaggaccgctgcagttgggagccggctccggacaggcaaagcgacccgacaggtgaacgcggcgggagggagcaaacgcgtaaaaaaccctgcacttacttcttcgctggcgccttccccgggaggcgttttggctgccgatgtattccataaagttcaaaatgataaaaagccaagaaatcagtcgcaagtgcatagtaacccagtaatgcttcccttcctttctcctctttcttttgattgttaattatatttaatgtttttaaaatatatgtaggtgttaggcgtatatagacagtgcccgagcagcgggacttctcctctcacatccgataggcgtgctgtgatggcaagcgaagtggggcgggtggacagggaaaccaactattgtactttcaaattatccaagcactgaactgcggcggcttcgctggggtggctggcatcgccgcgaaccggggttccaggagccgccggggcggccgcaggtagcatgttgtgcggcaactgccgcaggcgggatccgggcgggcgagcggcggcggcggcggctgcagcggcggccccttgggctcagaagctgcggcggctgcggctgcagcggcgggggcccctggagcgcaggggagcgggcgccgtcggcacagcggccatggccaaggggcggcggagagaccccgagctgcttctggcgtgcgcgagcaggagacgctccagtgttgggctgggctcccgggagcaccacataggggaggaggaggaggagggcagggaggggggagggagaggagggcagggagggggagaggaggggggatggctgtggggggcgggggggagctcgggggcggggaaggaaactgctggagcaacaaccctgagcgacctcaataactttcaatttcaagagggaaagagggagctggaaaagtacaggcgttgcgctttggcagagggacgggaagaggcgcctaaggggtcccgggtctacagcgcagcatctctggacactgcagtgacggccggagaattccagccagaagaatggggaaagcagtgcgtgcgaagagcccctccagaagggcagctctggcggggagacttgggcgcactggggctggcaggcagtgttgaggccgaagaccccccacccatcccagttcggctcctctccgcggcctcaagctaggcgcacccggctgtcggtggccgtgcgcccctgcgcccttgtgccccagcgcccccaccccatccccagcgccggcgcgcaactaccctctcccccttggcagatcgctggagagtttctggctgctgacttgttcccggctttcctgaccttctcctctgttgcctttctccctttttctttttctctctctttctttctttctttctttctttctttctttctttctttctttctttctttctttctttctttctttctttctctttctttcttttctttctttcttccttcctctttctttgtctttctttctttctttccttccttccttccttccttccttccttccttccttccttcttctttctttctttctttcctttctttctttcttttcggctgcagttggtcgccaggcgggtggtggggaggaaactctgtgggtgctgccggtcagctactctgaggtttacctgctccgagcggggaggacccagaagtgtgtgcgctcaggaccttcccgttggaaatgcagctgtgctacggctttcttccaaaccaaggcttttctgtggctttggaagattcctttcccgctcaggcaattccctctatagtcagctcgccccccttggagttttctctcccaccctcggtctcccagtgttcttgagaggatctgttgtacattctaatctcgcatctggaagactgggaataagatttggaaagattttcccagtcttggggaaggaaggggaaggtccactactttcttatcttcccagcccaagtggaggcccaaggcagcagagagtaagatgctctggcccacccagggatgggagaacagagggccggcacccctgagtggggcacaccctggctgtcgttagtaaatggtgagctttccacgtcttttctccggtagcaccagccgatgaacttttcagtaattactgaagaagtatttagtcgaaagtcacaagcctcaagtgattttaacataagcctgccctatgtattatatttaacagaatatctgaaggactacactagcactacaggttaacacagcagcaaacttctgggaggtcactttgaaagagtccctgattcataggtgctttgctaatttttgtgctcaaataattcagtgtaagtcaattgctaaagccttgcagagtagcaagtgacacttgcacttctatctccttcctccatttgtaatccctattactggattgccttcaatttatgtaaattaggtaaatttacatgaattagagcattt

SEQ ID NO: 585752 - DNA, 4001 bp, Homo sapiens
gttgacaaagcatgggatcaatcttgaaagaacttacaatcaaaggagatgaaaaaacatgctgatcattgagtaaaacttaccactaaaagacatatcttataaaaaactgaattctcttcaagcctaatataaaaagaataaaggaaaacggcatgcccaactggtagtagcaattactacttcaaaacaaagaatacaaacgtagacttcatgagacaatcacagtaaagtcatttcaatgcttttttttttttttttttttttttttttgagatggagtctcactctatcggcaggctggagtgcaagggcgcgttcttggctcactgcaacctccgccttccggattcaagcgattctcctgcctcagcctcccaccaacacagtgaaactcccgtttctataaaaatacaaaaattagctgggtgtggcggcgcatgtctgtagtcccagctacttgggaggctgaagcaggagaatcgcttgaacccggaaggcggaggttgcagtgagccaggaaagcgcccttgcactccagcctgccgatagagtgagactctgtctcaaaaacaaacaaaaaaccccataaattctaaactgactaggaaacaactatacttccgaagcctgtgacggatctcagaataccacaaagttccctggacagaaatttagctacaaacataggcagggcgcaatggctcgtctgtaatcccagcacttagggggcggaggcagaggatcgcctgaggtcaggagttcgagaccagcctgaccaacatagtgaaaccccatctctactaaaaatacaaaaaattagcccggtgtggtggcatgcgcctgtaatcccagctactcgggaggctgaggcaggagaaattgcttgaacccaggatgcggaggttgcagtgagctgagatcaggccaccgcactctagcctgggtgacagagtgagactcagtctcaaaaaaaaaaaagttagctacagacacagttctcaagtctgaacttacatatttaaggacgcatgaaaacaatcaagcttatattttgtcaatacaaatggccagaaggattccctggccattgcaatttcaaaaattttggaaatatttgcagaggtattgttaaaaacctaaatgattcatttatgtaaaccaaagaagcgtagtcaattttttaaaacggcataccttatgaaagtgatttttttaaaaaaggtaacaatgtcttttgaaaacttacttctcatattaacgtctataggatttacactggcagcgtgaactttgacaatgacttcatttggatagtgtatgataggcatcatcatgttctgagtgaatcgaagcacttcattcttcccatatttatctatcacccaagcaggcatgacagtgctcctaggagaggtagtactaatccttctaactgaaggcttttggacaactttgcttctccagaagcaaaccgcagtgcatgcatttcttctaagtacacaagtcttcagaaattccattgtaaacactggttgaactgcgtgctcaaattcaaatacacttggactggatcaaactctcacccctgaattcagtcaaattctgccaaaccacgggctagtttcaaaattaagcatgcaaaacggagcattcgaaaatgaagctaatctaatggagaaactgaaagaagaatacggaactgttattccgctcttcgcatatgaaatgctcgaattaacgttccagtcagtattctgtccattctcctccctcactttcaccccctccactttaaaaaaaaaagggggggcggggcattaaaaagcaggtgcgcaaaccccctagatccctgccctgtcctgggagccctcggcgggacaagcagacaccgctcgcgatccaacgccagagaatcgaacgcttgccgactgccgccgcgaccctggcccggaatctccttgcctgcccgctctccttagccgccgggatggctttgcggcgccaaccaatcgcctacaaagatcatttcctcgggctgcaattcaaccaatccaagtactcggtgttgaagggctcagtgacaattaaagatggctgcgcccatgtaacatcactagcgaccggtgacctctttttcccccttgcctggctcctgtggtggcaggctgggcacgaggaccatgctgggccggagcctccgagaagtgagtggaattggcccgctgaggcccccgggagggcggaaagtttaacggacttcgttgacaaagagtccctgggccttaccacgcatcttggcccacctcgctgcttcctctagaactgagtgggggataagtacctttcgattcttcgggtgtactcgccgtacccattcaggagttaggaccttagcagggaaatctctgcaccgcggatctgtagggtggtgaagcggcttctcaccattagacatttgctctggtgtaggtcgggatccggatggtctcggagtgggctttgccaaagggggcttgcggggccacttcagtctctcttctgtccccgacacttagctgcagttgtcgctaagaagcccggcgaaactgtagtttgcaaaattcaaatgagtaatttttggcttttttcaaagaattcgttctctaggatttacctaccactaagataccagtgatttcctaacccgtgtctccatgtcctggacgtcgtgtttgaattctagactgtatttgtgaatgctttctgggcagttcttctaaatgtcacataagcaccctcaaattcactttaatcggtgttgaagtaatcattgtaacaggacttacctctcaacccccgtcttaaaaaagctctggtatttctgaattcttaatagactctttttaatggcacaactattatctcatttgcctttagattcttcctcatctttcatatccaataaatcactaagccctcttcattctatcttgcagatatggctggaatctgccctcttacgttatttctgctgttatagctttaattcgggtctttttgcttcctggttcacgtcactcaaccttagaactgtctgcaggcccattgctatcagagtcacataaagcacctgttgaaactaaaactatgccccactctagacttaattagagctgtgtggtaagttcgggagtatggtttaatggaggctccaggtgatttctggtaagaagtaggcgctgatgacctaaactgccttccatcttcctttttattccaccctagaagttgtcgttttgtttgtttcccagctggcagcgtggaattataattatagatagctgtaatatataatgagaaattgaaatccacaggctttaaataatagttcttcccccaaaatacattattatgttatcattttaaattgcgtcgaatcaaatttgttctttaaaaaataaatatgcccggcgcggtggctcacgcctgtaatcccagcactttgggaggccgaggcgggtggatcacgaggtcaggagatcgagaccatcctggctaacacggtgaaaccccatttctactaaatatacaaaaaattagccgggcgtagtggcgggcgcctgtagtcccagctactcgggaggctgaggcaggagaatggcgtgaacccgggaggcggagcttgcagtgagccaagatcacgccactgcactccagcctgggcggcagagcaagactccgtctcaaaaaataaataaataaaataaaaataaataaacagacaacacccaaaacttgttttaaaattaaatacaacctataaaaatatgttatttcctttttctgccttttccactgtcaatctaagtaacagaaagagactctaaagaaaatatttattttggagtagcaatgcaatgggaatatgtgtaatattgtaaactatgtgcctattcaagaaggttgaggcaagggatgtttttaaagacagaatgagaaggattacttaaattattttg

SEQ ID NO: 585753 - DNA, 4001 bp, Homo sapiens
gtaattatgctatgtgttgtaatgtagtctagctgtgtttatgtcctgcttccttaatatagaagtttttagagtaatacttggtacccatcattaaaattttaaattaatctgtgattattatattgtatatattataactgagggggcccacttacagctattgagggagtcactaaagcaattttacatttttttttgtaaaatacaaagtacatttcctcaccctgtaagagaaaccattttttctcccttcaggtttaattatttctgtttgacctaaactgagactgatcctctagtagtatccagttaaaatgtgtgaagtaggaggagtaaaggaaactccagtcattagttgtaagttaaaagcagagttaatatagatgtacacagcaagaaggtttattttaatggatataagaaaaatttttgaaaacttgccttgtagttggaacatgttggagatcataaagagaatcttgtaagtgtgtttagatattttgctataataacacatcagctgatgaatgttaaagtcatttacatatctgtatcaacagtaacttgaaattaaatattaagggacaagattatgcctacttcttttaaagtccagcatggtttaatagttgtggcttttaaaaatcatacagggtatccttatggagctttatttttcatgagactaaacagcagttattcattttggtaggtccaagaatgtgattaaaagaatcttagacgtttcagtgtttcagtgtgtttataacaaggtctatggataacagtgtgtagatgtaaaattaaaattacatagaaaaatgcagttgcatgtaagttttaaaatacttccatgaactttttaatatcctgggcaactataaagatcttttaaaaatggctgtgatgtgcttatcataattttatttcagctgaatgtatacttatataaagttgtttagaaacaaacttatttagataggatacagtttgaatttataagtagatttcttttagttgagctggttaaaatgttaactgtactacaggtttatttctgtgttatacatggtagaccataatgttgagataattctgtggtctgttattttgtaaaattgcttcctttttgaagtttgctcaaatattgggagctgccggagtcaataatttataatgctttgattaatttaggatctgacttttcttctggtgagggttaatgagagtattaaactgtttcttttactgttttcatatcctcacctctataactctagaaaacattttgatcaatgtgagataatttaattttgtatatttcaagtcattactttgaaaattagatacattacagataccaaatgcaaatatatacagaaatttcatttttcaattcttaatgcaacaagatagcataattaggatctttaatatgctatttggaaaagctagcagtttatcaaagaatcatacctttatgtttaacaggttcatatcttacaggattttaaaaatggtaacacttaccccaaaagaagttttgctgacatggtgtcactgtgctgaagaggctgtttgatgccatagtccctcctttttttttcagatagaacttgtaccctctgttgtaaatactgcttgcagccttaaactgaaaatacaaaccatacccaaaccttgttttagttttacagtatgcctggagtacatagactttatatttatttttttctgtcaagaaattatgtagctggtaacatgtgaaaagcaaagaaacaaaacaaaaagagaatgagcaaatatttgaaggacctactattactgcatagactgtggttagagagcactcactgactctgttggtctcggtggctggtagtgacctgcggagattaaccatttaaaaaccagagacttcttgctgtcctcctggagaaagtttgcaccgcacttgtggttctgtggttgtttgtgaggcgaatgaagcattcacacaatccaaaaaagcaaaagctttaaaactccttttttttgcaagcactattactggagaggcagaatcatgtggtttgtgacctcacagtactcttaagtaaagtgggactgcctaccactgtggcttttcccccttgctctttctctctctctctttctctcacaaaaggcttgtggtaaggcctttcctggcatccagaaggatatagctttttaatttttgtgactcatgaggatttggatagaatacaaatgctgaaggagcccaaactcctgtaaggttaagcatttgtagagcagagctctgcagttaagggctttcctttctactccccgctcaacctctgcctttttgcctcctctttttagttcattattgtgtctgtggaaaaatgaacaaaattggctcaagagtctgtgtgaaattctgaacaacagtgatgatatacaataattcacatctttggactgtatcacattctggggtctgcttcatatttgctgggtggctggattccttctgttttcctttttcttgtcttcttaaacttgtgaatctgtaactcattgtaaaaaaaaaaaaagtttaccttaaggtctggttgcaaactgcttgctaggcttgactataattggctgtcatgaaagtgttagtctgggcattcttttacaaattttaaatcacgtctgtctagtttattatcaatctattagatggcggcctttacaataaagattaaatgtaatgtttcatgtataccattatctcatgcctagtttgaagatcttaaaaaaatgaatgacagggattgtaatatagtttattggatgaatcttagttttctttatgattgtaatattttttgtctttcattgaagtgtattcagtttatatagttctttaagtagtttagacattaatagagtttctgatagcagatcttctataaagtaaaatgcttatgttataatgtagattgttcagtatttgattctatgagcttagaatagagtgggttaacagaagctatgtatttttttgtttctaatggaagctttgaaataaattacaaaatgctgtgtgtagtaaggaataatgcccacagacagagtatgttagtcgtctcgatttgctaattctgattcagaagaaaattggaaacatctttgggaaactatctccttttttgcccctttggacaagtatgtatagaactcattttcttattaggatgattatatatcataggcagtgaattttatatttatgaatagagcttcctgttttcatcagttgggagcgatggagtatttttcaaccaaaattataaaggcgaacagaccaattttctaggcatttttttgccatttatccatgccactctaaatctgcatgttagacttcttcctagtgtgacagtaactaggagtggcataaagtaaatggggtgggcggagacagtgaattacaaaagattatttggaatgtgcagggaggtaagggctagggagacaggagggtgttagaactaaaatatccctgtgttcttcctagtgctattcattatctgcttttggttcatattagatcacaataactgtacaaatatgttcataagtttctttacagaaaatttgattttcccaaaatacactggtagggtatgggaatgattctagtcctttatttttcaaatgtccagaaccttttcagaataaacttttagtgataaaaaaccagaaatacattttggtgttttattttaactatggatttatcatgccttattgtatgtgtaaacagattttacattgaaaggtaaaagcgttcatttaacatgcagttattcatgtgaaggagagaaaaattattttttctcttttataaataagtcgtatccatattatctgtatctctaattagtatccaaagtaaacaaaaggagggttttgtccttatagcttgtgggatttccaaacatggtttcatgtgtacctat

SEQ ID NO: 585754 - DNA, 4001 bp, Homo sapiens
aaactggcatgattcctcccccaacttttttttttaacctcccccaaggccttgcttgccctgctctccacagacctcagaacccaggggacccaggcccacctactcaagttcagaggttagcaagggcccaaagcacctttctgagagtctcatctccacgtctggcttaccacccctgcatccctggcgtcttgcgagtgtggacagtcctgcgagtgtggacagcctgggaacccgtttccccatcaacccagtgtgcgctgggccctgggggctccgcgtctcccccctgtagagggctaccccgggaaatctggatcgggttatggagagccatcgggctactgtgagaggctccagatcctaaaacctcaacctgcggagcacctgcctgcgactcccgcggctgccacccgccctcaaactaacgggccgggcaggcacaagagtctgcggggcgcgcagaggccgctctcaagccttcgagctcactccgtgctcaggccaccagcaggagcctctcaccacctttcagaagcaggagggatcttttttagatttaagtcctttaaaaataataataaagcaaaaatacaaaatttcacctccgttttcaagttgggcgaactaaagttgttccacaggtttccctcatccctccctggcggggcgaggcgcagagctcggtcccggctggaagaagcggcccgagctcccgccccgtcccctggcccgcgcctcccagcactcgagggttcagcgcccaggccccctgaacgcccccgcttcggggcttgcggacgccccagcggccccgccttcctcccggtaacgggatctggcgcgggtcagcgaacagagcaaacgcccccgccctgacaccccctcctctggagaccctaggtttgtccaggaccctcccgggcactggtagcgcagcccgcgcgcctcagtcagcaccccacgcccagccccgggcactaatgcccggcaccggcaccccacgaatcccggcacgggagcccgggagggaccaggaccgctgaactctgcgggtcggggaaggggacgccgagacctgaggagaggcgtttggctgtgagggaagcgggtgagagcgcgcggagccccaaagagaggctgcgcgggcagcccgcaatgcggccaggccgggatgtcccggaaggacgcgggagccccaggggacaatgccggggatcctcgcccccgggaaaggggcggggtggagcaagtccgctcgcagtgcaagagtgggtactttggggatcctgggggaaagggagacggcgcgaaggagtgagtgagaatcaaggccaggcaggaggcatgaggagtgctgaacgggtcagggggactagggctgaagtcggggtggcagcgggcacaggtgggagagggagggatttgcgcggagggactgagccccgagcccgccagggcatccggagggaggcccggccgggggtttctggggttagagccgccaaggcaggaggtcttggaggacgtccggggcccagccccgtgggcaggaagacaccggcgggcaggttccgccgctcccggccgggggcggggggcggtgtagcctcttaccttgaaggccacgggcagggtcttgttgcagcgccagtgcgagggcagcaccgagcacaggaagttggggctgtcggtgcggacgagttcggccgggtggtcggcgatgatctccaccatggtgcggttgtcgtggggcggccgcaaccggggcactgcagctgccgccgccgcagccgccgccgccgccgcagccgccgccgccgcctcctgctgctgctgctgctgttgctgctgctgctgctgctgttgctgctgctgctgttgctgctgctgttgcgcagccaccaccgggctcacgtcgctcattttgccgggctgcaggctgctggagggggggctgaagcgccggctggtgctcggatctacgggaatacgcatcacaacagccacaagttagcgaagtggccgggggagggggaggagggtggaaatgaggggcaaggaggaaattgggggggtgaaggcgagacggggggaaagaggatggaggtgatggggctgaggaggtgagaaatcaagtttgatgaggccgactgccgggcggagtctgatgggccaacagagtctggcgatgcggcgcagtcgggctggcgggtagggagacccgggaggcgcagatctttgccggagtctttggaacacccggggtggcagctgcgaacgggcgcgggggtgtgtttggcctggggaggcgggggacttgagtttgcagcttggaatggggtcccttggggcaccgcgtcctgggtgcgctggcgccccctcccagttggagtccggtggtgaagcggtgtgggttcagcagtccagccccggggccggcattgccgcgcgctgcccgccaccgccgcgccgcgccgcgcgctgctacccagctgcaggcggccgcgcctccgccctcccgcgccgccgcctccgcggcggccgccgctccccccgcgcgggctgcacgctcagattcctcccgcggcggctgccagcccggctccccggctaggctccttcctttcccttcttttcttctcgccctctcacagccacctctttgcatccactccctcctgcaatttgcaaagctcccctgtctctcgcgcttcaaggtgccaagaggtaagtcgtgggcagcggatctcggggcaacgaatctcgagcctgcgaatcgcagccgctgccgccgccagccggccgcgagaaggagccccccgcgcgccgtgtgcagtttccgaagcctagaggcggccccagactaggggcaatctcgccaggtcgcgtcctcttgctctccccacccctaggacaaggaaccccctctttgtaggaagagattgaagccgagacaccagagagcccccggctgatctgactgtcgctatttttcgttgtaacttcaggagaggaggaaagaaaattcttgagcctctgtgctgacttctcagcactcttcaccctcccacctctacccccacctctgtctgagcgactcccaagggaaaaagattttgcagggtttgggtgttttttgttttaagtgacacaaaaaaaatgaggagggggggtggagggagatctagtcaaaatagtttttaggaactcaagtgcatagctggacatttcttttttcttatatattcaatcttgtcattcctagagaacaagaatgaggtgtttgtttgtttgtttttgttttaaggactgaaaaactgtcagctttgtgattaaaataagttgcaaaacccttgctggggaaaagcaccagccgttttccatgaatttaaatattttattaagtctattctacatctaagactaagtttcgtgtctgtcttccccagcgctcacggggaaaaattaaaaatacgaactaaaaaattcaaaatgcttccgtggctgtttatttatgtatttatttcctagtgtgggtttaaaaagcgactttggatcccccaaaaagttgtggtcgagaggatgaaggagcgcggaaaaaaagcggcactttttacctaaaatgtggtttttggaggctgggatttctaatgattaggtttttgtggtttatatagacacgactctggctaagtcgatcattacgctgatgagagtcagagcacgtgggtgtctacgaccagcctcaaactctgagccttcaaaacaaataaaacaatgtgctgcgcccgcagaagccgggaaatccgcttgaggctattacaccccaagaagggggcacagggccgttttaccctcggcgttgtgtactactacgtttcttgcttattaccaaactctttaaagccttccaaagcttgaaaacgtgtttgcgaaaaaaatcatcagttgccaaagtttcaaagattcctagtggagtagctgacacagtaaca

SEQ ID NO: 585755 - DNA, 4001 bp, Homo sapiens
taccctggctcagaatcctcaagcacttgggcatctgataagaatttcacatagcgaactataccagagctgtcagggcctagtacaatttgaaatacccacaagattatttcagggttaaaaacaaaaaaagatatcagttttataaatgcttatatgcataggatttagcgagggatagcttatgtccaaagaaatgaaaagaatagcacatcctgctgtcttgactctgcctacagtgttcatacctagtatgtttccaaagtactggaaatgaccaaacatgattaagaatatatccaacaactgaccctatattctattttagacatacacatataagcaaggatagagaagggagccagactccatacacactcacccagttaatgacactctcaaacccctcttcactcatccccttaacatcctcacagcacagatgtactgctggtgagagagaacatgaacaggactggagctatacagggatagctgagagacatctgcctgttggcaaagcagaacaaaatttgctaccattgcaagcagtggtcaaaaggtgaagccaagaaaactaagctaaacaatgaaagggagaggggttggaatttataagttaaagtaatataccttacactataaattctgactatcaacgataggcaacactcaaaggaaaggatggggaatgtaaatgcacacacctaggttctactcactcatattggctttatttgaccgcttctcaaatctcagaggagccatattgatatagttatgtagcatttttataatcatccgaagcatggcttaatagagaaatctcgtcctctaaattatacctaatgaacttctcattataatattttacattagcccaacctaccaagtaatcttctgctctctcaatctcagctggagctgaatcccaagtcccatatgtctggaaagtgaaagaacaggcaagcgttctggacgtataactcagtaccagccctgccgctaactcgctggcggacagtacagagcaagccacttagctttcctgaacccccatgaccttggcttggagcaggagccccaggatagatgatgtttaatctcccttccaatctaacaacctatgaatttatagcagaacggaaatttgggccacattatccattaggcattctgctgaatgccagatttttttttttttcataagaaaagaaacccgacagacttcagggactatgctactctcaaaaccgatttgagtaactgaaaacagcactctgaatcctataaactaaaacagcatcgtatgaaaaacagtttctaccttaataaagctaaaaatgtgaaaactaacattcttgcggctgtggaaaaacgaatcgcacttggagtattttttctcttaatgtattataaatctcaggttgctgtaggttacacagaaaccaaagtaatcccgactcaattttcaggcctgacaccctccaacatcacccggacttttagatttccgggaacaagcagagaaggagaaaaagtcactgggttgctggtaagtgactgaagaacttgaggagtggagggcaaggtggccgcgcggcctcaaggtccccttctccaccccaacctatgaggcccagagctgcggcagctcctgcccgtcctactccacctcggggcggctacaggcttgcggccgcgggagtcacctgtgaaggagtcagggtagatggactccagggcctccagctcgttgcgctgctcctcgccgtaatctgtcatcgtggcccttgctcttgcccatagatcgcccagacacctaggcggcgcgcagcagcccagacagctgccgcgccgggagagcgggcggcggccaggcgggcgcaggcgcagagtccccggctggaaggcccagggcccaaagccagacccggcttgcttaactgcagctccgcgccggcctccgcctgctccctacttccacgttcgactcgttctgcctggccagggggcactgatttgctgcctgtcccacactcgctcgggacttgctgggacggtgcgcgcggtctggcattcgccaaggacacctacagccggctcctgggctttgcagggcctgagccttagaagcctctcagcgctgcatcctcgctcgatgagtctgggctgaaaggccggcatcgcgcgtcagtgaaggatagtgtcgctggtggccgggctggggcgaggggcgtccgatgccttcaccttttctggtttccggtttgacgccgtggcgtaggtgctgcgggcttgcaacctagtgtggactggtggggctcaggagatttctgagcttctcgaactccgtattgcttggcgtcctacgggagttggacgagaggctgggaccagtgtagattccactgggcaggggagcaaaagctctgcactgccttgaatgagtatggaagggtcggtctaactgcttaataagtcggggtggatccaggagggagaaatagaccggaggtccggcttctcggttcagatctttaggcttaacttctgattttgtgaaatgaacgcagctggacgtatgatagatctcaagatgtctgtgattgtgtatttgtgaattgatgaaaggaatgtagatctcagtaataacaattatcatatgcaatgtaaaaattgcagtaccccgagaaatgttgagaacctttaatttggtaatacgacttccaagaataaacttgagcaagtagcatgcatctgtgatctccaaaatcattgcagcaattacaaagaaaattttcaaagaaccatgatggcaaaagctaagaaaatggctaaataaacatggttagctttatgaaaatgatattaaaaactatggtaacaataataaaggatcccatgttcctttattatattattgcgctaagtcgaaaaatggaaaattttaagaaaatactcaaaagctgttgcccacttttctgtatttttctttgttttgatttctctgtattaaagctggtttcactggtatagtgggaggaacactttttaaatgaaagattcctaatgatgaagcccctgaagcaccagaaggcaccttgatcttttattgaggagtgctgcttacctatagcagaggaacactttgatactgattccgtgtttacggtattaagggttgatttcaggcgttcttttaaactttaatgaaaaagtggagtctcctaactatgatgacaatcaaataaaatacataaagtaactttgcaagtataagttgctcattttttttggatcgcctcagttcagaggaattatactgatttattatgaggaaagagctgccagaggaaacagctagtgcattaagtcctaagtggggagtcaaggatgatttttggctggaagaactggaaagacgaagttctgttgaccaaaataagtgaggaagacagaatcaaatttggcaaggaaggtggcattacatctttaaatgactcctagatgaaagaaaatcaagcaaaattaagtttttttctcctaacagaataataaaaacaacctaccaaaagaaatgagatgcagcaaagcaacaaacatacaaggtttacgttagaaaaaggttacttttggttgccagttgcaatccagtaaatgtacctctttattttcattcctatttcattaacaaaatttttggtaaagcatccttttcaaaccttatgtatcactgtaaataaaccctacatgcttcagaatgctcaagagtgttactttgatactggagatggctcttgtaatcaagaaaacacttccgcaaatctttgtcacacctacataagcattattaagcattttttagtggatctctaatttcattttgaccataacacatgcttaacacagcacagcaagtcccttaactgaaattgtggaaaattctcatgaggcaaattgactttcttttagtgtttcatttttaatcggtaggtaga

SEQ ID NO: 585756 - DNA, 4001 bp, Homo sapiens
tacatatagcaagtatttaatttcaattgtgaaaagcattaccatggaaaagtggagggttccattgaagtgtgtaaccagcgggacagaatccagtctggagaaccagaaagtctcctctgagggaataacaactgaaggatgagtaggaaatagctacaacagtggttctcaaatgcccagtccacgtattacctatgctatgctaatgttgctggagataaatggatcagaagatggaggtaaattcatttttagtctttagatttttccatccatatttgctttctgtgttatggtgccatcaaaaaatccactcattcactccttaaaagacagttatgttacaggagatatttagatttatgaaaatcatgatacatgtgaaaggtagtccaactggatgggtgaacaaaataataatggcataagactgcaagatagcgtcaataaaaactccaggtatatttgttaaaaaggtgtatatgtttacataaaattaaagatatttactgaagacaatttatagagcattccgtatctttcaaacaaggaaatatgcacctggaatatttctatctttccttgacagaaagctcatgttctagatgtttcaattaaaaactgggcacctggcaaacacttaaatcagggtacctaccttgggctcttcaatctggagtgtaattacaaattcgatttttggtggcagcgcctcccttgtgccttccaaatacctctttatattcgtcagggcatttacatcttcaagttttacttctccttggttaggaaacatagaaaacagcatttccatctccagtagctgaagctgaaggctttctttcaccgaagcagacatgttgcctcgcaatcagcctgcctggaaacctcacaaggctcagggacgctgggtttgtcaatgccagccggtatccagcgaaatttcccgaaggtccctttacgtggaagcaattctgcaggaacgctttgcaccgagagctaggggcacaaaccagacacttgcactcttctttatttcctgactccaaaatctagtatgcacaacatcctctaaaacactccgtaaaaacccatattctgcgtacccgggctccgggttcccgcctcccgcaccccgcactagataggggaatctgcactttcaacaggtgtttggaactgtcccgctgcaggtggcaggcagacacctgcagacgctctgcaagcctgaattctgggaaaggctggggcccggcttccaatcccacccggggctcgggcttgggcggagccagacgctgcggcgagagaggccgcagtgccagcaggatgggctccgagttccccagcgccagtcgccacccctcggtcctggactcgcggaccgcccccccccaacaccgcggtggccttttcgcttgggccgcattccagggctccggacgtttacgattcactggcctctgccccgagggacccaggataagggtagggggtgtctcagaggtcattaaataaaagatgtttacagtgagctgggggaagggggtacccggggagacggcagccggagaaggcttcccagattcaaaggtttgggagatgacctcgacgtcggagagggggatgcgggccgccggcggcgctcactgtgggcgaggtcgccctgtccgaggcccagcgacggggctgattccccacccccgcccctagccaagaccactaggaaccccggcttcccaggaacgcagggcctgccgcccccagaggcccggatttggaggcggaggctgtgcctccgcggccgcagtgctctgagggcccgcgaccctcggccccaacccccgggccaccgcgggggcctcaccctttctggtcactcaatggtaacagccccagaccccgctcggaaccgcagccgcagttcctcaggcgccagctgcgcgcgacctgcggcgaggcgggggcggggctggcggatagtcctctgccgtgattggccagggggcgtggcgacgagccggaagccacgcagggccacgtctgcggttctgaggactgggtttgggtgcagacgttgttgcttgggcgcttctccgctgcgtgtaggtgaagggggcttcctgaccgaggtaagccgggccccgaggctcggagttgagaagggagactaccggtcggcaagggctcggtgggagcgggacaggtcagattctcggcccgacggaggggctagtggtctggcgggcgactgaccgagcggcggagcgcgcgggacacacctacaggcccctgcgccccgcgggcgggctggtcgggacgggccgcgggtctcctgccggggctctggtacgtggacctaggcggggacctcagggtggagtgccgggaatcacccttgtgcggtgattcgagggtaggcgggagagaggcaccaaggagatttgaagattgaatggagagtagggggatactcttaactttttgcgtggacgctggatttggcaaatatgctttcaataaaggcattcgcagaggcattgaaagtagttgtagggcctaaaacgcatgaaaggatgaactcatattatctggacctttttttttttaatggctttttggagttaacaggactggtttacactcttatgaataatcatgacacataactgactgctcagtttttacaaatatgtattcatccttaggaaagagatctgatcactgtcttgaactaaattagtttactgaatgccagctttttccaactggacaaaagcaagtatttttcaccatttcttgcaagttctgttcattgaagcaatgaaggacaataaagaaaacaaaattatgaggctagcagctggcggactgctcctcatctctgggctaattgggaattaattgacccaggaaatgtagtatatggactactgaaggaaaactactgactgaggttggaaaccccaagttccacttaatgggagtatcccagagaaaacagtattagtgggctaagggccgattttttgttgttgtttgttttgagacggagtctcaccctgtcgcccagcctggagtgcagtggcgcgatctcggctcactgcgacctccacccgcgggttcaagcgattctcctgcgtcagcctcctgagtagctgggactacaggcgcgcaccaccacgccaggctactttttgtatttttagtagagacaagggtctcaccatgttggtcaggctggtcttgaattcctgacctcgtgatccgcccgccttggcctcccaaaatgccgggattacaggcctgagccacctcacctggcctgttttttttttttttttttttttttgagaccgagtctccctttgtcacccaggctggagtgcagtggcgcgatctcggctcactgcaacctctgcctcccgagtagctgggattacaggcgccagctaacacgcccgactaatttttttgtatttttaatagagaggcggtttcgccatgttggccaggctggtttcaaactcctgacctcaggtgatccgcctgccttggcctctcaaagtgctaagattactggcgtgagccaccgctcccggccgatgttttatttttaaaagtaaaggaaaaaggtggcattctttcagaagaagatattgctagttttagagcaacatcttagaagggtgtcctgattgtttttagcaaatggaaaaagatctgggtagtcttggagaagaaactgttgccttttgcttttcctttaagaatatgtctctgtagtttgggagaaatagcaaaagaaccacaaagatttctcagatatttggggatatgtagtttcagtccactcaagaatctgactttaggcctcaatccgtcaccagctatctatgttaatttaggttagtttccctttttgtaaaatgaaatgatctttgagctcattggagtctctgaataggtgtaaaatcttcattttagttgagagtgga

SEQ ID NO: 585757 - DNA, 4001 bp, Homo sapiens
tgggaaagcagatgggatcaaaagggcagaaaatcagatagatgaaaaggacatcaagaatatcagaattagccgggcgtggtggtaggcacctgtaatcccagctactcaggaggctgaggcaggagaattgcttgaacccaggaggcagaggttgcagtgagctgagattgtgccactgcactccagcctgggcaacagagcaagactccatctcaaaaaaaaaaaaaaaaaaaaacacacacacacacacaaaaacaaagaatattagagttcttttaggggaggaagcatgcactgaaagatcagtcacctcaggaaaggcaaggggtctcataaagaccacaggcctgacaaggttagaggattggaaggtcaatgggccatggggaagttcacacaaggatctggggttacaaggaaaacaagaaaatgaaagtggccaggcagtaagttggtcacaacctctcacctgggggctgctgacaggcccggagaatcctgggggagctggagggggcagaccaggggaccccatggaagaactgatgactggaaagggagagcccagtgggggtggtggcatcgggggtgggggtggggccccagagcctccaagggatggagctgttgaagggggtaggggtggcccaggaggagaagggggagggactccctggggaaggggatttggggaggagctgtctgggcttcgggagtctgagggaggggtatgtacaggcacacagacacacaagagacagaagagacaaaaaaagaaaatgagtcttcaaacatccaactagagactttaattctctaataccccaccgtgccggacccagcccactccacccatccccaagttcagagacaccctgctgtcaaacaacagtgtaactccggctggtccgatggtagtgggttatcagaacttattaacatttgtgtcactaaaattggtatacaacctcccactgctatatttgactggctaaaaaaacccaaaaacagcgtaactcctcattgtggtgagaggagggagttgacaaggagaggaggatagttcaggtgaggaaaattttccaaccaatccatttgaatgaataccaggtcatcccaaagccacacctgtctcgtgggtggggcagcacgtggggtagaccatcgagcccctctattcccagcgtaaagccaggtagccagagcgtgcaagggaaagagacaggcaggagagacccctcctaagacgcaggatctgcctgtaaacgcccaaagtcctgaggtttaagaggaatcgtgcccttcccaggcccgcgacctccggtgcccaaggcctcaagcggtcacagctaggagggcggaagctccccttccccgccccgccccgggggggagggtgctaaggccctcgggagggaggggacgcgtgtttacaaacaagggggcgggagcgcaaggaaaagagcaccgggggagggtgtgggggaggggtcgcagataaagcggtcactggctcgcctgcccttctgctggggcactcaccccgcccgctgtcgcccatcccgtcccgtccagcctcccctggctccggctccggggtttgttgttctccgcctgccaccgccgccgccgccgccgctgcgggatccagccagggccgtcgccgccgccaccgggacgcgaccccacaatgcatttcttttcgcacccccaccggcccacactgccctgcggcatgccgctgagggaggaagggcgggcgagcggcccaagacatgatccctggctgagagtagggataccgaagaggtcccagggattcccaaggattgatcggaggattagctgagcacgaggaagcccctgagagaaagactctggcctggattgggtcgaattaagcccgtcgctctgctcagtaccaaaatgacagcgccaatgtggcagccatctttgtacagacgggaagtctcggcgcgagttcccgccccctcgtctagttggaaaccgaggaggcggtctcctccggcctgttagcccgcctcgcccaccctcccctcaaatcacctccacactcgcgcatgcgtgtcagtgcaggatggattcgtcgctaccggagtgccgccatattggtaaaggcattagggcgaaggtggaacggaacttcctgttctcgcgggatctaaaggcgggactgccacgtccaagcaaaccgggaaaggagaggatcccggagccggtgagaattctctgttttttctctaccatcctttccaggccttttcctcacctaatgagtcgtagagacgagggcccagagagtctgtaaagtggctggtgaaagattagtgtcccagggccctacatccgggaggtggttcgggataaagagaactagtcttgggaacaatgtaggtgggaacttaagggaatgggagagcggcccatagaggtggacggagggcgcgattggagtaaagcggaccctgtgtaggtatagagttgagtcaagtggagtcactgcctctgtccctctggtcagcgtgatggccagaggcctgggggccccccactgggtggccgtgggactgctgacctgggcgaccttggggcttctggtggctggactcgggggtcatgacgacctgcacgacgatctgcaagaggacttccatggccacagccacaggcactcacatgaagatttccaccatggccacagccatgcccatggccatggccacactcacgagagcatctggcatggacatacccacgatcacgaccatggacattcacatgaggatttacaccatggccatagccatggctactcccatgagagcctctaccacagaggacatggacatgaccatgagcatagccatggaggctatggggagtctggggctccaggcatcaagcaggacctggatgctgtcactctctgggcttatgtgagtctccaggggatgggagagagaagggctggttctggattgttgggaaactccacagtacttgaccttgactctccctcaccaggcactgggggccacagtgctgatctcagcagctccattttttgtcctcttccttatccccgtggagtcgaactctccccggcatcgctctctacttcagatcttgctcagttttgcttccggtgggctcctgggagatgctttcctgcacctcattcctcatgctcttggtaagtaacctctgacttctacctcaaatctaacctatttcgttctttggaggaaaagggttctttctcctttatgatccctgacctttcgatattcccccaaatacacactcattgtgtcagatattccctcatctggttttccccccttcttccagaacctcattctcaccacactctggagcaacccggacatggacactcccacagtggtgaggaagagacagatggggatgggagttggggtgctggggaaggtccgtctctccctattcctcacctcccgcacttgaggaggaggagtctggaatgcacatctcccttaatgtctcaatgcctccattcccaggccagggccccattctgtctgtgggactgtgggttctcagtggaattgttgcctttcttgtcgtggagaaatttgtgagacatgtgaaaggaggacatggtcacagtcatggacatggacacgctcacagtcatacacgtggaagtcatggacatggaagacaaggtgagcccaggaacaactttcctgaaagctgacttgcctgcctcagaatctcctcatcttatggccctcaggagggagaggacatgttggaagatctgttctccactctgaccaactcttttcttccctcagagcgttctaccaaggagaagcagagctcagaggaagaagaaaaggaaacaagaggggttcagaagaggcgaggagggagcacagtacccaaagatgggccagtgagacctcagaacgctgaagaagaaaaaagaggct

SEQ ID NO: 585758 - DNA, 4001 bp, Homo sapiens
cagtgagctgagattgtgccactgcactccagcctgggcaacagagcaagactccatctcaaaaaaaaaaaaaaaaaaaaacacacacacacacacaaaaacaaagaatattagagttcttttaggggaggaagcatgcactgaaagatcagtcacctcaggaaaggcaaggggtctcataaagaccacaggcctgacaaggttagaggattggaaggtcaatgggccatggggaagttcacacaaggatctggggttacaaggaaaacaagaaaatgaaagtggccaggcagtaagttggtcacaacctctcacctgggggctgctgacaggcccggagaatcctgggggagctggagggggcagaccaggggaccccatggaagaactgatgactggaaagggagagcccagtgggggtggtggcatcgggggtgggggtggggccccagagcctccaagggatggagctgttgaagggggtaggggtggcccaggaggagaagggggagggactccctggggaaggggatttggggaggagctgtctgggcttcgggagtctgagggaggggtatgtacaggcacacagacacacaagagacagaagagacaaaaaaagaaaatgagtcttcaaacatccaactagagactttaattctctaataccccaccgtgccggacccagcccactccacccatccccaagttcagagacaccctgctgtcaaacaacagtgtaactccggctggtccgatggtagtgggttatcagaacttattaacatttgtgtcactaaaattggtatacaacctcccactgctatatttgactggctaaaaaaacccaaaaacagcgtaactcctcattgtggtgagaggagggagttgacaaggagaggaggatagttcaggtgaggaaaattttccaaccaatccatttgaatgaataccaggtcatcccaaagccacacctgtctcgtgggtggggcagcacgtggggtagaccatcgagcccctctattcccagcgtaaagccaggtagccagagcgtgcaagggaaagagacaggcaggagagacccctcctaagacgcaggatctgcctgtaaacgcccaaagtcctgaggtttaagaggaatcgtgcccttcccaggcccgcgacctccggtgcccaaggcctcaagcggtcacagctaggagggcggaagctccccttccccgccccgccccgggggggagggtgctaaggccctcgggagggaggggacgcgtgtttacaaacaagggggcgggagcgcaaggaaaagagcaccgggggagggtgtgggggaggggtcgcagataaagcggtcactggctcgcctgcccttctgctggggcactcaccccgcccgctgtcgcccatcccgtcccgtccagcctcccctggctccggctccggggtttgttgttctccgcctgccaccgccgccgccgccgccgctgcgggatccagccagggccgtcgccgccgccaccgggacgcgaccccacaatgcatttcttttcgcacccccaccggcccacactgccctgcggcatgccgctgagggaggaagggcgggcgagcggcccaagacatgatccctggctgagagtagggataccgaagaggtcccagggattcccaaggattgatcggaggattagctgagcacgaggaagcccctgagagaaagactctggcctggattgggtcgaattaagcccgtcgctctgctcagtaccaaaatgacagcgccaatgtggcagccatctttgtacagacgggaagtctcggcgcgagttcccgccccctcgtctagttggaaaccgaggaggcggtctcctccggcctgttagcccgcctcgcccaccctcccctcaaatcacctccacactcgcgcatgcgtgtcagtgcaggatggattcgtcgctaccggagtgccgccatattggtaaaggcattagggcgaaggtggaacggaacttcctgttctcgcgggatctaaaggcgggactgccacgtccaagcaaaccgggaaaggagaggatcccggagccggtgagaattctctgttttttctctaccatcctttccaggccttttcctcacctaatgagtcgtagagacgagggcccagagagtctgtaaagtggctggtgaaagattagtgtcccagggccctacatccgggaggtggttcgggataaagagaactagtcttgggaacaatgtaggtgggaacttaagggaatgggagagcggcccatagaggtggacggagggcgcgattggagtaaagcggaccctgtgtaggtatagagttgagtcaagtggagtcactgcctctgtccctctggtcagcgtgatggccagaggcctgggggccccccactgggtggccgtgggactgctgacctgggcgaccttggggcttctggtggctggactcgggggtcatgacgacctgcacgacgatctgcaagaggacttccatggccacagccacaggcactcacatgaagatttccaccatggccacagccatgcccatggccatggccacactcacgagagcatctggcatggacatacccacgatcacgaccatggacattcacatgaggatttacaccatggccatagccatggctactcccatgagagcctctaccacagaggacatggacatgaccatgagcatagccatggaggctatggggagtctggggctccaggcatcaagcaggacctggatgctgtcactctctgggcttatgtgagtctccaggggatgggagagagaagggctggttctggattgttgggaaactccacagtacttgaccttgactctccctcaccaggcactgggggccacagtgctgatctcagcagctccattttttgtcctcttccttatccccgtggagtcgaactctccccggcatcgctctctacttcagatcttgctcagttttgcttccggtgggctcctgggagatgctttcctgcacctcattcctcatgctcttggtaagtaacctctgacttctacctcaaatctaacctatttcgttctttggaggaaaagggttctttctcctttatgatccctgacctttcgatattcccccaaatacacactcattgtgtcagatattccctcatctggttttccccccttcttccagaacctcattctcaccacactctggagcaacccggacatggacactcccacagtggtgaggaagagacagatggggatgggagttggggtgctggggaaggtccgtctctccctattcctcacctcccgcacttgaggaggaggagtctggaatgcacatctcccttaatgtctcaatgcctccattcccaggccagggccccattctgtctgtgggactgtgggttctcagtggaattgttgcctttcttgtcgtggagaaatttgtgagacatgtgaaaggaggacatggtcacagtcatggacatggacacgctcacagtcatacacgtggaagtcatggacatggaagacaaggtgagcccaggaacaactttcctgaaagctgacttgcctgcctcagaatctcctcatcttatggccctcaggagggagaggacatgttggaagatctgttctccactctgaccaactcttttcttccctcagagcgttctaccaaggagaagcagagctcagaggaagaagaaaaggaaacaagaggggttcagaagaggcgaggagggagcacagtacccaaagatgggccagtgagacctcagaacgctgaagaagaaaaaagaggcttaggtaagggccagagttggtgataaatttgggcaagggacatcatcacaaatcacatggaatatgtgctgtgggtaatggcaggtatctgagaaacactaaaggactgggtgtaaagtggtctctgaggggaggtgtgagaatagctgaccaagac

SEQ ID NO: 585759 - DNA, 4001 bp, Homo sapiens
gccattctcctgcctcaacctcccgagtagctgggactacgggtgcccaccaccacgcccagctaatttttttgtgtttttagtagagacggggtttcactgtgttagccaggatggtctcgatctcctgaccttgtgatctgcccaccttggcctcccaaagtgctgggattacaggcatgagccaccacgcccagccagtgaaaagatctttaaaattggtgacaaagaagggattagtcaatatattttgttgggataatgcctcataacacctacacaataaattcctcagataagttaaatatgtaaatatgaaaaattaaaaagagtttaaaataatctaagattacataataaaaataaaatattgatagatttgactaaaaaggaaaaacgcatgtgtacacatatatatcacagtggacccttgaacgacacaggggttgggacgctgactctgctatgcagttgaaaatttgcaagtaacttttgactacccccaaacttaactactaatagcctactattgatcagaatcttaactgataacatagacaattaacacatattttgtatgttatatatattatatacagtactgttacaataaaatgagttagaggaaagaaaatgttattaagcaaataacaaggaagagaaaacatttactatttattacatggaagtggatcatcataaagatcttcatactcgtcgtcttgcagtgagtaggctgaggaggaggaggaggaagaggagagttggtcttgctgtctcaggggtggcagaggcagaagaaaatctgcatgtaagtggacctgagaggttccaacacatgttgttcaagggtcaactctataatccataaaaccaactaaaaaattaatacaccaatagaaaaaaataggaataggtaactcttgaacaaaattttaaaccagtatctgaaaaatctacattatttgtaataaaaataattaaataccatcttcatttattccattggaaaaggtgaaaattagcaagaatgcaaggtcagttgttctcttacacactgctaaggggagtataaagtggcacaacttgccctgtcatattattcccattttataattgaaagtcctggagtttacagggtaactcgcctaaggttcctttgcttgtaaaggtaaaagtgatttgaatccaatctatccaactttaaagggtactaatgcaagccaaaaacattaaaaatatttctacattctgaccccaaaatagcatttctaagaatgtgcctaaagacattaacagaaatgaacacaaagatgtgtgccatagcaatggtccgaatagcaaataaattggacagataaaatttccagcaataggaattggccaatgaattacagtaatttatatttaaaataaaatactatgtagtaatcaaaaattgtatctagacaaataactatgtagagagaaacagtcatggatatggttaactgcaaataaatttaaaatagtatgattcagatttgtggaaagaataaaataaaagtagaatgaaatgcttggttacacaaaggctgggaaagcatatactagaaggcagaagtggcaatctctgtttggaggaattaatgttttttgtttgtaatctgccactcttaaatttttctcaatgaaagaattttatcttaatatcagaaaagttagagttttatagagaaaaggtaaaaagtgatatttacggattattgctggagaggcttttggtccatctcttccagaagagaagatcaaaggagagagcacccctcctccccaggcaaatccgatcagtggatgtggttctggttcctttgttttatctgaaaaatggaagatatcacctacaaatctggaatcttggtttctcttgaaaaatcaaaagttctggtgatactgggttcatatttctgaatggcagcaactgagcagtggctgccccattgaaagacagcaagactgggagcctcacagtacacaggaagcataaggtaagtttgaaacagggtggatctcagacagctaacgtttgcacctctcaaaggaagaagattctgacaagtgtgacaaatacccatgtatgtacatacatgtttaccataatatatctttggaacatttaattcttccttagttaccttttttaagctcctagaagaaataacactaactagaaaaaaaatttcctatatcaatcttaaggcagatataataataatgtattagaatttagacattgaattcaaagtcaaggactcaaagctttgcatctcagaaggttctagtgtcttgaggcttcattttctttgtagctacatcattgaactaaaatgcacaaacctttatttagcagacattggctgaatgtaattctcgttacatagctcagtgtgtacgtgatagtgcaggtgatagctgaacattttatagctctgagtagtggcaagaacttacattattaaaatattacaactatttttttggagttactcatttgttagaacacatgaaaggtgacttctgtatccacctatattgctcagctggtagagtcaagctgggctctcttgatctgttaacactaagtgctggtctgactttgtaggcctcttcaggaagaaggggatgcaaggtagtggatcttcttaatgcagtgtgactcaaagtgaaacttggaaacacccttgcagggcgtgcgatgggtgtgactcgcttcttcagtaccctgcagctcaaacccctagagggagcatgcagacgggcaggtcatggggagcatgggctcctaccccatggcagcacctagggttgagtgtttacagctccagaagccccagtgggagtgtgttacagtgcagtctttcagcttagccatccgcaggtggcttgtgttaatcagctcaattagatcctctgccttatcgcaaggacagagggctttctgtatcccaaggttcttgccttaatgtaccagaaaaattgaatcacatgtaggcttggagaatgggtgcacagttttattgactggtggaagtagctctcagcagatggatgggatccacaaggggaatggaatgggaaggcggtcttcccctggagtcaggccgctcagtggcctgactctcctccaaccacccccaggcaaattctacgtggtccacatcatactgctgttgatgtcctgccagtctgtcagtgtattctgccagtgtgttcctcttgatgtccagccgcttgtgtctgtgcccgctagggtctcagggtttttataggcagaggatgggggtgtggcgggccagagtgcttttggaaaatgcaacatttgggcgtgaaaacaggagtgcctgttctcacttacgtccatgggtacaggcctgagggtggagccctagccagggaccccattcttctctacccagcacttccctgcccgcctcccgtatcaaaagcaaagcacagatgggaggtgtggagacacaaaaaggcataggaccctgtgtttctcatgagtgacaaatgctcatgcttctgccagccctaggttcatgtgaggacgggccagaatgttcaaacttttgtttatgcaaaagcactctatttatttattattattattattattattattattattattattatttttgagatggagtctccctttgtcacccaggctggagtgtaatggcacgatctcagctcactgcaacttccacctcctgggtttaagcgattctcctgcctcagcctcctgagtatctgggactacaggcacgtgccaccacgcccagctaagtttttgtatttttagtagagatggggtttcactgtgttagccaggatgatctcgatctcctgacctcatgaaccgcctgcctcggcctcctaaagtgctgagattacaggcatgagtcaccacgcccagcccgaagcactctttttagagttggcccaaaaggtaaaat

SEQ ID NO: 585760 - DNA, 4001 bp, Homo sapiens
agtgaaaatgttgatcttcatattttgaccttttttcatgttaattcttgattccagaggaagagcctttttttgatgatgttaattgcattaaaacaagtttgatgtgagtgtatatatgttcaatcacatatgtattgaggatctgtgacttgtaggaagaatattatacacatcatttcattcaattttcacaacactttgaaatagatactttgttcctacttaagggatgggagaaatgaggtaccaagtccctctgttagtaggtggtggagcttggattacaggacacttggattactctctttctactatgcactcttataagatgggcttgttctagtggaaatttacatatctcatatagacacagcaaaaaatattatgtgtgaagtgcagtgctacttgatggcgagaagtagaaaatagttgacttctatccattatttccaaagccgatgtgtagctgaattcaaaatccattactggcatggtatattcactgtcagatgggaagatattggccattagtaaggataaataatttacctgagattcccttgagcactcaaggtcagggaaaatttataactaatgtgttgagagttgctcggactactgaattgcaaataatcctctatttacaggccattttacccgcctcttctgagactaatagtaattattttaaaaagaaatctaaataattcccttttggtgattttacttagtctatctttcttcttttttggtaaatcactaaaatctgagttcatagttcataaatgaggaagcatcaatatctgtggccttaagaatgtgcttattccttttttcatggctctcatcagtctctttttgaggacggctcagtcactcaatgcttaaaatggctagatgaccattttaaacgttttaccatgggtcttagagaggatgtcacctcaaatgatctatggactatgagcctattcctattactcactccttagatagtgaggggaaccaggaggtgtttcctctcaggagctttacagacaatgtggcttcagggtgtttctttataaaatgtagaggtaactaggaagagggcccaatggaagcacactcctttgatatggtgcttgacaaacacatttaagaaaacctaagagaattgagcaggtggctgtgggctagaatactagatgcaggtggggtaaaaataaaaccacagatggtttataaaggtgactcatccttcccccaccgtaactcctttagttttcttttctttctttttataaaacattttgattgtgacatctccactaaaagtgcccaatctctaaattcttctagtcaaggcaagaaggttataccacaggaaatccatttctacagtctcttctcattgccatatctgattttaaagacttttttttctaatgtggaaatttttgcatggctctcccccaccccccaaacacggattttatacccccccagaagcaaacttttcttgaaaacgagataaacagatcacacgccgaaataaacaaatacactgcaccagaatatcatacttgccttctatcacttaaaacagatccaggggacacaagcatagcacacaccttgtgcatgcggctggcctgcacagggggtggttggaatatccggtaattagttttacatgaaactttacttacggaattggcctgcatatatacagtcatcaccgtctttgccgaattagagacgacatattttactctgtgaacaggccagtctccactcactggatgtttggggtcaaggaggagtaacctgaacctctcgttggctttgatgtttggagtcgaacatccgcactgctcatcgaagacccccgtgcttcagttccctctgtcttccatttcccccgcccatggttctcgcccccccaagccgttctccggaaccccttgccgggccggcgggaagcgtggacggagcgggccttggccgcgtcttttccggccaggtttggtttagctcgcgcagcgcccgcgcagcccgccagggggaccccggcccgccgggcggcatctgaggagaaagcgtccgaggggcgtggagccagggtcctgcggtgcctgctccgggaatactgcgagtcggctggagctccccagccgctccggagaactgggggagccgggtccctggctcggtaaccggtggtcccgcggtagctagaggcgggccccacgggtgggtgtgtccgtttccgcacgccagccttccagcccgggaagagcgcctgcaagcgggtactttgttcccaaagatgggttttgtctgcgggtgatttgggctctcgaagtgcaactttgtggccgggacgcggatcggccggcctgggctcctgcagagcagatcctgtctgcgtcctccaggaggagtgggtggcaggactggggtttcccacaggttttggggcggcggcgagattggcacggtccggggtcgcaggcgcgcagccacgcccctggaagtccgccccggcccccgcccccaacccgcctcttcggggctttatggcgtgaggtttggggctgggatccatctggagccgagcagaaaacttttcccctcccgttcccggtcccttttgtctttcttggacgcggtggcggcgccgcctgagcggcgactccctctcccctgcccggcttgctgcgcccggtgccctccgagggcaggcgcgcctggactctgcgcccggatggcggcggccctctgtgagcaccggcagcggcgcatcccctgccccgaggcctccggtgcccccccggcgcgggcataggggcgcccccaccctccgtccgcttgcaccccttgccacccgccccctcgcctgactcatccgcccgcggtggccgcccgagccctgggatggggagggagaccgcggctgcccgcggcggccgagattcccgctgacgcccccgaccctgccgccttcttcgtccgcctccagaggcgcccgacgtcccgacagctcctggagtgagaccaggactgagaacagggagaggcgacccgacccccagggcccggtgctcaggacaggtgaggggaaggaaagggtgctgacgggagtggggaggtgggtgggcggccaccgcagccgaaaccgggcacttcttcagccctctgccctcccctcccctccgctacagcctccagagttaggtaaacgctgtctctcctaaagtttgggaaataaaccaagtccgccatcaggtccagactccccagtcccgggagcgcgagagaagccgtgcggggcagcctccaagaacccggagtactggagcgcctggctgggtttctccaagcaacaccctcctttgtctcggttcctgagagtcagcattctctgtaatgtccacagcgttaattcatgattgagcaaagtatggtcagggtttcgtaaagcagtatctggatggggtagaatctacacaggcaaaatggagaggcaaagcaattatttgcaaaattcagcactactcttctccctgtagtcttgtctgtaagagaaaggactgagggcttctaagatttgcttcattaatcattcttttgctataaattgttccagccaacacttcacattgtgtaggcgcaagctctctgtgtgtatttaccgctgtttgatttagaaaaatgtgtgtgtgtttgtgtgttttttttaaataacaattcattgttcagtaccgggcattggtaatgtcggagagaaaggcagatgcagcacatacaggtaattgactaattggaatcagccttagtccggtccaccttagtctggtgtatttaaaaactaaatatgttggactaaagtgtctcttgccttgtctcttctgaataccttcagaagtagttatggacaactgcatagaaaacatttcaagaatcgatgattattcttgtttataagaaagaatattgaactctcggttttgcaa

SEQ ID NO: 585761 - DNA, 4001 bp, Homo sapiens
ggcatctagagaagactataaattcattactctaagaaatcctaggaaaataaataaatagattaataaataaatagttttgggaaaagcaaagaagcaatcaagatgcctttcccaaaccctgattttaaaaccagagcttcaggatcccctttctccttgtgttacatacctatttcacctgcttgttccacagcattttatatagaaactccttgctaataggacatccctaatgattggaatccatgtttaaaaaatggtgaataaaaacgtttcttgattcttaaaattttacagtgtcctttgctcaaatattagaaataccgtacatacaatctagctgaaaacggtcacagttttccaagggctttaaacccaaacgtcacgctctagccatcattgggaaagcttgggaaaaaaaaataaggccatttatgaacatactcactctcgagctgcttctgtttgcatgaccagggctgcctttttggggttttctggggacttcagtccttgagtgttctgcttgtattttttaattaaatccatcagaacagcctggtgcccaattttctttaccagttgctgaaccatccgatcattaagtgcaagaagagcggccccacttacttcttcctctgggaaaaagaaaaaaaattagtttctacatgactttccggcaaaacacaggcattctgaagaggcaaaattacctctagtgataaaaggatcatctaaacttgtcccctgacattataaatttatccatatttttgacaaagataaaactccaatgttgcataattccaaatcaatgcctgctcctaagaaagtaccagaacatggaatcacaataaaaacttattatttctacattaacacccttctcattctaattctctctaactggtattgtttttataaggaaaaaaaacttaggaaattattcttcgtaatagctcctagccagtattcaactttataaacccaacactacacaaaatacatactgtattacttaagaacaaaagcaatattaaatgcatatatcaaatatgtattttaagtgacccgtaagacttttttatttgagttcttaaaatattatattctcttgtggatgttactttcaagtggaaactctgctacagtccataaagaaatgaaaagttctctactgcagcaaccccacatccacattgacatgcacacagacatttggcaacaaaagtaattttcagtaacagaggacaccagaatatctaggctgctcaattaaaatttttggaaagcataaacaactcaccttgaaatctatgaactagctctcctaaatttttctccaccaaccaactgcagacctgctcaactgaccaggtttccattgctgtctcctgtaaatacacctgtagagcaaaaggtcagagaattctccagcttttctttctgattgtgccttaattttttttttaacagtcagccgcttcctttgctagactcctttatcttctcaatgttaagcttttttaaaattactatttttacaatgtacatttaaaaattgctaacaaaacacacactcactttaaaaataagacctgatttaaacctatttcctagcatcccatttctcaaatttcttcaccttctcctactttttttccacaggcatctctaagctttactaacagacagccagggacatacaatggtacccaatcctgtaccattaacacccaggtttcttcacaaagaaaagaaaggtgtgaaattcaccactaccaggctcctcaggaagtggttgacatttacagaaggggtgggcaggagaggaagggaggaaggatcagataaaagcctgacagagatacttagtaaactggttaaccccttagtagactggttaaccccttgcttctcctggctaggagaaggagattgtaacttgctgcttctcattgttttccgttagcaagaagaggaagtaggacccacatttctctggagaatctgaatgtttctgtccttccttccaatactattcttacatacccctctgagttctagaacttttttggacactgttatgattggtaagataactaggataaactaccacactgactgaaaactttttacttaattgggcagattcaaaattggaaagtaattatttatgttaataattatcgtgaaagaagcgtaggcaagtttgcaagatatattctttaactatttcagttatttttgtatgccacttgtctgcaaccacttagaaaacttaaaactatttccctaaggaagcttattccttgtttttgtaattcaatccaaaggacctctgatggacttggagaggggtggggtggagggggggattgaaataaatttaaaacgttttaaccttttatctttacttggcaatttcaaatcttaatctaaatgatatagatttacttgcaaattaagatactgactattctgtaaagaccaaggaaaaagctactcttggagaaatggaatcataaggaaagattaaaatggttatcagtcgtgaatttaaattttattgatggaagttttaaatggaactattgttgtatttctcatttttgtatatttaaagaagttacaattaccaacatcatagttagaatagtggaaaaggggaaacatgtttaccttgcatatgtgacaagctggaaagatagtcttcaagaatcatttcctagaaaacaagtagacttcaaagtattaagccccataatcataagtgttcacaaacaccaacttgaaaaattgaaaacaagggttaaatatagaagaacatctttctgaatttcagcagtggatttaatttgctatgacaaacagtagccacagaacccctcccctaggctaagcagcaatagcagggtgtgaaaagtcattatttgcgagactctggtgtaaattaaaaatcacacctttctatcacacttctggcttccttgcgaagattaggacttagggaaaaaatagaaaatagagaaaaaataaaagaattctctaaactcgaagataaaaaggtaagcagagcagaagatactgccttgtagtcatcgatggataaaaggaaatttgaaaataaaatgagtacttggaaatgatcatgtatttttaaatttgcagatttttaccacaattctacttctgggaaaaacaaaacaggttaaattataacatcatacaaacataataaaataaaaaagcatatagtttttgcctagtagcttttctggagagttaataaaacaatatcactggctagacaacgtaacatctttgagtagtaactttacaacttcttctcacataaataatggatatattatttatgatcttctacaccatgaaggcataaactatatatcaaatgagaaaagatatatctggtagctttattctgagcttcagaaacatacgaaaatatttcaaaatgtgaaggcaagcattatctctaaatagttgaatagtggtatcatttttaagaagaattaataatacattatgtatgaatgctcctgacaaaccattatcattatttgattgaattataaatcaagaaaataaatttgtattaaatattaaagggcttcatttaactaaagccaagaagaggtaagacttcagctaaagcagcctaaatatgggcaagctttatttaataaatttgttaaaactacaaaggaagataatagggtcacctgctgtgaacgtgatttataatcttcaagggacaatctaacatataaaacatcatataaaacatacaaaacattcgaccacaaaagagcactttttaagaaaatatgaaaactttttgtcatctttctttctatttgcatttttcgctttattcctctgaagtccaaaagctgagacaacaaaagattcctaaaagttttgctggcggcatatgcccactcctggatcaatacctcattctgccctgagaa

SEQ ID NO: 585762 - DNA, 4001 bp, Homo sapiens
atattaaaccccttattcccatctaccttaggtattgttatctactcttaacaaagctttccctttaacttccttaactccaggcattacagcctttacttaagattctacagcaatactaccagggcccaagatacccacacaacactgagattatccacatttcctattagggagttgggtttctgtggcccaccagctgagtatgtttgccatcattttctccctgggctcttctaagtcttgatttttaagctgaggtgctcatattcctgtgcaccttctgcaatcctgagcgttacctgtgctgtctacttctctatcaagtcaggaccctctactccgacagccgcctgaactagaaacctaaacggaacagactcgcagctagaagcagagctctggtgtgaagtaccattttctgttaattacccagctcccactccacatttcggaacttccaggttccttccctgaggcccccggtgcagaggattcccctttagttcacttgtgctcggtcctcctctcccaaatgcaggtccactcacacttcctggaagtcacagttgtacctacttcatcttatctggcttaataataaaccaaactcgtgacagcccagacctctgaagcacatcctgtggcccgattatctctgatgtccttagcaccttattgcctccagtatacacaagtttaggaaatcatctcaagtggactgacacgtgcttccttcacttttcctcttaaaatgctcatgtgaatggtaagcttctcaaatttgcagcagcgctgggattttttatggaattgagaaaggcagggcctgactttccactctttaaagagttcaccgatttcccttaggagtttctcaagactcaaaaaaggaaaagaaagagaaaaaggaaggtagaaagcaatgtaggtattaaccattttttctggtactcttcaaacccaaaactactatagagggcgttaggaattccccctggctaccaggtgaagcagcgcgagtccgattcctgacaggcgagcaccagagaggatgcggagttttggtcgttagtttagagataacatctggatgcgggggcttgtcttaccaaccactggagacaccaggaaggacgaaataatgggctaatacagaaagaacatagaaaagggtcccagatacccaaagcctcctggcctctccgtcgtcacctggaatgggttgcaaagccttggcacaggcagctgggctgtgtcccctcccgccgcgcgccccgggccgcccggacggcacctccttaccttgcgggagtacgggggcttgctcaggtggatgccgtcacggacgagcttatccctgatcatgatcttcagcttcagtttggggtagctcaccagctccctgctgcggggggcggtcgtgtggccgcgagagtccccgcgggtgccctgggccgggccgccgcacggctccccccggcggccggtggggacggcgtcggcgggcggcccggggggcgccggctgcggctcaagcgtgaagtagaggccggcggcgttggcgtcctgctcccgcagccggcgcacggcctccaggatacggcggcggtgcgcgggcgccagcaccccgatggcatccaggtccgggtccccgatctgcttgcacacctccaggtcatcgtagccgttatccacgaaggactccgcgtactgcggaagctgcagcgctttgagccactcgtaaactatgttggtgcacatggtgggaccgggaaccccgccgccgagcaccttcccagcgcccaaatggcacgggcggcaccagttcttggaacttttaatcctctcctccaaggggaaaagggtatcgcagtaaagttttccttttaaaggaaaggctcgggcaggagacggaaaaccatcagaagaagcctgaggaagggagaagcgaacaagcagcaaagtgaattccccaagcagcagcggagctcgcaggcactggctgctgggctgagcaaggctccgcgccgcccctggatgcgccgccgacgctgccgccgcggggaggggcgcgcgactggcgcgggagggggcggagacgggaggggccggggcacacccctcggacctgcgccgggtcagcgctgcgcagtgccgcccgcgagttttcccagccgggacggtccggcggctgcgcgccgcatctcgcgctctggcagccgccgccgccgctggcgcgctccgcgccgcgaggcgacttctccacgcagacccgcggccgctgggagcgcctagtcttcgcgagtgtcagtcactgtagtcctcccggcgggaagccggtggcttctacgctgctgggctccgttggctgccctgggttgcttttcacatttctgtttaatctgactcttctacccgtggaagtctgtgctcacttcttcccgaccctgccggactccagcttccgcgcccgctggcagcccaaggacacgtcccgccgccccacggcgctggggacgctgcggggttcagtgtcccttccttccggatccgcgtttgaatcccccttcctcggatcccgtacgcagcccagagcccggcgatctgacttcttccgtgggcggccactcagtgacccgagcggcggcgttttggcccggagggtgggcgcaacgtggggaccgcccgggtccagccggcttgcgcgccgcccctcctcgctgcagctgggcacgttgggcggcaggagaggctgctgtcttcctggctctcccttcctaagctcccgggtctgcgaaagtttggggtgggttgtactttctcctaggtcagtgtgtcccacccggtaccccaccctcctttctgcccggcccctccccctcgtcggcgctatgctttctctccgggccccccacctagtatactgcacgggctcccggggtggctttgcccccggggacactgccaggcgttcggtcctggagcccgggaatccgagcctatcctctcgctcccgcccggggatcgcgtgaaaatcaatagagcaccacccagctcgtgttggaagggacgctcagacatctccgcccacggcattttccctctaggaggtaacaaaatcaatcgagtttccccatcatgccaatgtctgagcagcctcttgggactggggactcgagtggcaggtggaacagaccaagcgcctgggccccatttcccggtgtctgacctcttcttgggactaagggaagtgagggacggcgggggcaggtactgtctcctctctttccgcagaagggcgattcagcttcgcacctgagctgtttaaggaccagatctgacctttttttctgaagattgcccgtggggcgtgccagtctctcgcccgaccttgggaagtggacaaggagtgatttcagagtcgtttctcgacctgctgtgtgtttggcatttgggtgggtggttaggtgggccctcttatcctaaaccaagagagcttaaccccctcttgggacacgaaccccttaaagaatcagatgacagcttctgtccttttgcccaggaaaatacccgacataggcgcacccaaaacgttccctacagtcgcaggggggttctggtttcccaaaccccgggactcacgaatctcaaattaaggacagctggcagaaaggactgtctgcttagggggaggggagagaccaacgcggagagccggtggagctgcttgtggccccaaacttgggtcacccgggacgccctttccggaaccgagttaaggtctcggaccctggtaggtggcgaagctcctgggcgctgggatgctggaagggcgcagccctccccgccccgcgcgggccgccgcctctccctcgccaaagcggactcacagtgccccctcgcgtccgcgcgttgacccattttaaggcgttgtccctgtccccaaactcattctattcagcagaagaaagtgggctttatggctttatactggttcc

SEQ ID NO: 585763 - DNA, 4001 bp, Homo sapiens
cgaaccactgcactacagcctgagcgacagtgagaccctatctcagaaacaaaacaaaacaaaacaccctgcaagactgggatagagggcaatggatattcccacaatgcacttttcctaaccctatgagaaacaaaccaaagacatttttggagaaagctgctttctggagcagtttcagttttatttttgtatttaaggctgaaggacagtttcaataaacatgcttcttcccagagggatttcaaagaaagatcgtttttgcatgtcatataggggagaatgaggacatgagacaccaagaagatgaagttttcaggagcagaggagaaactttacaccaacatgtctgaacttcattgactcactacctggagccattttttagctgttgagttaagaaacagaaaaaggagcctggggcttctgactctttcaccaggcttaggggagtgagaggagggtttagacacgggtagggcctcttggccccttggtgcagccccgctgagccatctcctcctttggctgggtgactcctttctgctgccttgacaactcctggaggagaaacagatggggcctctgggctcctcccagccctgtagggtggggctcctgccctccttcttgaagtttacctgttgctgccacaagttctgctcccttcgtctttcctttgaatcctgggtggtgcaggaactagccttgttcagtggacttggggagaactggaggggaaattcgctgtgttttctgttaagccagcactgaccccaacaactcccctctctagtccaacttcccaaaagtctaaactgaaaacaataaactcaccttctcatgaatcagattctgcaaacagatgttcaccttttgaatctgggctaacggggggcgaccaggctctgagtgtaaatctgttagaaaattctagaggaggagttggaggctgacaacatggtgaaaacctgaggtcgtctgccactctattcctgtcaccacaggccatccctctcatctggatcccctcgtcccagtaccctcccaggcaggtgggaaaatccagtactctccacctccatctctttagcacatcagttcctccatctccctcaaatagcacaataccccctttcactactcttcatggagcctccctgtccatccctgccccattggaataatccaggccacaccctcatctccatggagtgatccaaatccctctgaatggaatgcagaccagcttcctccagccccaacaatgaacaccaacttaacacttggtggcatcctgtcattacgatgctgcctccaactcatgatccctgaccattaactctcccctctccagagtggtctcaggctgtgtctacacattccctgttcctccctccctggtcctccccccattcacacagaggggcagcccccatacctcaccaagggcccctagatgcagctgctgtcgctgtgcctccctcagatggtcttcaaaccaggcctggccatgctgtagcagctccagaccctgccacagggcatcctgttctctctccagagcctgcatcctgcgtagctgggaaaggcaatcacagaggctgactctcacgccacagtagggctctgggttatggccctttctctccacccctagttgggttcactgtgtggtcactgagtgtgaacccagactggccactgaggacctggagggcaaggggaggcaggcgggaacactgtgggccctcaagttgaatggaaatataaagggcagatctattgagagagttcccctgggacctcttgttgggctgatactcacccaaaggaagaagctctgggcccctgggtcttggcggcttgtccccagcggcagcagcaggactgtgtagggagcctgcaccaagggcaccccgccagagccctggctccccatggctctgaggtgggaagggtggagccactcccactggtgcagcccgggctggtccctcccctccacccctgccttgcacccatcctgcctctgtcagcctctcaggccccttcctgctgtgtctgtctgaggctggggtgttcctacttgagaagagagaccatctcccttggacccctctgtcttccctctaatctgttttgtagggcctctctgaaggggttcgttctcatgaagtatcctggggtagaatccgggagtcttcctacagcaacaacactgtatttttactgaggcagggcaggttcccctgtggactcctgctctgtgttttggatctttcctagtctcttgttttgagactaaagaaacaatatctttcttcaaaataaactttattcctaatatgaaacaaaatttctagagaaactaaaaactctgcgtctgagggagataaggaaacaaagagggcatggcagcccaccggagtctcaggaggctggggaggacactggaaggactctcagaggatgctggtggcagcaggcagcacttcctggctcatgaaaacgttcaagtccaggttaggatcttccaaatccagtttcataaacttatccactaatgtctggcaactgaagaagagagaaaatcgcaagatttatggcagaatggacaaccaaatccctgggcagaggggagaggctgtggcacagaaaacctgggatcttgaagatttagggatttcagaaagaaatggtgggtttctgaagggcaaagtgctggaggaaggctgagtccctgaaaaggggagaagagttgcaggagaagatgcagagagggtaaagacactggggccatatacgcacttttccatttggttcttctttagcaaatccttgacaggcttgatgggttttccactgcggatcaagtctgagacctaggaacaagcaagaaggtgggaggagtaaggggagtggggaagagaaggggaaataagggtcagaaatcctgtggacctagacccaggcccagtaggactaggaatgaaagggagctctgatgtggaggtggttgcacatttggatctcatcacctccttgccacgagccacaagcttgtcaggaagcccagcctgggcagctgtgtgggaggcatggctggccttcgcaacaccttcgcaaacctgatagaagaagacaagatcgttgccatcctcacaggtctccatggtcttaaaagagaataaaagacagtgtatcatcaatcacctccttcctgtcctgaaacccttggccaatcctgtggggagggagaaaagggaagggatgtggtctctgtgctgagggagcccttgttctgatagaggagccaatccccacctctgggaaatgcccagcctgggggtccccgaggagctagattggtctcctcaccaaatactgcaccaggggcccttgtggcagcagttgtagctgaacaaggctcagaaagttggtggccacaaagatgtgggggcatgtgggtccacgtgccagccagtgtcggagcacagcggccagaagcgcgagcccatccacctgcaaagagggcagaggttagcattcggagccatggggaccccatatgcccctctgcacttgcactgcctttccctgtctcgtgttctatttcttttctgcccacacagccctattccattccagaggcccagcctcactgtcatgctccttcatcctcctccattttcccctccttagtttctcccctcatcagtttctcccctcaccgtgttggttccctttccaaattcatcaataaggaccagcgactgtgcagtggcattgttcactgctttcgccacctgctgggtataaggtggacaagggaaagttagtattggaagcccgtaacgcactgaccacagttggcctgtgaataaagctgtatacatgccctccctactgcactgcaagttcttgaatggtgaggtgcacgctttgttcatcctctttgccaacagtgactcacatgaaacaagggttcaagaaatgtt

SEQ ID NO: 585764 - DNA, 4001 bp, Homo sapiens
agtatgtaaatatacattgcatgcatatttatatacatttttcaatactggagagtgacaagagcagatagaaatctttaaccaacgctcgctggttctctgtatagtaagaatcataaataccaatggtcacctgaaaatggagtaactgggcttttaggatgtccagaaggaagagacaggagactttgcaggaaacaaataaaacctgaaagacagctacacttattgagcctctactatatgctatacagtctgctgagtacttgatacacacatcaacccagctaaatctcagaaaccccaagaagcaagtcttcttttcttcaattttcaggtgatgaaactgaggatcagagaggttgaatgacttggccaagatcatgtaaacagtcaattggagagctggcatttgacctagtataacttactttgaagcccaagagtttaatcactgtgctaaaaactgtacacggtttatcattcccaaagaagaactttcactccatctcctcccactcaaaaaatataagatctcaaagcaaatctagagacttttctgataatctgcacatctggccattccaagtctttaaactaaagttgtcttttatgtatggattaagatgtctgactgtaataaacctcgcccatctgattccagtctacctgcctaactacagctccaccaaagcaaatctattacttccccaaggtattcaaccctgagcaggttaaaacttcaccctccatacagaagaactgcttcccagagactatgccaaatccaggggcgcttttagtcactggacatttcaaaatacatgacagcacagatttagcaaaataagtcctattgttttagccccaaacatataaaacaaatatcctgtaactccacaaattgaaaaactgcaaaaaaaagtaggcaaacattttggcagttctgagtaaggaaatgtttgttttccctcttgtggtcacacaacaaatggtgaagagataaacatcagtaacatcagccttttccctaatccagcaccaaccaaatatttatttacatctactttttgaaggcctctttctcgccttttccacaccaacatgtcagcaggtgtcccagattaaactgttgaatatcatacccgattgtttaaaaaacaccttttgacgggacctgtggctggttattttttaattagggtttgaaatcctatactgtgtgtatttagccccctaagaactagagccagagaaggacgcctctgcggagtgggttgcccagtgggtgggcgagaagggagcccccggtttcagaggggctgctgcgaactgtacttcctgcgccgccccctccccaggtaacttaccaggatacccatcacgtcggtccagagtcgggagaacgcctcggatgtgccagcacccggcttgggctccggttccggctccggcgcgggctcgggctccggctcgggctcgggctcaggctccggccccgggccagctgctcccgcgtcctccatggccgtgtcccgcgcgcgggccgtgcgtcccagtccccgcggcgccctcgccccgcacccgcgcgcagcctgcccggatgccgggtccccgcccgcggcgtcaccgagccgcgcccccgcgctgcatgccccggcggccccggccaccccgcgggggcccttcgcaggcgcccgcacctcgggtctaggtggccacgggctgcgcgactgacaactccagaaactttcccaccccgctcggcgcagcaacagggtagcaggaggcaaagtccgcaccactgagttgtacggcggggaattcgctcggcccagaagcaattaaacccactgcaaaggcgtttcttcctgtgacgggaaccaactaactaaggcacgcgactcgttccttctagcaagtcttggcaggacccggcaggggtggccgcggagcctctagatcttggagggagctccccgggacccctctcttcaaaatgagctcttccagctccacatgactctctccctcgaggctaaagaaagcgtttagcaacaaaaggtgctctgatgtcaggctctttgcatggaaatgagcctcggacaggagaacaaatcgcctgttgaaagagcagccgcgccgcggtctccggcccgcacaagtttccaatcacgctattcacggaaacgcttttggtaacggaaacccgagaaagttaatctttaagcgactcccgcccaaaggcttcacaagtagtccgtgtcgctacaatgcatacctcgcccctcgtgaagtcaagcgacccaaggaattacaaatcctgcctctgccagccaagacttctctgcaaaacaagtgtgaaagcttgggcacgagccattgtttggatcattttttatgagtgggggcattttggctcctgaatgcccacaatgccatgcattgctagggctttcggctaattaagggaaatgcgctttgggttttaattattcctttacattagggacacagggaagggctattttcgaaactaaattcaaatgattgtgtagccagtcagcctacacacacttggggccctgtgtgtgtttttccaaggggaagccccaggacagatttattttataagggaactagccctggagaggtgatttttcccttttgtgattctatctttcaagactactcagagttttccttggaaggtgacaatgcacgtcacattcgatttggtgattgatcacttttgaaacagttaagaaaccacatggagtttgctcctctgttagggccttgtggtttaaaaggaaaaaaaaaagtgagatgccccagggagagagccctgcttgttttgaggcctctcctgtttcttgttgattgtggggttttttttgtttgtttgtttgttttgttttgttttgttttgttttccttctgagtccacttgaaaggggataagagcatgtccttgaattccccttgttcaagtattaagtgctgtgagcaccaatcaatgcaatgggtgaatagtccttacaggaaagttcaaaatgtaaaaacattttcaaaagtaactaaatttataaacacaatccctgataatttttgtgtgtttttggcgggtgcggggctggcgcctgtaatcccagcactttgggaggctgaggcgggcgaatcacttgaggccaggattttgagaacagcctggtcaacacagcaaaaccctgtctctactaaaaatacaaaaaaaaaaaaaacaaaaaaaaaaaacaaaacatagcaagagtgttggaacatgcctgtaatcccagctactcaggaggctgaggcaggagaatagcttgaacccaggaggcgaaggttacagtgaggtcctgctgctgcactccagcctgggtgacagaggaagactctctgtctccaaagaaaaaaaaagtatgctgaaaaatttttttagagacaaggtcctgctctctcaccccggcagtgcagtgctgcaatcgtagctcactgcggccttgaactcctgggctcaagcaatcctcctgcctcaaccacctgagtagcagggactacaggcacaccgctgcaccagactaattttttaaattttttatagagacatgatctcttgctgttgcccaaggtggtctcaaactcctggactcaagggatcctccctccttggtctcctcaagtgctgggattataggcatgagccactgcgcacagtctctgacgataatgtttgtgaaaggaaaccaaaagaattattaaatttctccttaatagcattgaggcattgtgttgaagtagaaagagcactgaactatgagtcagtacagccaggtcttgtgctttcctaggctgatgccggagttaggccagatgggttttcaaggctccctcgtgctctgtgatactttgaataaaaataaattcagttaaggctgatgaggtttttttaattgtcatttctataaatagataaatat

SEQ ID NO: 585765 - DNA, 4001 bp, Homo sapiens
gactgacatttgtgcggggctggggttggaaatgggtagtaactgctaatgtgcaagaggggtcttcttggagtgatagagacgttctaaagttgcagtgatggttgcatgactcaataaatttactaaaaatctttgaactgtatgttaaaagagataaattctgtagtatgtaaaccttatttcaataaagctgtttcaattaaaaaaacaaaaattaaaaataatttaaaaaaatagaatgctaaagaaatctctgacaggccacagtgtgccatcaaaattgtctgacatgaattgtaaattagactttttcttttctaaactagaggcagaatctgaagaaaaaaaattaaatgagaattttcacaccagagcaaacccagaaatgataagtcaatgaaaatgagcttaaggcagagtcccttatggaaaaacagagcaattaacaagaaactggaggtccagcatttcctctcatccttttgtctggcaatcagcgtttgggttctcaataatggaagtttttctctgaattcagtttctctgggtccacctcaatgatctcattcctttggaaatgagacatacagtcaaaagttcattgcatgggttagacattgttttttaactgcagagagaaaaagaataagggaaatggtttctaaaatcttaagcaagtgttgtacttagaaagttctagtcaacaataaaattatccaaagacaattaacacaaactgcacacaaggaaatggattgtctgaactctgctgcgctcttttcacctttctgcaagtcagctggaatcctgtatatcactgagaatatcaaatcaaaattgagtaataggttcagtaatttttaaaaattccctcaaatcaaatgttgtgcaataatagatgaacttacaggaaataattttaaggtgagcaaggtacacttttcttccagtatattttcattttaaaaggaattttttagttcttattgcacttatgaggaacaaagcactgggcacaaattgttacaaagcactcatcccttgatatgttttgtcttgtatttccacatagacatttcaacctcactgcaagccaccttaccattttactgagttaaaactaaatgaaaacacaaaaggatgcaaattaaattcatctgcaaaacaagagattaccaaaacaattaaatgtgaaaaggttatcatactaaatcacttttttttgtttgtgtcttgaacattcactatggaactggaataagcttctgccactaccggcagttacagctaccacactttggtaaattctgtattcaaacgcatttctaagtcacaggctatctgggctactagctgcatgtgccccaggtgcgaatcaaatgaagttttaattactgctacttgtgatcggtatccaattagaccttttaccctcctccattagcagagggctgtggctcaacttggttgtggagaggtttcccaatgccacagggcgtcacgataactcaattcggagtgaataatttaagagcagaggtgctttctcccaggaccctcgactctcgctggaatcaggacctgcgtgggtcgcgggctggaaagaaaatgtcaaaactggtaacagtgctgacacgtgtggccggagatgagcggtccggccctcgatcaggatggggggccagtagccccgcctccggcagctagggccacacccccggcagctagggccgcgccctcgactgtggctccgaggccaggtcctagggccgaagtttccatcgtctcacctgaactaggccgggctgggcccgggcactcgcgggcctaggtttccataccaggaaccgctttagccagcctggggctgcctttagagtcgctgctgcttccgccttctctcctggggtttgtgcgccctgactggcagcagggggttgggccgccagacccgcccgtttccgcgccgcccgaaactcagctaaccgctgttccatggcgcgcgcctcgcgtccgttggccgataagggagcgcgcgcccgcaggccgcacagcagttgcctccgctcggcccgcgccggccgccgtgcgcctgcgtggcagaagcccctgctgagcatgcgcactggtgtgacccgcgtctcctccgtttgtgaagtctggcgggtcgcgtgtatactcagccgttctctcttcacaggcacgtggacacagtgtcacctcctcaagccaagtctaaagcacagggctgccccattgccctctcccaaaggccgctctgccttgctgcatctcacttaagggctcgaggccccactgatccagcgtcctgtattcgggatctctgttgctgggccccaatgaacagcgccacagtgagaagatggttccaggggttaggagaggcccgtgatctctacgacattccagcgtcagaggaataacaggctacatcttaccctttttctcttatcaaggaaagggtatgccaatcttagtacctggagggtgactttctcactgctcacaaagcaggctgtgcagctccatcattggtcttgccacgttgggaaattatctcgttttgtgtctagatacgtcagaaccttaaaaaaaccaacaacaaaaacttttattggggtgcaacataaaatacacatcttaagaatatgactcagtagatttgctcttatgtatgcacctgtgtaactaccacccagatggagagaaagaacatttctgtactctgggagtttccttgtgccctctcccaatcagtaccctcccaaaaggacacagttcaggttaggggctgttttatacgttcttaaagctgtaagcatctagctaagtgtcacttacataattaagactcaaatatttgttggatctggctgagggtgactcgagaaattagacaaattagaacagagtcatccattcatttaacagacgtttacctagggcctgctctgtctaaagtcacaggcactggggatgctgggatgaaaggaaaaaacaaacaaaaacctgttttcttagagcttacactccaaatggaaatacagacaataaacaaatgtgtatctacatatttcatgtcatatcaggtactgataagtgctgtgaagaaaagtgaagcaaagtaggcaatggtggaggtattagagaagacctccctgaaggtttgtcatttgggcatagacttaaatgagtgaggtatgtagatatctgaacaggagtgtttcagtcagaggaacaagtgcaaaggtcccgaggcctcaaatagcacgcttgacttgttcacagaacatcagggaggctgttatgactggattggaaggagggagagggaggcagggagggagggagggaaggagggaaggagggagagagggggagagagggagggagggagggaggaaagagtgacagaaaataaagatgccaggggcaagatcgtgcatgtaaggccctgtaggccatggtgaagactaagtgtggtgggaagcagttagtggattttgagcaggagatgatatgatatgacatatttttaaaggattacactggctgatggaggtgggaccctggaagattgcaagaatagaagaagggaaactagttaggaataaatatggtagaatgagaaactgtagtagtttgagctagagtggtagtgatggaggtcacgagaattggtcagattctgaatgtattttgaagacctgagccaacatggtgtgagacggattggatgtggaatgtgaggaaaaaaggtatcaaggatgacagggccagccatcgtggctcacgcctataatcccagcactttgggaggccaaggcagggggatcgcttgaacctaggagttcaagaccagcctggggaacatagcaagacctcatcgctattaaaaaaaaaaaaaaaaaaaaaggatgacaggtttcttccattactaccccactcctcctgcccccccatatacatacacacat

SEQ ID NO: 585766 - DNA, 4001 bp, Homo sapiens
agctaagattcccaaatactgtttttctttttaaagaaattaaaacaagataaaactatgcaacggcatttaaaagtactgtcctatttgggccgtcacagcaaaaagcctcgtattttaagaggtaaatattaaagatactctttaacaatcatagtatcgaataaagtattggcactttaagagttcataaaatttatgctaatttagttaccagcataattacactttttctttttcttttttttttttttgtagacagagtctcactctgtcactgggctggattgcagtggcgcagatctcggctcactgcaacctccgcttcccaggttcaagcgattctcctgcctcagcctcctaagtagctgggattacaggtgcctgccactacgcccagctaattttttgtatttttagtagagacagggtttcaccacgttggccaggctggtcttgaactcctgacctcgtgattggcccgcctcggcctcccaaagtgctgggattacaggcctgagccactgttcccggccataattacactttccaaggcgtacgggtagggatactaatgctgactgtgcagatgtgtacttgctatgtttgatgtttacattaaggcctattgaagtcggagtttaaaaagaaattgaatacatcaaaacctgtcttcttccagactagtaaattcaactacacagtgaaaatggaatctgctttttaaaatcttgtttgacacgtgaatgaaccagcgagaaatgtttcccccataatcttccatctctcgatgcacagatctctccctaccatttgtctttatgtcgtgatggattagaagaggagcgagtaaaaataaaagatattgcagaataacctttgcctgcctaccaaccatccaattagctcaagtccctagctggcaaattacctagtcaacaatgcctcaattataaacactacgtgtaacgtgaccacagatcaacaccccgtaggttcatttcccccaccgcccccaatcggtgttagcctcagtgaggacccgggaaggtctggagagtcatgtccagcgtccacttaaatcctcaaaggcccaggaaggaggtgggcgggccaggcctcggcggaactgacctcgagggacctgtcgggagtctccgggtgagggcccaaccgggtctttccctccgagctcgcagccattccataggacgccggagacgccagaacctccctccgccccagggcggccctcccccaaccctcctcccggacccgggggaggggcacccagaggagaaacacccctcccccacgggcactgctaggccaccgctcaccccacccttaaaaaacccgcaggcccgcgcccaccctccgggccccggcctcgaccaggggtgggggcggtgcgggcaggagcaggggaacccggctgccataccaacctcgctattgaaggtcttcacggcctccatgttgtcgctgcggaggccccgagcccggcggcggaagaggcggcggccactgcactgggtggggagagcgagacgcgggctgctgcgtggccgcgaggagggggcgctggcgggagagcgggccgctgcgacctcggggcggagtggaagggcacgcgctggcggggaagggctccctcagcggcagagcggcaccggcatggccgctagggcggggggagcgccgttctagggaacagaggcgctgccggggcgggtcggcggcgggcgggggaggggctgggccgcggcgccttctcttctctgccccgctccgtttcggtccccctccctctagccccttcccctacactctccactcccttctgccccttcctccgacgggctcctgtttcacctccccgccgctcgggccgcaggaaccagccccgctcggcgaagacagaggaggaagcgctggcagcagcggctgcggcatccaatatggcggactcgagtcgggccgcgcagttcggggatccgcggcgccggctagcgcgccccctggcgactggaccgtgcgagccccggcggccgcgcggaaaccatcgagcgcgctggggccagagcgtcgccgcccgtaggcccggctgggctccgctgccctcgccttggctccggggccgcccgcgcctcgccccctccccgcgccccgcggacgcgggagtgagcgctgcggcatccgggggaacgccgcggcgggtttgtacagcaggaggaggcaactccaaagcgcggctctaataagagcctaaacgtgcccaagaagcggcaagttgaggaaatgtgcgcgtttcccttgtttcccggtggattggtccttttgcacaagcggcagggtttagttgcttttcacaactttactggacagtgccctaaacatccgcagccttcgccaagaaaaagttcctggtcatctatttagtaactgaactcaattgttttaactgcacagggagggaacattagaaaccaaagccttggattcgggttggggcaggcggcgagggaaacaggcatgcagcagctccttgcaggaaatgcccgctgcataggatccagggactggagtggcacaatgagcgcatttgtctgcaaggcgggaaggggaccctagaatgcacaacacttgaataggtgaaaagggaacccgtctgtttcggaagatgaattgttctaaaggaattttgccctaggatacttggagtaaaggtaaatacagtatttcttagatggattaggagatgctgctagtaaaaagccttctctctcgtgcagcgcaaaataaggtaccaatttaaaaatacttatcgatgttaaaagatagggatgtatcgtggaaccccgaacactgctgtcctcttgttgaaagtcatttttcaacaatcattcccaaattcactcaaagggagagaggaacataagggcaggatcgtacttttggagagttttggaatcaaggtagttcctaagagctgtgcgcagagccccgtgaaactgggaaagtaaggcccttcttgaggtttcagagccttcattctacttcattggcagctttagtatagggcctggctactgagaaggtaacagggataactcaccaagtgcttttatatttactttcaaaatctcaaattctgtcacagatttctccaccgtctcccatcttcaggcctagccatgatcttttactgacacttgcagtagcctcctaactggtcccttgcttgtcttcctacagttcatttccagacagtagccgagggatgtttttcttagataaatcagatcaggtcactcccttacttaaatcccttaaatactttctcattgcccatttgataccatcataacttctcaccatggcctgaaggcccagcccagcctgccgcagctcacaccaccttcccttgctccctgactctcctcctgccacactggcctttctgttacttgacaagaagcagtgttttcataggtaggacaattgtgtctcttcacacagggtgctgttgctcttgtcctttccatagctgactcctcctccttcaatcttcctgaaagaggtcccctaatcactccatctaaaggagcatttactgtggcttgagaaagtactgcactcagttctgtgcatgccaggttctcacaatcagaagtcactgctttgaggccgggtgtggtggctctcgcctgtaatccgagcactttgggagaccgaggcgggtggatcacctgaggttaggagttcgagaccagcctggccaacatggtgaaatcccgtctgtactaaaaatacaaaaaaagtagccaggcgtggtggcacgcccttgtagtcccagctactcgggaggccgaggcaggagattcgcttgaacccgggaggcggaggttgcagcgtgccgagatcgcgtgactgcactccagccggggcaacaagagtgaagctctgtctcaaaaagagaaacaaaaaagaaaagaacg

SEQ ID NO: 585767 - DNA, 4001 bp, Homo sapiens
tctccatcattcatttaaattcaattgtccctagagcgtctccttctactatgaatgccctactggagctttcatcagatcgagcccatccccaggctgtcctccgctcatgtgtttctgtgtaaaatttttctctgctttgatagagagactttcaagagttcatttacatctcccaaggacatatttaccatcagatggacactagatagattggcttccatttgtatctgggctctgagtatgctggttgttttctggtttgtcattccctgaaaaatctgtaacctcttctaataaaatgaataatggataaatgattttaaatggtttgtggtttgctatcagaggagtatcatacatattaaacacccaaaatcttaatgtgcttaacatcttttccagctttttgaacaaagtgggctactttacccccaggtataaatcaattagcagagacataaccaaggagacgttcaagaccaagttaactgagtctacagttaggatctctgagtggatgacagatgttacactgaaagtcagtaaccagcatgtctaatgctacagttgcaccttttataaaaactgcctaaatccctctatgttgctaggagagggggagaaattacatacatgcaaggaagaaaggaggtgagttggaattaataggtaccaatcaatataagacttggatgtgcgtatcttactaagaggcataaattaaggcttagtgtgcaagtacttacatcagtacccagtttcatcaacatgtggagaaagaaagcatcgagttccttctcttctatgtaacctttttctaaatgtgagaaaataaacataaataatactaacatataaaaaacacatgacagtatttatctaaatatgtttttaatctcacaattcataaagcttccctcaacactattttttgttattccaataacaaagtgccaacacctacctctagaatacatgggtttgaacagtaaacactgttccagaatacgtgctttatgctagggtttatattagtgcttggaaaaggaaggctattaagtacatgaattttaatcaatgaataaacgtgaactttccaataaaatttaaccccaaaatttctgaagcttggagaaacttaacaggtgtaagtattgaatcccagtttgcagagttaaaacacaccttttagatattttatttctttattaataaaaacaaatattaagtagttccattttattttcaagtagttttttggtggaggagtcgttttgaaagctgataaaatttattctcattttgagagagtgaggggtgtacagcaaagtcactgcgtaaaagtgagcccatttagggaaggatgacttcaaatagctgagtctcagcccacaagccttgaacatatacaatgatattagtcattgtatatacaatatatatgtatgtctaccatatatatggcgcgctcgcacacaaagagagattggaaaggggaaagtggaaattcaccacccagaattttaacaaggtatatagatgtgtatcaccagtatgccaaacgtctgttaatgatactgtattaggtacactgcattaacaacccaggtcgataacttttcctacagtaaaggggaaactccaggtcctttcagcgggctgagcttggagccacgtctacacctgagtgtgcaagtggcttgttctactcaccatccgcatcaaagcgctgccagacctgccagaagccagcggcgtccaagcgccccagagtcggttcccgggagctgtccatggtgttgacgacgaagaccaggcaccggcgcggaaggacctagacaactttgggaaggactccttcaccgtatttcttgacttgctctcctgcttctttcgctatctgattagctttgagtaactgttgctggggaggacgcgagcgctgctggccgtggcgtcgctgagccgtccctcagccctcagcaaaaccagcggctggaagcccgccccgctcctggcgcgcctgtccccgccccgccctgcgcgctgtcctggcagatcctgtctgtctctgcgctttggggaattcaggaagaaagaaactgtctccaggcgtccacggctcactgcttttgccctttaacttgcttctcagactcggagaagacatccctcttacgtttgactcactttccaaacttgtgtctcaaggggttttctagggagagctgcctcatttaaagggttgcaagaagtgtcagtgttagggtcctttggacttgaggatttagaaatgtagtgtgtggagaggggaggcgagaagggatggtgatggtggtaagtggttccctttaaggaagaagtcaacagcaattattgagtcctgattgtataggacatacacattgctgtaccaaaatgcactataaggacttgcaactaaacagggatactgcaagtcactgtgatttaaagtagcatcattaggatgctgaggaaaatataaactaagccgtactctgccaggaaaagagagtctgggggagatgtgtctgcctgcagggtacttaggtagaaggcttagatgattgtgtttggctcctaagagccacattaagaccaaaggataaaaatcagttggaggaacacagagctttctaacaatcaggactgttcaaaattgggcaaggctttgtggaaacgtgtacaaactacactgataccttttgactatatatttagaaattttcgttggataatctatagaaagtgcttggatattagataagaaagttgaaccagatgtaacttttctttatggcaccctgactctggttttagcattcagatttatttataaaaagcatgcatgtataagtcatctaaaccagagtagtgaaaagaacatgacactcaaggtcagatagtcctgggtcaggatctgagttccattatttaccagctttgtgaactgcaccattagttctcatctccctaagcctcaattttcttatctataaaatgaggattaaaacatctgttttggagggttgctgtgaggatcagaaccatacatagtaatgcacaatgaattatatctgctatggtgttgtagctgatgagggatgactctgttagagaaaacaagtaaagtctaagagattgtcatagccaagaggaacctaatgaaaaatgacaaagaaatgtaatgttttatcctgggtgtgatgccggaacagaaaaaggccattaggtaaaaattaagaaaattttaataaacacggactttagttaataataatgaaaaaaatggttcagaagaaaacagttctgggttcagggcccagctttgcctcttactagttgtgtgtgatattgggcaagttactcaaaagaagcctcactttctttgtaaaatgggaataatagtagtatttaccccgtgttattatcataaaggtcaaattaaaaaatcatataaacctattgtcacagtatatacagtaacattcagtgtaagttagctactaaaatgatgaatcttccatacatacatacatatttggaagacggtgaagtaaacttcaggatttttgaggagtgtggcttagcctaaaggaagaaaagcagtattatcaccgattaagcaagtgctggttacaaaaattggagaaaagcatatgtagcataggagggtgtaagggttcagtatctgtaattatcatctgtgactttaggaaattagtggatacaatgtcaagcaccagttaggaaaagtaattggtatgaacccaccagggctgatcttgttttctgataaatagtggaaaaagataaaacaaggcagatttcagaagtaataatcaagatctaatgtggagggatggttaaataaatgatagtaaatatctatgatgggctttgctgcatacacagaaatcttgattttgaagcttgatgatccagaaaactcaaaacataaggttaagattaaaaag

SEQ ID NO: 585768 - DNA, 4001 bp, Homo sapiens
agaggagacagcctttcaccctcacccccaggagtcaagaaccagaaagtgaaactgcttctgctgatttccctcgcctcgaaaacacaccaccaaaagcaaagaaatgatgaaaagcaacttactcgtttcgcttattgttttcttgtctttctattaccgttcatttactcttttctttttttcttttctttttttttttttgcagcaaaataaaagtaattttggggacacagggaagaaatgtaaacatgttatacatgaaagaactggatttttgtgggctttgcacttttgttataattccacaaatgaagcaaactgatgaatttaccaaaatatttcagagctcatctacgtacacaatttaaagagctaaagaaaacacattcatattttttaaaaattctgtcaaaaagcctgtttaaaagttatagtttgtgaagccaccaatttccctaaaactgaagattctacattaaccttttgagtttagacgatcacgcagtaccgattttctaggtaatcttcacccagctgctgttgctcaaacagcccctcattttatcagactagttctaccaagcaacacaaaaaatgctccacacaaatattataccccccagatagtttaacacactaagaattcctttgtagttatttttatgctttcactccagatattctattttgctttaaaaaaaaaaaagtggagaaaaaaagcagctatatccctcattcttcaaaaatggttcctctggttgaaaagaaagaaaaacagcatataacaaataccctgattctgaagtgcctggattactttctcaagtactgtagtgtctgagatcagtaaaaaaccactttctcagaaagccactgattgtctaaccctcatgagtaccgtcatggaatctagagacaacacgaggagacacctctcgttcacgatcacagatagtggaaagaactttgactcaagcacctcaactcagcaaaacagctcagcagcctgcaccctggcctcatccaccgctcctgtccagccagcaatcaacctggagaggacccctcatgctttgggaggagcacgtggaagctggttcaagtcacagtgctccacctgggaaggaggtgattttgagcttgggaaaactgccgctaatactccatagtcaccagtttttttcccaaaaaacgaattaaaaccagaaactagcagtaaatattattcttatttatgcctcataaattaggaaaaaccagcacaaagacatgtgaaatattctacctgggatatttgaaataaaattaaatgggaaaaaaaacacttttacatgttcataacataccaattttaataaccaaattttaggtaaatatttttatcccaagacatagtacaatttttttaaaattaaaaagcaaaacaaagcaaaattatcgtgaagggaaaaaataactaaccggttacttgagttcacatttggaaaaaaataactttctaggtatttaaatgcagagttaaagagtaatgaacatgtatatagcccaaatttataaactatataattcaatgttacattttcccctctgagatctggttaataaattaaatgctgtactttgcatatgaggaactaaagtttacctactggactcagtggttttagtgcaggacactcttgtgcgttgccatagaggtaggcatgcaacccagaaaaaactgaaacaggtaacctgtcatgctgacagttacaagagaaagatcccgtgtcaacggcacgcctccaattgtgcatctcccttacctacagcttgttcaccagagccctgagcaggttgtttaccaggtcgggagtgttgactcagaagacagatgactttcagcacatgcaaaccgagtattgcaaaagctatcttccacccgtgttagtagctcacagttagtctccagcagccctgcgctccagctgcaaacatctcattagactaatgcattcagcacaggcagaaaactcgatttaccatagctacagcaatgaatttccattacgatgacagcttcaaccacatcatgtccggaaaaccagccaaccactggcttttaaagaacacacacattttacatgcagaaaacgaggcctctgtgtgtgtgtgtgtgtgtgtgtgtgtgtgtgtgtgtgtgtgtgtgtgtgtgtgttttgtgtttccttcctcttagcagcctaagagaaatgtgcagtgtagctttttgtcgacatgagctgcaaggtaatgacacttctgcttctttggtagttacatccttgtaataacctgaattatgtcacaatggttagaatgggtgtttccaacatttcagttttcattacccctcctctgttgccatagaaaccagactgtaacatcgtctctttgtcccaatcctgcagcagtgtgggccaacaccaggcttataagacactggtgatctgacagagtgaatgtttgactttggacaaataaaacaaaaagaaatattacaatagcatcattgttcaggagaccctgtgtgattcccagagcagtgtgcctatccaggtgtgtgcacacaccatggttgtacatattaaatcagcggctgcccacaacatatgtgtacagttcattaaagccggccctgactttggctccaggcctgtatgtgtgtgtgtgtaagcatctctacccacctcaacgtggtgggacctgcacaggatagaaacagggcaagagtgactattcattcccatgccccattgcattttctgcagcaaatcaatatatatcggcgaagggatcttttcttttcctttctttttgtaaagtggagcagggctccccattgcccatttcatccactctgggatattggcatattcacaggtatttcctacaagatgaaacatccattctacaaacatgtggcttactcctagggatgagcagcaaacaaatttagccgggactaaatatcaaccagggctaacgaaggcttaggccacaacctggccagttactgagagtgaaaaaaactgcaatggacaacttgaggtttctctaaatatatgtgtagagtcacattagaagtacataagaaatctctcctctgaaatttattatgaaaatataaaaaattgttttaagtcaaagccttgtaattaattgagcaagaagaaattcactactttagttcatttaatcatcaaattttgttgttttgtatgggaaaaggcaggtttggtagtttgcattttcatttcatataagttgatttcactaaagaaggaggaagaggagaagaaaagaaaataagatggatgggccaggtgcagtggctcatgcctgtaatcccagcactttgggaggccaaggcgggtggatcacgaggtcaggagatcgagaccatcctgtgaatggtgaaaccccgtctctactaaaaatacaaaaaattagctgggcgtggtggcgggcgcctgtagtcccagctacttgggaggctgaggagggagaatggcgtgaacccgggaggcggagctcacagtgagccgataccgtgccactgcactccagcctgggtgacagagcgagactccatctcaaaaaaaaaaaaaaaaaaaagaaaataagatggatgggctaggtgtggtggctcatgcctgtaatcccagcattttgggactcctggacttgaggttaggagttcgagaccagactggccaacatggtgaaaccccatctctactaaaaatacaaaaattagccaggcttggtggcgcttgcctgtaatcccagctactcgggaggctgaggcaggagaatcgcttgaacctgggagggagaggttgcagtgagctgagatcacgccattgcactccagcttgggtgacaagagtgaaattccatctcaaaaaaaaagaaaaaagaaagaaaaagaaaagaagaaaagaaaagaaaagaaagaaaagaaaaagaagaaaaga

SEQ ID NO: 585769 - DNA, 4001 bp, Homo sapiens
accctggcactgctcatcaacaagaggctccaacccagcctgtgtgaggccatttaattgcagtggagaatgccagcttaacaaagcaaggtaaatgagtggctttttactcacttctgtaaccctctgcatccagccaagagactaatgttgccatttaagaatcattaaatcttttcctccagaaaaaaagaatgatctgccttttgcacagtcacgagagcatgcttaaatagaaaggaaaacacacacgtggccccatcaaagaaatctgccacattttcaaggtttggcgtcctgggagctttcaggacagactgatggtcctttttcaccatcgctaaacctgcttgtggactatggttccctccagccactgtgtataaagcctgcctattagtgaggccaaagaacactctagaagcatgtaaacccactcaagcctcaaggcatacctgtttgcatatgaacctgaactgtgcctaagccttccggtttagggatcaaagcttcagggttctgagtccagagtgtgtggattcctcccttgctccctgatccttgctgaagcctggggtggagatagggttaggtaatgcccctgcatccatggcttccaggacacccaggtgcagcccatttctgctacagtcctggagggtcaggtgtgagcccctgaaatgtagagaacctccaaagagagaagcagaaagaggaagaggtgcaggagaaagccacgagccagagagagaaagagaaagtcccaaaacagagcggcagggaggggaaaacggaccttatgtataaaactatagatgctcctgaccaagtgtcagctctcctcacttaggacacaaggcttaactgcttacagcccagtgggctcggactattgattttatttttaaaaactaaactggcattttacctggattcactaaccaaatgaagtcctgaaacacaacaattccactatgcaaaattattctcacataatacctattaaggcaataagaaccacaacatctagtcttagacactatttgtcatctctaaacagttctgcctgtttgtctttctctctctctctcaccccccacttcccgcatcagtcttcccagttgagggagcagctgcagagtgagccctttccacaatcagcacgaccaccttcctccagactgggagccctggccttgctcaggattgattgcctgacccctttgccggtctgcccagccctgccgacccccacaccctgcccaggcaatggtcagtgtcctgtggcctccgtgtgtgaacagtttggttcggcttgctgacagagatggcaacatcagagattcctagccctgaaacccagattagaaaaggcaggagtgcagttcgcagatttgtagagctgtggagcagctacccctctttgcttagccaggtgccatcacctagatagtacaggaaaaggagacctgcgaggagaggggcaggagggagaaggcgcaggaagcagtagcaggtgctcgtgccagctgcacctcttttactcagagcccagacacaggtgcttcggtgcctaccttggtggttgtgtctctgccacccggcagcctctcccactgtcctctgggggaccgccggtttccagcacgtgcttggtgctgtgggatgcagaggggccttctgctgtgaatctctaacggacttcctggtgaccaaaacctgaaggtttcctcccctgcatgcagcctttcactgaggctcctgtggaggtttgcagattttcttttctcaaactcagtcccgccccttgttcttgcagataagggagttttcccttagggccctctgtggcctcctggcccagcctttctggttcaaagggcacagggccatactacctatgaggctgagcatttcatttgcttcaattaaattttccattaacttggtctctggccagtatggattttctctctaaggttgtctctgcagttcagatcactcagccctgagaatcaaccttatgactcccctctggtccatttaagtacatttctattttttctcccctaatgagatgcacagcaaccgaccataattttaatgcctgacacctgaacttcttacatcctctcagatgtttctggtttgcctaagactttgttctaagcctaggggttgatttcctcctttggaaattttgaccaaaggcatttttgaccaaagtcatctgtttgggataatgaatggcctttctgtgctctcgggaggagagcaggttccataccaccctccatatgatctcgcagctttgccaaacctccacgccaagcttatgagaattcccgagagctgggggaggcgaagtgggtgggacatcctgtggtcacgctgtttcctccacagcccccacaattttttggtctttcatagaaccttggggaaattaaaagtggtccttaatcaggaaaatgctgaagttcctggaatagaggacgccttgtaagtttcctttctaaatggacatctcgactttgagagaggttcacagcactcctagcattgctcactctggtggagcaagttgctgtgctgtgagatgctctgcaaagggacccatctggcaacaaaccaacagctcattggaaactcagtcctgctgacaaccatgtgaaaaagctggaaaagtgggtcctgccctagttgaggtttgagatgcagccttgtgagagattcagaaccagaaggcctgtggctgcacctggtcccctgacccacagaagctgtgagaccctaaatgttattttaagcccctaagtgttgggggtaatttatgacacagcaaaagataactattgtggacagaagaaaggaagccgtttcattcctcttgattctgcatgtccagattggaagttgtcattattaactcagcagtagctaggatagatctggtacagagtatctgcccacttctctgccagggagtttatgtttgtttgttgtagtttttttcagcaaagggtttgttgcttatgaatgaaacacagaaagcaccactattaggagagagttcatgaagttcatcttagaagcctactggtttcctaagctgcttcagctcctcttggcatggtttgccattctaaccctagttctcaagcatggacaacagataatggtgtgagtagcctgcagatagcagtaccttagggtccgccacaggggctcagggttgtggtccaggggaataaccagaaggggtctctaatacaacctgtgcaggtcctggaggcctcgaatggctgcatctcacataccctgtccctttgtttccaccagtccttgtgcttccactgttctgaggtataatcagagaacttggtttccaaccccttggatctacttagatgcctggcccatctcccggacctactcttctgtcagaggcaggagcctctttggacaggctcatcagaaacagaacatcttctgcagtggacacagacacaactatttgatagagaggctgggagacccccggccatctggccagctctaatggctcacggagaatcgaggagtgggggcgccacatgagggactgttcgcctcatggaacacaggagatttccagtagattttgttatttgaggagtgggcatagggtagaggtaggggtgtctttcagaggattcctggggtcagccttctaggaagaaggagtccatttggcctctttttttcaggctttttatctcctccacacccccaaacagtagaaagcctgcaaggggtttaccaccagcatcattctactcctcaagtctcaggtgctggcatctttaatccacaaaataaattgtgatttagacaagaagagtgttcacttcttttgtttgtttgtttgaatacagttactttctaccaaaattttatcaaaggggtcaacgtgactcaatattactctagttcatattgaagataccttgggcgattaa

SEQ ID NO: 585770 - DNA, 4001 bp, Homo sapiens
caagctaactgcggtccagtcacaggaagggtggcctgtgaatgagataagctggggacaaaaactactctaagttccttgagggcaggggccttcactctggcagcatgttcctcagtacccagcagggagtccaatgaaagtggaagccctggagtaccatgcagggattctgactcccgttcctgaatcatgagctgatctcccatacttgagtgccttggcttgatggcacctgtcccttggaggggtctccatctgcccctgggcccccctcgaatacactgcttctcctttggtccacagcctcactaggccactacagacactggctccaacttgaaagaggcccttatcttgtctctaggttacttcatgatatctgttccttccttcagactaaactccccacctaattccatgttatgagtaagtcagcacacactacaaaagccagctttgtttatgaaaacacaaatccacagtgaggagaggggctgctcccaggttgggggtggcagtggcgatgcgctgtctggaaccaggactggaaaagaggcagtgtggggctggaaggtgtgggggcagggtccagtatttgacagctgaggatctctagtgtttcagttctgtgaaaggacaggttggagggggaagaggttagctgaagaggcagtgtttggggagaggagggcggcattgatacagcaccttcctcttcacagagcaggagcccatccaatacaacagagcagcttaagagccaaacgctcaggctctgggacacagcgacctgtgtcggacactcaggcttccccaactcccaagttcaactttccttctggcccagccatctcctcacccagctggcttcaggagcccctgggacaataggcagaatcatactctcctgggcaaaaccttgccaggaggaattttctttttgtccatataaatctcttgtcggtgaggacacgatgggggaggggtacagcaagaggtcaagggggaggagaaactgtcccgagagaactgtagtacatcagcctagtctctgcctgcacagccttgggacctgccaggcgatgagctgggggtcagggacgggggcgggaggcctccctgtctctctttaattcctagagggatctgtcagagctccccggcctggaattctactttgttattttaatgcaattctgacctggatttaaatggaattggaaacccgaggccttaataaataaatattatgataagaaatgaaagccatgcaagacgaaagagatttcaccccaaagaggcagaaacgcaacattcctgtcgggagccagtcacagaaattttcttctcttcttcagccccctaccatccggtgagagatgagttgatttttccataaaagatcctatttttcttcaacatttttccactgataaggcatcaacttagaaatgtctaactttgcatgcgggttgggggtaagggaaagaaatatacggcacggctgaaaagttttcattattccctcagtctctccaggccacagcgtaagtttctggcaatgtttgagagaagagaaaattctctctcagattttggaagacaagaagtctttcgaagatgctgggagtggatgaagtcgagcggaattctgaggcgcgtggtctcttctgcccaccgcccccaagagtttctcactcctctctgccgcccccagcttgtccggcttttcgctcggggcgcagcgcccagcggtcgggcccctggccggggagtccgggtgcacagagccgggttctgacagcagcacgctccccagcacctgccctgcccctcgggaatcgctcctaggccctgaggcccagcagccaggacagcccccaggccgcgcgcccctccttccttaccttgcgcggctttgctgtactgggcggcgcgggcgtggaccagcaggacaagcaggcagagcccgggtacgcgccccgagcccatggctggagctactggcggcccagccgccggggccggtctcgcggccaggggagggcggaagccggccggatcccagctcgcaggagggggaggggagggggcgccccgccggggccaggccgggggctgcagtcgcggggcgcggaccgcggcgccctcggcgcgaggctcccgatgctaccggctcctcctggccggacgtcggggagagcgaggcggagagtgcgacgaggcgaggggcgccaggggcgactgacggaggggaacccccgccctctccaagccggcctctgccagcggcggcggcggggctgctccgtgtaatcccacccaattcccagcttcgccgggagagagctgcagccggagagcgcgcagagcccgagcgaaggacctgagaaaggggaggggaaacgcagcgccagaaacacgccctttctgcctctctttcttcctctctcgctctttctccgtctctcaggctctttttcttcgcctttctcctcctcctcctctttctcctcctctcctcgctccttttcgttttcttcctcctccccctcctcctcctcctcctcctcctccttctccaccacctcctttttcgtgcccttttttctttcaaatggggcctcggcgcggtggccgctccccctgcgcgcccgggcgcggtggccccctccccaggctgccgggccgctgcctgcaggaatttacaatccggcgatgggggagcgggcctggtctccatggagacggcttccccgggagcagggaggtcaggcgcagaccgcgcgcaatcaatggatcaatgcaagctccgctcggctccagaccaaacagcaccgggctccgactcgtcctcgctcccctaggaaagagtcggggagcgagggtgcgtccccgcgctcgctcgcgaggacggccgtgcggcgccaggtttgaacgcacacctccacccgagacaaagagggtgcgaggtgttggggaggctggggcagacgtggacacacggacacacgggcactcgggcgtgtccaccgacacagcctgacaggggacataggacctcggaacacaccgcctccgacaccaggccgagtaacaacctctcaacttttacacctaccacacccccaacctcaagactcagtccccattcctagatgcgagtccactttgaggaccaaaaagaaagtagcctccgcctgctaaaactgccagctccagggcagactcccttgcagttaaggccttggaggtaagcctaatgaaccaccctacccgcagagacatggactcacatacagacactctcatgtggtcagcacaggggcgaaagctaccccacagaatcatgtctatgtgtataaacacagagacatagagacaggtacaagaggctcctccaaacctgcaccccgcttcaagaggtggtcctgactggtccattctgaacccttcatccttccaactgaggggaagcagaggaaagagaaaggatatttttaaaacaggggcaaaccgcagaaggagcagggtcttccaaccatggatgctgcctcttgactgttcacccactctgtatcttctttccttccattgtaagggaaagaggaaagacctcttgaaaggctatgaagactttcttggagtgtgaggctgtgttcagaatgagaccaggccaggtccagttttctacagggaagatgctgctaggacccagactagcctcacagagccctcagcgtacccaggaggaagaggcaatgaccaagatctcctcaaaggtgattcagttctgagaccttccatattggctgcccacatcagctggggcaaggggaggactttgttggcaatggtgctgtccaccagggagaagagctgagcccttcctttcctagggattcagtggaaaagtaggatggaaacagactcaaacttcttatcctgggatgaagattacttttgaacaagtcatatgtcaatgggcctcagtttcc

SEQ ID NO: 585771 - DNA, 4001 bp, Homo sapiens
ttctacactaccaattgcacacataatggctgttaggtgaaaataaactactgaaaagtgtacccttttaacttgaaatacaacaaccacaagaatggcctaggtttgcagataagaaaagccattacagcattaagacttcacttatacacaatcactgcccaaagaacctacccaattttttttcctttttcaacatcgaggaagaacctacacaatttaaatgcacttaggaaataaggcacaacagtccaagatccaaatttcataaactacccattgagtaaaaaaagtattaagactagtaactttggacagatttttgcatctaatggatttttaaacttattgtcaaacgtacaaaatgatgcaatcctttgttactatttatcctaaatttattttagttctattccaagtcaagaatgttagtttcctgcagatcacatggggcgggggggaaaaagaatgttacaggacactgaatccatctgaaagtataacaagttctgagctgattcaaggcttcactgttaacaacttctccaagtagagtatataacctggacaacctagacctccagcacacccaattgaagagaagatatttaagcaagttagcacagctcttgtgcaatagaaagctttccctaagttgttaatactcaaaacccactccttactgttaacactaccataaataacccattaggccctcgcagttacatcagctttaagaataccatctgccatatgtcctagtagagtgcaacaaatggatgcaaacattacccaaacatcaagtgaaatatgaaaagaatctgttattctgtgctttaattcgatgttgtttaatgtgaaaagacttagaaccaaaagtaaatcgacccactacctcaaaattccctacaagattaattaaacgagacttaatccttcatacttgcactttttccgtcacaaacaggaaactccgaagaaaaggaaatagaaaaaagcctatttttgctaagaggaataacggcattgcttccaacccccacagtgagtgaacaaatgaaaaagcaacgggaggaagtgacgggggtaggcggtggaaagctcaattggagtcctaagcatgccacccggctcagagatgccctaaaacatctgttaagagcagctgcaacagggaaaccggagtcgggggatgagggccgcgaactggacggactgagagttgtgcccgcacgttcagtctcttcttggccaactctttgctcacctcccaagtccccatcccgcttcctccataaagaaaaatccccaataaaagcaaaggcagagaagacaaagaggcaggaggaggctgcaaggagcgtccacaacaatggagaagatggagcgagcgaaactcctgaggacaatgaagggaggtggagaagcgccgagggaaacgctgctgacccgggccccgccagtggcggacgctggacacaggccgggccgcaccgtccctgtcatcccggacgccgcgggctggggccgggcaagcgggcgccgcagggcctgggggcgctggcggggcctgcgcgggttcgcgggcaaaggccggcgggactcaccggcattctgatctcggggccagaggtagtatgtcgccgggatcacgatgagccccacgaaggaggtgaggaagtagaagaaggtgttcccactgtcatcgtactggaactgctgcccggccatggcaccccctcctccgcctcgctcttctcaccgccgccgccacgaccacgctctgcactcccgctcccaacgccccggcccgagtggcgtagcttggacactgccgccgccgcctctcctccccgcccccacgccactctcacggacacgccgccgccacctctgccgctgccgccgccgtcgccagctctcgcgagaggagatagttcccgccccgctcagttttccctccccctgcgtgtccccagcgagctcgctaagggagacgtggcgagcgcaacggtggaactcggcgaggtctcgcccttagccccgccctaacgtcaaagccctcccccaacccctcccctagggtcccgcccctaaccgctccgccttcctccaccgctcagtttcccagcgcaccacgccggattccgggcgtcggcgtacaggatcccagagaaggcttcccgccggagcagcggtcgcgggcggttcacctggctgcgcaggggtcccagatattcagagaagagctgaggctcagcctgtcctgccctctggattaattgccctggttgatcacgtttccttgggttctggatctgctcctccagcccccatattttggaaacaagtgtcatttagaatagggggtgggaggccgggcacagtggctcacgcctgtaatcccagcactttgagaggccgaggcggacggatcatgagatcaggagttcgagaccagcctgaccaacatggtgaaacccactctctactaaaaatacaaaaattagccggacgtggtggcgcgcgcctccatctcaaaaaaaaaaaaaattgggggatggggaggtgtgggttgcgggaggtgtgggttgcagttgtgttttcaaagcaatgtttactatctggccgggcgcagtggctcatgcctgtaatcccagtactttgggagaccgggtggatcatgaggtcaggagttccagaccagcctaaccaacatggtgaaaccgcgtctctactaaaaatacaaaaactagccggctgtggtggcacgcgcctgtaatcccagctactcaggaggctgaggcaggagaatcgcttgaacccgggaggcggaggttgcagtgagaccggatcgctctccactgggcgacagatttgaatctacgctgtgcccatcttgcagatgaagatttccccaagccgttacagatggttccctacccattccagagctgctaattataaccaccagcttcaggcggtaggctgagacctttattgttttgtgtcatttagtcatcagtaaaccccatggaataaagcaaagtatgtctgctctacaaatgagaaaattgaggcccagagagactgcccaaggtccctcacagtaaaagaatgtctgaggattcaaacccatatcattttgatgccacaaagccagtgtgcccttgaccctccatcgcccaggaccttaaaatttcctgacagtgactggcattctccctgcgggttgtgaacaggaaactgcatttcagggatggacggtggcgggagcagtcgctctcgggagcctctccttcccctggctgtgggaccctagaggctggtgtccgctgagctggaaactggacttctgcccagatctttgaacgaccccacggtccagcggcagctgtggctggggtctatcccagagtccattgcccctctctgggttaaaaggatagcccacctggttgcagagattgaaaggactaattgtgaaaatgcttttcaaaggagaaagtgtaatatgcaaataccaaatattacactatatttcaaggactcattttaatactttatactctgttaactaaatgcattataatattccttccattgttggaggaaaaatctggttgctcattgtctttcatttcatgtcttcaaaactagtatcttaatcagtaatgctttccttcataatagattgtgttcatatgtattctctcttcccttcaaatttcctatctactcactttgaaaggaaatttctgaaattcatttctatgcatttccctcctcactttttttctgcacaaagttcaaaactatattataggtgaaaaaataaaaccaagaaatgaagggaaggttgaactatgaaatcaacatagcattgtgatctcccaacgctgatatacccagagtgaacaatttgccttgctacagaaaattagtcacagacttgttgcagctgaagtgagcaggatcatgaagttccttttgtttgttga

SEQ ID NO: 585772 - DNA, 4001 bp, Homo sapiens
cagaagcttttcttactcttactaggaaatctcctgtaaagttctcatcacttttagataaaggctggcttgtacggtaagacttttttttcactttactatactcaagtaagaagaattaagaaaaattacctctattattcactattctttcactagactaacactgagtacctactgtgttccaggcactgttcgaggtgctgttaacaaagcagtaccaaagcattcccattcctcaacaccctcctatagaacctgtttagggattttcttaattttaagttaaattgtactttcttgattcagtaatctttccgaaacatactaaaagaagttattttttgaagtaaagcttatgacatattgcaatgaaaatcatctttgcaaaattatccaaagagtagttaattctttttaacaagaagaatgagtctctgagcagcagagactcattttgctaaacaaagtgtaaacactgaacccatagtcaaattaagtaatataaacacttcttgggctacaattacaataacatttagctctattttgggggtccttatatattcataggccaaaaaaatcaatattgttccccattaccaccttccccaacaaaaacatacagcttttcttgaggctggcttagtctacttacagcaaatgtttaactttccctcacgagtgagtaaaactcaaattgtgtcaataagctttagttacggccccaaaattgacactgtaaaccttactctttttccagataaattattttacagaatatttttataaaaacacattccgaaagaatatcagacaaggccaggcctaatctgaaggctggctgcaaaagcaagcctgaaactctgagaaacagaccagagggtataaaacacacctcaatgaaactgtctgtcccctccctacttagattggtccccagttgcacccaaccttagcaatttgaaacttttcatgaacaccagacaagatgtgaatgctggctgctctcatccttaggccaccaccccaaaattttttaaatgtcaaagacttcagcgcgcactctcaaaggacgcccaccaactctggctcgtagctcaatccacccgcgccccctgggccgaaccggctcgcagccgagcccctcgcctaggcggactcgaaccaggtgcgctcgcagcacactccctccccgtcatcgctcatccctcgtacttcaccgcccccgaaacccacccagcgcagataactgaatatccggggttctgggggccacgttttccagtataccctcccttctccccgtcaagggcagaaacagacgtaccttccagaaaagtaatctcccctgcgctaccgccgctcttgccggccgccatcttcctcctcccacgccgcctccttcttaatccatggcccacaccgccgccgtgctcgccgggatgaggggccgcgccggaggagggtagacgccgcagggttgcgggcctcgggctcagccgtcaggcgggctgcgctcccacgttcagacgggcctatacaaaggcaggccaggcgcgcccgggcctgtccgcgggctggcgggcagcgaggcccgcggcccgagcttctcaggcctctccgggggaacgcgaccggcgacgacgacgacggcgcttcccgggcccggttcctctcggcccacgactccccatccaccgcccacccaggctgcctgagaaacttcccccagccgtgggttcccaagaaaggagaatgaaagcgagcacacaaacacgcctcccttcgtcccaggccgtaaaatggccgcacccgccgcgccggagcggcgaggtctctgcgaccgtcaggcgcccccaggcccctagctcgttctgcagccgccgccgctacggccgtccgcccaccccgcccaggcgtgaatgcatcagcggaggcctttgcgactgtccatgtggacaggggtgggtctcctctgccaccgcctcgcgtcggtcgccacagcagctccagccgccgccgctgccgctcctcccccacgggcgctggagctgccgcccggctcccgcccccgccccgacgccgccgcccccagcgcggctccccctcagcagcccggactcggctcgcgggcagagctggctgcggcgccgcaccgagccctgacttgtgggcgcccgccgcccgggctttcggcagggtaggcctttcacggcgcgggctcggcctagacacgttacatccaaaatccccaccgcccagggccccatggcagacctggcgtgtgcgatgggtttgctcctctggcaccacagatgcctaagaaatgtgaaaatgtcatttcttgaggagaccttagaatttaaactacagccaaccgaagagaaaaggtagtgaggtactggaatcatatgtttagtaaatgattcgtggtctacatttatttttaaagaagtttccaaaataatttagcagggaagatcctaccagtcagctttaaatggcagtgtttttttgttttttaaaaagtcccttgtcatttacgtgcctgagacttgaaaaaaccataccctaccttacaagtgaggccttttttttttttaacttcttttcctttaaaaattttctcttattataaaaataatacattctcattcaaggaaatatggaaagcacagaaaatgattataatgtttcacgactgaaactcaactcctgtaggtttgtagtcctctgatagcatttttcttgtctttcagtatcgttctttaaaaaacaaaaatgagcaaaaatctatgctaaatgtcaatgaaaagtcaacagcaattaaaatgatgcagaaaaccgacatgattaagtgcagtctttggggaatggactgttctaattcagttgtgctattaacgaaggcctaagcggaaaggcttattgtttaaaacgtcctttaaaatctttttcctaatgcgaaccaataatctttcctgattggcaagagtagtgtaatgaatgtaatttatttttgttgcctgaggttattgcatgatcctgttgtggtgttctatgacatcgtctgtgccaatgacagtataatactgagaagtgtaggtaataggcaaatgtgggtaactggccatttgtacagacttcaacatgtagttttaaaaaaatctttaaggccgggcacggtggctcacgcctgtaatcccagcactttgggaggccgaggcgggtggatcacctgaggtcgggaggagttcaagatcagcctgaccaacatggagaaaccccgtctgtactaaaaatacaaaattagctgggcgtcgtggcacgtgcctgtaatctcagctactcaggaggctgaggcaggagaatcgcttgaatccgggaggcggaggttgcgatgaacggagatcgtgccattgcaccccagcctgggcaacaagagcgaaactccgtctcaaaaaaaaaaaaaaaaaaactttcagcagcttgattccatttggaaaaattgtttttttaattaaaaataaatctttgcttttaaaatgcatatatgctggctttgaaaatggaagaaggtgccaggagtcaaggaatgtgtgtggcctctggaagctggaaaaagcaagaaaatcagttctcctcaagagtctccagaaaggaaaactgacactttgactttagcccaatcagaaaggtattggacttctgaccctgcagaactatcagaaaaaaatttgtgttaaattgctaaattagtggtaattaccatgtgttacagcaacacatggaatgggaaacaaggtaaagtgtgtagaagatttttgtttgtttgttttttgagacggagtttcacttgtcgcccaggctggagtgcaatggcatgatctcggttcacggcaacctccgcctcccaggttcaagcgattctcctgcctcagcctcccgagtagctgggattgcaggcgcccgccaccacgcccggctaatttttgtat

SEQ ID NO: 585773 - DNA, 4001 bp, Homo sapiens
ataccacttagtggtatactaaactcccgtatgtaaataggtatgtttctagtgtctctattctgttccatgaatctaattctctatccctgaatcaatatcataccatcttaataattacaactttatattaagctttggtatctgatagggagagaccttatttttcttcttcttcaaaattgacttcactattcttggtcccttgcctttccatataaattttaagttcagcatggcaaattccataaaacaatatggtgattttaattggcattacactgaattcgtagaactgaggaaaactgacatctttttgttgagtctttccatctattaatacggtatatctcaccatttacttgggtcatcttttgtgttccaacagagccttacaattttctgtctaaaggactacacagctttaggttcatctatttctaggtacctttagttttgaatgccattatgaatagtgtctttttattattaaaactcctagttaattgttactggtatacagaagtttttaaatgcagaaattaaggccatttctgacatccccctggccaaaataacccctctagtcactctttatcacatcaccaaatggtacttattccttaactgatttcagagtctctctgcccccaccaaaattagttacctgttcaccattgtatcccaagcgtctagaataatagctgacacacatcaagtgcacaaaaatggaactgatgagatcaaggaagagaatgtatgcaagatgaaaaaaagcaaataaaagatacttgggaagaagaagacttggaggcaatttttttattttaaagagagtgcaacaatatggaaatcaccagttggaaaagatttgagggatagaaagagggaactaaatggaagagctgggttccttagcgatcacatgaacacacacgatgttaaaaaaaaaaaaaaaaaaaaaaaggcagcatgaggtcgggcgcggtggctcacacctgtaatcgcagcactctgggaggccgaggcgggggatcacctgatgtcaggaattccagaccagcctggccaacatggacaaaccccgtgtctactaaaaatacgaaaatcagccgggcgtggtagcgcacgcctgtaatcccagttactagggagaatgaggcaggataattgcttgaacccaggagacggaggttgcagtgagcccagatcgcgccactgcactccagcctggcagacagaccgagactccatctcaaaaaaaaaaaaaaaaaaggcagcatgagcttaatgcgggaagtacaatttaacctaaggaacagaaaacaagaatctcatatctcaactagtaaaaataatgacagtgttcctttagacttacagaacagacttggggaaagggagtaactttagaaccttctggggtctttcactttaaaatgaccgttgccgagtttagagctctctcagcattcaatctattccatctctggggttagagagggagcaggaagcggtggtctgcaaggctcagaagtgactggtgaggccctttcctcctcctcctcatctctccgtgactaccgagcccgggaagacggaccggcaggtgcactccccaaggcctcgacagcagccagagaaaggcagcgacagggaaagacgagtcaggctcgcgaccaccagagagagaggccctcacgcccagccgagcgtcagctggtcggtccggtccgcgcgccagacggcggtgctcggccgtgcccggtccctgccctccccattctccgctccccaccgcgcccagctgcgccgacgcccccgtccgcccccacaccacccctgccttcacgtcctacctgccggcaggcggactcagcccgtgcccaactgctcgtcggaccccgttgtctggggagccctactctttccgcggctcccggccgggaccctccacccggcggctggcggctcgtgaccccgccccctcggcccgctctgggcccgcctcccgccggctggctccacccacaatagcgtccctagcgcgatggcgtatcggcgcaggcgcactctgccggcaacgccgaggcgcttctgcatctgtgggccgaggtgtgtggcgagcgtccgagcggctggggaaagtggggtgtgggaacactgaggggtcccaaagaaaggggagaggaagagaaaagccccagaagcctgtccaccgggtgctgggggcacagggcggtgtcccccactctctccgggcccttcctggcggggccgcacggcagtccccccctcgtttaatcgtgggtttcctgtggggctagggctcgccctgcgcccaggtgtaagtggaagttaattaaatgggcgtacgctgagtggtttgtttccagcctaggtccgcacgggacgtgatttatttagtgaaggggcacaagatctggagatctggcttgtacttttttcctttggccaggaactacggcttaatctcttcctttggtctcctcatatgtaaaatgaggtggctgaggccgggcgcggtggctcacgcctgcaatcccagcacattgggaggccgaggcgggcaaatcacttgaggccaggagttcgagaccagcctggccaacatggtgaaaccccgtctccactaaaaatacaataaattggcctggcgcggtggctcacacctgttgtcccagcactttgggaggccgaggtaggtggatcatttgagatcaggagttcgagaccagcctggccaacatggtgaaaccctgcctctactaaaaatacaaaatttggcctggcgtggtggcgggcgcctgtagtccccgctgcttgggaggctgaggcaggagaatcgcttgagcccgggaggcagaggttgcagtgagccgacatcacgacactgcgctccagcctgggcgacagagtgagactctgtctcgaagtgtatatatacatatatatatattatatatgtattttatatataatatatatttattttatatataatatataatatgtatattatgtatattatatataatacgtatattatatataatacatatatataatatgtatattatatattatatataatattatattgtatattatatattatatataatatattgtatattatatatattatatattatatatattatattgtatattatatataatatattgtatattatataatatattgtatattatatataatatacagtatattatatataatatactgtatattatatataatatattgtatattatatataatatattgtatattacatatattgtatattacatataatatattgtatattacatatattgtatattacatataatatattgtatattatataatatataatatatattatataatatattgtatattatatattatataatatattgtatattatatattatataatatattgtatattatatataatatattgtatattatatattatatattgtatattatatattatatataaaagtgtgtatatatatacacacacacacacacgatacaacacagtacattagctgggcttagtagtgcatgcctgtagtcccagctactcgggaggctgaggtgggaggatcgcttgaacccaggaggcaagaggttgcagggagcagagatcgcgccactgcactacagcctgggcggcagagccagaccctgtctcagtaaaataaaatataaactaaaaggaggtggttgggctcactgtataatttttgaagcacctttcagaactatcttctttgattcctgtctcccaggatcttaccctttgtcattctcctgaatgggaaaagaaatcctttgaataatggacggtttatacctgggttgggcacactggtgtagagttaggcctcttgcttctattagggctaattgaccttgggtagaattggctggcgagtaagatgtggcattaata

SEQ ID NO: 585774 - DNA, 4001 bp, Homo sapiens
tcatcctcccaagtgctgggattacaggcgtgagccactgcagcaggctctgagtgttacttttgaaaagctgaataaattttaatttcatcaaaacctctaagtaaatgagcacattaactgttaagaatgtggaagagatggtccccttcaatgactattggcctgcagtaaaatcaaacaattaatgaatagagacagaggcacaaggaagaaaagggaaaaagattactgaaactgcaaacaataaaataaattccaaactgagcacggtagcacctgcctgtagtaccagctacctgggaggctgaggttacacttaagcccagcagttccaggctgcagttcactacgaccatcccctgcacttcagcccggccaatacacttagacccccatctctaaaaaactgcctcactgcttctacctttttaatgtacttcgctattaacacagaaactaaaaggcagggtcaattttatcacggacattcttctaatcaataaaggtggcgatctattttgtaaaagggaaaacatgtatctcatcttttaaatctctattatatacaaaaaactacagcacgcccacttcataactggacaagatacgacattacaaattgaattgcataacatcttccaataaaaaaccgatgaaaacaatcttatatgataatcaattatcagttttcaaaactgtttatcacactaaatatgcctcttttgtataaaagtcaataattaaactctctaatatcttgagataaaatattccaggcttccgtgcaagaagaaataccatataatcaaaagaacagactggctggagtaacaatccccacattattatttgattaaaattcaacatttttagttcaagacatatcaaaacctttaagagtatatataacggaatcatttgggaagtcagaaaagcaattgttagaaacagaattaacaaattccagactaaagaaaagtgatttgagtccaaatacctcgcctaaaattacaaatatctttattaactgcactgccaatgttttgcctactattttggagggggcagagattatcttaaataaactgaaatttgtgccacacggaccaaagtcttgccactatactgaaaatagttttactctaacaactctttaatgaaaatgcaatgtacagctaattaagcatgaaatttcagatgacacacgcatgttttgtgcctaaagacaaaattgtcattaggcacaaggcatgcgtgtgtcatctgaaatttcaattttaagttgaaatctgaaattgacacttcaaacagttacggcagagctatgactatttgtttcaaaaacaatattactacattagcattactgccaggcggttccaaatgacgacaggcactttttaatcataatctgcgccactgaacaaagagggcgacatgaatccaggaacgacagtgcggcagtctgaggtcgccaggaaagagatgacaacagagtgggtaccccaccgaaggaaaggggcaaagacctttgtagagatggcctgcgcagatacaaacaaaaccacgaaaagggacctcaaagaatgggagacagcgttcacgaagcaggggtgggggaggggccctattctagttctcttcctcaatttgagtcatcttcccatcgccactaaaccttacggccagtgatcagttcttcgcaagacccaaagctctgaagctgagtctgagtgacgagaggagacgggaagaaaacggggacagagagggcactccctgttgggtggggcaccacattcccgccgggctcacccagccccggctcggatcgccttctctttggtctctcacactagcaccccagaggccgcaaaaagcaccttacccagctcgccatggagcacagccccaggacgctccccatctccacaacgtcacaagagcagcggatacagacaagatggagacagcttctttctcgcctttccgagattatttactatctgcgagacacttccggacgcacagcgcaacccgcccctcagcctcgcgtcacttccttccaggcctgggtaggataaaacacggagcgcgcagcgctgagactgcgcatgcgcgtcactagacgacacggctgtcttctttcctggagaatttctcaaggactgctggctggaaacttaacggctaatgtggatctgaccgtagtttgccaaattaagaaaacggtgtgagcaaaacccacctttacctaccatgcacttgcatttgggcattagtagagaacagagctgaggtggtggttgacgttttgccctccttcatctgaggaacctctctgctttttaggggattgcttcctctttctcagtctttgtccgtcctaactccacttatttcccatttttcccacgtttgcatcctgttttgctcttgcgtttgcaacgtattcctgcagcccgctgcccggaacaagttttattgggatatttatattcatctgtgtgcttcagtttctctgtatcatttctgtttgctattgacttatattttaatttcttatgctattaagatgttacaagaaatttgcacgttaaaattatttttaattagttagataagacattatcaaactcaaacattgatttcgaatgtcatgagctgttgaggcatgtggaacccttgcatattaggtgatgatgcacatctgcagggaatgcattcctataaaagttccagttatttttttagagttatttgttcttgaaaatattctgggaaacagctcaaacttgaaatagtcattcccataactaataataagaaagtgttgtaaaatctacaaaaattgcatgggtcgaggtggggtaaacacctaagaatctggaagaatgtcagaatccctactcctagttattgtaaccactaagggacaatcttgctttattcttctttgccttatctgtggttttgtagaccactcttaaagcaaagtattataatagagcatccataaggtttaaagaattgtggaaatgcttgtaatcccagaactttgggaggctgaggcaggcgggtcacaaggccaggagttcaagaccagcctggccagcatggtgaaaccccatctctactaaaaatacaaaaaattagccgggcatggtggcacgcgcatgtaatcccagctactcgggaggcgaggcaggagaactgcttgaacccgggaggcagaggttgcagtgagccgagattgggccactgcactccagcctgggctgcagagcgagactccgtctcaaaaaaaaagaatagtggaaatggaaattacaaacctaacaatatttttaattatgctaaacttaatacgttatttatgggagaagagaatcctagtatctcaagtccttaaacttttcaaagtaccagagaaggagacaaaaaacacttatatgtgagtaactttaaggtcgtaaagaatatgtttattagccaaatggagaatgggtctcttaaaatttaaatttgcacagattcttgtctcttgctccatttaagagggtttctgagatattcataagttcttgcactattcaatagagttttttcacctgagatattcagagttaaatacaaaagtcatattaatctttctggaatgtaacacttggccttgaaatacattaaaaaaaatttacttttatttaacctgtaggctatgtggagtggaatttgctcacttaagttattatatatacaacattaattggacacgacagtatatatagactattttattcgttagaagagtcttcgacaccagtctcatttttctctttgccaactatgaaagaaaattgaaatgatgactttttcaaatttcaacccaaacacagctcaaagcatagttttctcaatatataccagctattagtaggagcacccatttctccaggtgacttcctgtagcacacgtataacttacaatgccaaaattc

SEQ ID NO: 585775 - DNA, 4001 bp, Homo sapiens
catatcatcatatgcaaagcaaaaactggaagatgctagctcaggaggatgtagtatgcctttcaggaaagctgtcagattcatccactggaacagaagcctcgccctgcagggatttttgtcagctttgctcactgctgtctcctcagcaatacgaaaaacagttcctggtacgtggtaggtacttaggaaaaacctgatgatgaatggaagcctgcatacaagtgtgacttttctgaaagtctgatctcataaaaatacagttctgaaaacacaaggtaagagctcaaaggcacaacctttccatgcagactgtccattcgtagggagatgggaggaaagcagacccttttttttgtttctgctgaccttggacagctgtgctgccgtgttacctctggtccccagaaaaaccatggccatagcagatgaaatgctgaagggagagatgaagatgtttccagccggattgttctcactcaacgccaggaacaggtccaaggcgaagcgggtgtttgctgagctcagctgctccatggtgaaaactgcaacacagaacagggtcctcatggtgcccactgcccacgccagcagattaggcagcactatttctccagaagcttcctcaatttctgccaaccgccctgaggcatcctggatcttgtactttctccccgcttttttattccagcagggcaagaacactttcccaggcccacaaatgtgggaccattctggccaaggactcagcagttataggggattttagggcacccagggtgccctaaagggctctgaccttgcagacaggtgagtctgggggtggggcgggggtaaggcaggccccagctaccccagctttagtggggtgggagggcccacccagccctgggtcttcccaacctatgtgtgggagcgcacgtgcttctgagcctttgattcaagtctctgattcattgggcaatgaatccattgcctaccttcacctgaactaagagccttctatcagagactcagctacctactatgcattaaaactccagcaaaggtatcactgtaattattataataatataattcttccttatttttgaggttcaaaaggtatgaggtccagtgcccacagtctcagagccggtgtaggatgtgccagtttggaaacccaccacagtccagggtctggccgtgcagcgtcccatccgccacccactagcccatctcgatctccactctcagagccctgatttcccccgaggacaggcaaagaagaaccgtgctggctgctcggcatgtaagcacaaagctgatttctccttgttgtgaaatcgtctctagaatcgcacggggttcctcctctctctccctgcagctgcagataggagccgcggcctggccctgggctgcctggaaaccgtcacaaacagctctgggaggaagggaattcagggagaagggacaacattctgatctcaggtttcagtcttgccttccgcctgcatctgtcgtcctccctccctccctccctcgcgggctggcccggcctgtacccaggcgggggcgggggatcagaggtcgtctgtctccgtcggggcgcccggaagggatgggggcgcgaagctggcggggagggcgagcgcagggagctgcgggtctgaggggcctgagcctggggggtggggggtgccgggctggaagctgagcgagggagcctggcctctccccgcgcccgcccccgcgccaccgctccgaggcccggccttacccgacaggccgccgaggcacgctccgggctccgagctgggtgcgaggtcaggaaggaggcaccgagggccgctgctcttatagcaggcggaagcgtcacccgggccagcagccgcgggcggggcggcggcccttcccggtgactgcgtaggagtccgagctcccgaggtcgcctaagtgcaagcagaagtgagcgtggcttccgggcagcgccctcctcaggggcgcggcttctttctcagttcaaagcctttccccgaatctctggcaaggacctgaaaagctttttcttactaaggtgtgaatgactgagacgacatattgtgacacctcttagagggcaaatgactccctttgagtcccatctatattgggagctttctttgagagaaggaagcaaatttggggatcttgcacagggaaaaagaggggcccccagaatcagatgaaacagaaccagttccaaacacctgctctctgtttccaagatgacagcttgctgctgcgtcctcaatggtggaaagtggaagggcaaaaggggccaaatctcatgtgaagtctctcgtataaggggccaatcccattcatgaggaaggtgccctcataatccagtcacctcctaaaggcaccacctgttagtattgcattgaggattgtttcagcatgaattttgcagggaacacagacattcaaagcatagcattctgcccctgccctccaaattcatacccctctcacatgcaaaatgcatgcattgtatcccagtggcctccaaagttccagtatcaactttaaaatgtaagtccaaagtctcacctaaatatcttctaaattagaaaggcataagattcaaagtacaattcatcctaagtgaaattcccctccagctatgagcccgtgaaatcaaataggttacaggccttcaaaatacagtgatgagacaggcataggacgtacattcccattcccaaagggagaagcaggcaagaagaaaggagtatctggtcccaagtaagtccaaacccaacaaggcaaacagcattaaatcttggggcttcagaataatcttctttgatgctgtgtcccccattccgagcacaggggggtggagactgggtcccctagtgtccaggggatccactcccatggatttgccaggtgcaacccatgcagcagctctcacaggttgaggtctaggctctcccaggatagacttgcatgctggtggctggacagttctgggttctcagggacagccctgttcccacagctccactagatattactctatttggggctctctgcagtggccccaatcccactgctccactaaacattgccctagtgagggttttctgcagcagcctcacctcagtgacaattctcagactgggcccccagggtccccaacacatccttcaaaatctaggtggaggtggctgtgtctccacagttcatgcactctgtgcacctgcagagttagcatcacgtggactctgccaaggcttacaggaagggtggcctgacaagggcctgcataagccacacgtgggatggtggccaaagagtgctgcaccagaatgtggggggtgggggggcagagacttgaggcagccctaggcagcaagccccaaggttccatggtgtcctgagtcctcccttaaaactattctgccctcagggtcctggcactctgggacagggatgagaatccagaaccagtaacctcagaaatgcctttgggttcattcttccattgtcttgataaatagcatctggcttccttctacacatactcatctcattatcaaatgtgaacctggcagcactcttggtgttccctcccaaacatgccttttcattctttacatggccaggctgagaattttccaaaactttaagctctgcttccctcttgattataaacttcgtttttaattcattctctctgctcacattttactacaagcagtcaagagaagccatgctgcactctcaacgctttgctcagagatttcttccatcaaatatcctagtttattgcctttaagttctgccattcagaaaacactaggacatagacacaattcagccaagttcattgccactgtgtaacaaggatgacctttcctccagtttccttttaagatctcatcaaaagtgtctttaccatctatacttctaaccgcattctgatcaagaccagaccacttaattaatctctaagatgatttaggctc

SEQ ID NO: 585776 - DNA, 4001 bp, Homo sapiens
tctgcttgggtgcccttattattacatatgtggaaaagaatgttggttctattcatgctaatttcactctactgttactggtccgtgttaactgtttcatgctgaattgtaataaaatgcattggaattggccttaacttaaaatacttagtttacatagtcgagtatgaccaaagtacttttctctttggtggcacatcacaatggatgcaattactcagatacggtcctgaaatgagaacaaacgccatctatgctgataacagcagtcactggtgttaatcccagcacacataaaagccccagcaatacaaggccggcccaggaccttaactagaaggtcactgaacacatcagatctcatcgcatcaggcctgacccccaccagaaaggatgcaggcagctgcagggctgtcattaggcacgagagcatcccagaaagcaaaagtgcccaaaaaatggactcagatgccccctcgcatctgagtattcctgacagcatgtgaacattaattattaattttctgtacctcagttttccgaagccaatctttaggacaaaaaaaaaaaaaaaaaaaaggaagaaaataacttaaatgccaatttgtagttaaagtttcctctttgccttgaagacatcaaagcctgtaatagtttgcctgtagggagtttaattcaaacacagagcggtaaggagatccgggctggtccacacgatcgtctccacaggtctgggcgacctgaaagtgctgcggattggccaagcccagcacggccagtccagtgaacacacgcagggggcccggatggcaccgtttggcgccgaacccctcggcctctctccgcctcccgcccggctcctaacacccggcgccccaagactgagcacgcgtcctccgggtcgcggagcgggcgaggggtcaccgaggccgcggggccgaccggggtcacctgtggcccgggaggctctgcgccgcccccatcccgcgccggccgcctcttccgtgggcgctgggcctgggcgcccggggtcctcgggtccgcggcgtcaccggccgggctcgcggccacgcacgactcacccggccgcgtcgccgttctctgccgctgcgaggctccggaagggaacccaagccggacgctcgcccgggcccccgccccgctgggactgctggggtcacagccccgcgcggccacgccccattctcggggctccagcgtccccgcgcgccgtcgacccacgcgcgttcccggccccgcgcgacccccaccctgcccccctccccgctcgcgcccccggctttcccgactttggagcgacaaacccaagccagcgtgtccgagcggctcccaagccagacacgtactccagagcggggagcgagcgagcagaacggcgggcagaggcgccggagccgccccggacctcaaatactcgcggggaggcgggcggagtcccgggtctcgagctaccgtcgcccgtccggagcgcgaagggagaggcggggcgggacgtgcgggtcaaccccacccgccagccggaggggccgcgagtcctgcccggaggccttgactttgaccacagtacagggccccaccagcgtgtttatggtgcctctgtggagactgaatgctggcctgtttccagaaaagggccggctcctgatacacggccatccactggggagtgcagaacacgcatttaaaaatgagcagactagatacaggtcacaaagactttgctgatgaaacagcttgcggcaaagaagccagccaggggcgggcgcggggctcacgccagtaatcccaacactgggaggccgaggcaggcggatcactggaggtcaggagttccagaccagcctggccaacatggcaaaaccccgtctctactaaaaatacaaaaattagccgagtgtaatggcgcgtgcctgtaatctcagttgctggggaagctgaggcaggagaatcacttgaacccgggaggcagaggctgcagtgagccgagatggcgccaccgcactccagtctggtccgtctcaaaaaaaaaaaaaaaaaaaaaaaaaaaaaaagtagactaaatagcttttgcaaagcaaaaggaatagtcaagcagagtaaacagacaacctacagagtgggagaaaatcttcacaatctatacatccgacaaagcagtaatatccagaatctacaagaaactcaaacaaattagcaagaaaaaaaaatcccatcaaaaagtgggctggcatgaatagacagttctcaaaagaggatatgcaaatggccaacaaacaagaaaaaatgctcaacatcactaatgattagggaaatgcaaatcaaaaccacaatgtgataccaccttactcccgcaagagtggccttaatcaaaaaatcaaaaactcaaaaaataatagatgttggcgtggatttggtgaagagggaacacctctacactgctgatggatagtacaaccactgtggaaaatagtatggcgattccttaaataactaaaaatagaactaccatttgatccagcaatcccactactgggtatctacgcagaggaaaataagtcattatacaaaaaagatacttgcacacgcatgttaatagcagcacaattcgtaattgcaaaaacatgaaaccaacccaaatgcccatcaatcaaagagtggataaagaaactgtggtatgcgtatacggtggaatgctactcagccataaaaaggaatgaattaatggcattggcaacctggatgggattggagactgttgttctaagtgaagtaactcaggaatggaaaaccaaacattgtatgttctcactcataagtaggacctaaactatgaggatacaaaggcataagaatgatacaatggactttggggacttgggggaaaagggtgggaagggagtgagggataaaaggctacaaatttgagttcagtgtatactgctaaggtgatagatgcaccagaatctcacaaatcaccactaaagaacttacttggcagggcgcagtggctcatgcccgtaatctcagcactttgggaggccaaggcaggcagatcatgaggtcaggagttcgagaccagcctggccagcatggtgaaacccccgtctctactaaaaatataaaaaaattaggcatggtggcacacatctgtagtgccagctactgaggaggctgaggcaggagaattgcttgaatctagcaggcggaggttggttgcagtgagctgagatcatgccactgcaccccagcctgggcaacagagcaagaccccatctcaggaaaaaaaaaaaaaagcttgccatgtaaccaaataccacgtgttctccaaaaaactatggaaataaaaaaactaaaatatatattaaatttaaaaataaatgtatataaatgagcagagcccacatcattgagccgtgtgttcaaggacttccagttctctccaggcataggaattagaccccagggtactgacaggttagccaagtaagtatgaaaactccatctgccatctcagacagagcagtcttggaaaacagaaacatctagcataaatggaagtagggaagatactagccaggtgttttacatgagttcaattttgagaactcaagctgttttactccctctgtgcttaccctaaggcagagtttctcaactgcgacactgttgaccgcatgaacccgataacttgtggttgtgggggctgtcctgccatcacacatgtttcacagaatctctggaggagattcaccaagtggatgccaggagcaaaccacacgcccctccctagttgtggcttaattagtcttaagtgatataaattgcgaatatttcccccagcttgtcatctgttttctgacattgcttctggtgattttggcatacactcttttaatgtagtcaactttaatgatttttcctttattgtttctgagtcgtagttagaaaaactttctctattcacaaggagcaatctcttt

SEQ ID NO: 585777 - DNA, 4001 bp, Homo sapiens
ttagcttcagtaaataagatagctaagtgtccttcatatatatatgtgaatacacatgtatatatgtacatagacaaatatttatgcaaaattaattgtttcaaaatttaaaaactataccatttaaaaataaaaaatgatatttaatcacagacataaaaactggatattaaagtcttattaatgaacaattttatgtattttttaaacaagcctaacaaatctatcctggcatcactttttttttcctgtagcatcaccagtaactgagcaatgttcacaattgattttattcaactaatcaagtcttaatttttttttaggtgtcactattgaattgtgcttctcaacttctattaaggatgcctttatttcctactaaatttaaccatttaaagactggtttaatggaaacttggacttcctgctttgtccctctgtttccttgtgcagtgtgtatgtgtgtgtgtgtgtgtgttgtgtgtgtatgtgtttaatatatctgagcagcctaacatataaatgggagttaaacattattttcaggctaggcgcagtggctcacatctgtaatcccagcactttgggaggccaaggcgggcagatcacgaggtcaggagtttgagaccagcctggccagcatggtgaaaccccattgctactaaaaatacaaaaattagccaggtatggagcccgggaggtggaggttgcagtcagccgaaatcgcaccactgcactccagcctggcaaaaaaaaaaaaaaaaaaaattttctttctttggatgccttggcttaatcccaagtgcagtaagcctggaaatgtaaggtgtgtggtcttccctgggaccgtacaacatctgcttgggtgcccttattattacatatgtggaaaagaatgttggttctattcatgctaatttcactctactgttactggtccgtgttaactgtttcatgctgaattgtaataaaatgcattggaattggccttaacttaaaatacttagtttacatagtcgagtatgaccaaagtacttttctctttggtggcacatcacaatggatgcaattactcagatacggtcctgaaatgagaacaaacgccatctatgctgataacagcagtcactggtgttaatcccagcacacataaaagccccagcaatacaaggccggcccaggaccttaactagaaggtcactgaacacatcagatctcatcgcatcaggcctgacccccaccagaaaggatgcaggcagctgcagggctgtcattaggcacgagagcatcccagaaagcaaaagtgcccaaaaaatggactcagatgccccctcgcatctgagtattcctgacagcatgtgaacattaattattaattttctgtacctcagttttccgaagccaatctttaggacaaaaaaaaaaaaaaaaaaaaggaagaaaataacttaaatgccaatttgtagttaaagtttcctctttgccttgaagacatcaaagcctgtaatagtttgcctgtagggagtttaattcaaacacagagcggtaaggagatccgggctggtccacacgatcgtctccacaggtctgggcgacctgaaagtgctgcggattggccaagcccagcacggccagtccagtgaacacacgcagggggcccggatggcaccgtttggcgccgaacccctcggcctctctccgcctcccgcccggctcctaacacccggcgccccaagactgagcacgcgtcctccgggtcgcggagcgggcgaggggtcaccgaggccgcggggccgaccggggtcacctgtggcccgggaggctctgcgccgcccccatcccgcgccggccgcctcttccgtgggcgctgggcctgggcgcccggggtcctcgggtccgcggcgtcaccggccgggctcgcggccacgcacgactcacccggccgcgtcgccgttctctgccgctgcgaggctccggaagggaacccaagccggacgctcgcccgggcccccgccccgctgggactgctggggtcacagccccgcgcggccacgccccattctcggggctccagcgtccccgcgcgccgtcgacccacgcgcgttcccggccccgcgcgacccccaccctgcccccctccccgctcgcgcccccggctttcccgactttggagcgacaaacccaagccagcgtgtccgagcggctcccaagccagacacgtactccagagcggggagcgagcgagcagaacggcgggcagaggcgccggagccgccccggacctcaaatactcgcggggaggcgggcggagtcccgggtctcgagctaccgtcgcccgtccggagcgcgaagggagaggcggggcgggacgtgcgggtcaaccccacccgccagccggaggggccgcgagtcctgcccggaggccttgactttgaccacagtacagggccccaccagcgtgtttatggtgcctctgtggagactgaatgctggcctgtttccagaaaagggccggctcctgatacacggccatccactggggagtgcagaacacgcatttaaaaatgagcagactagatacaggtcacaaagactttgctgatgaaacagcttgcggcaaagaagccagccaggggcgggcgcggggctcacgccagtaatcccaacactgggaggccgaggcaggcggatcactggaggtcaggagttccagaccagcctggccaacatggcaaaaccccgtctctactaaaaatacaaaaattagccgagtgtaatggcgcgtgcctgtaatctcagttgctggggaagctgaggcaggagaatcacttgaacccgggaggcagaggctgcagtgagccgagatggcgccaccgcactccagtctggtccgtctcaaaaaaaaaaaaaaaaaaaaaaaaaaaaaaagtagactaaatagcttttgcaaagcaaaaggaatagtcaagcagagtaaacagacaacctacagagtgggagaaaatcttcacaatctatacatccgacaaagcagtaatatccagaatctacaagaaactcaaacaaattagcaagaaaaaaaaatcccatcaaaaagtgggctggcatgaatagacagttctcaaaagaggatatgcaaatggccaacaaacaagaaaaaatgctcaacatcactaatgattagggaaatgcaaatcaaaaccacaatgtgataccaccttactcccgcaagagtggccttaatcaaaaaatcaaaaactcaaaaaataatagatgttggcgtggatttggtgaagagggaacacctctacactgctgatggatagtacaaccactgtggaaaatagtatggcgattccttaaataactaaaaatagaactaccatttgatccagcaatcccactactgggtatctacgcagaggaaaataagtcattatacaaaaaagatacttgcacacgcatgttaatagcagcacaattcgtaattgcaaaaacatgaaaccaacccaaatgcccatcaatcaaagagtggataaagaaactgtggtatgcgtatacggtggaatgctactcagccataaaaaggaatgaattaatggcattggcaacctggatgggattggagactgttgttctaagtgaagtaactcaggaatggaaaaccaaacattgtatgttctcactcataagtaggacctaaactatgaggatacaaaggcataagaatgatacaatggactttggggacttgggggaaaagggtgggaagggagtgagggataaaaggctacaaatttgagttcagtgtatactgctaaggtgatagatgcaccagaatctcacaaatcaccactaaagaacttacttggcagggcgcagtggctcatgcccgtaatctcagcactttgggaggccaaggcaggcagatcatgaggtcaggagttcgagaccagcctggccagcatggtgaaacccccgtctctactaaaaatataaaa

SEQ ID NO: 585778 - DNA, 4001 bp, Homo sapiens
taatgcataaacactgaacaattaatcataaaaaagattggagagatccaaatcctaaaaggaaagaaaaaataaatccacatttaaagtttaccactcaagatactccaaatatcaacaaattataaacaatctagtgagatttttctatcgagggctttctgttatcctttcagcaaacgtgtgagtaacaaggatgcctgtttcacagtcacgttgcaaactcaagacctgtcaatggctttttaaggacctacttctttagcttcagtaaataagatagctaagtgtccttcatatatatatgtgaatacacatgtatatatgtacatagacaaatatttatgcaaaattaattgtttcaaaatttaaaaactataccatttaaaaataaaaaatgatatttaatcacagacataaaaactggatattaaagtcttattaatgaacaattttatgtattttttaaacaagcctaacaaatctatcctggcatcactttttttttcctgtagcatcaccagtaactgagcaatgttcacaattgattttattcaactaatcaagtcttaatttttttttaggtgtcactattgaattgtgcttctcaacttctattaaggatgcctttatttcctactaaatttaaccatttaaagactggtttaatggaaacttggacttcctgctttgtccctctgtttccttgtgcagtgtgtatgtgtgtgtgtgtgtgtgttgtgtgtgtatgtgtttaatatatctgagcagcctaacatataaatgggagttaaacattattttcaggctaggcgcagtggctcacatctgtaatcccagcactttgggaggccaaggcgggcagatcacgaggtcaggagtttgagaccagcctggccagcatggtgaaaccccattgctactaaaaatacaaaaattagccaggtatggagcccgggaggtggaggttgcagtcagccgaaatcgcaccactgcactccagcctggcaaaaaaaaaaaaaaaaaaaattttctttctttggatgccttggcttaatcccaagtgcagtaagcctggaaatgtaaggtgtgtggtcttccctgggaccgtacaacatctgcttgggtgcccttattattacatatgtggaaaagaatgttggttctattcatgctaatttcactctactgttactggtccgtgttaactgtttcatgctgaattgtaataaaatgcattggaattggccttaacttaaaatacttagtttacatagtcgagtatgaccaaagtacttttctctttggtggcacatcacaatggatgcaattactcagatacggtcctgaaatgagaacaaacgccatctatgctgataacagcagtcactggtgttaatcccagcacacataaaagccccagcaatacaaggccggcccaggaccttaactagaaggtcactgaacacatcagatctcatcgcatcaggcctgacccccaccagaaaggatgcaggcagctgcagggctgtcattaggcacgagagcatcccagaaagcaaaagtgcccaaaaaatggactcagatgccccctcgcatctgagtattcctgacagcatgtgaacattaattattaattttctgtacctcagttttccgaagccaatctttaggacaaaaaaaaaaaaaaaaaaaaggaagaaaataacttaaatgccaatttgtagttaaagtttcctctttgccttgaagacatcaaagcctgtaatagtttgcctgtagggagtttaattcaaacacagagcggtaaggagatccgggctggtccacacgatcgtctccacaggtctgggcgacctgaaagtgctgcggattggccaagcccagcacggccagtccagtgaacacacgcagggggcccggatggcaccgtttggcgccgaacccctcggcctctctccgcctcccgcccggctcctaacacccggcgccccaagactgagcacgcgtcctccgggtcgcggagcgggcgaggggtcaccgaggccgcggggccgaccggggtcacctgtggcccgggaggctctgcgccgcccccatcccgcgccggccgcctcttccgtgggcgctgggcctgggcgcccggggtcctcgggtccgcggcgtcaccggccgggctcgcggccacgcacgactcacccggccgcgtcgccgttctctgccgctgcgaggctccggaagggaacccaagccggacgctcgcccgggcccccgccccgctgggactgctggggtcacagccccgcgcggccacgccccattctcggggctccagcgtccccgcgcgccgtcgacccacgcgcgttcccggccccgcgcgacccccaccctgcccccctccccgctcgcgcccccggctttcccgactttggagcgacaaacccaagccagcgtgtccgagcggctcccaagccagacacgtactccagagcggggagcgagcgagcagaacggcgggcagaggcgccggagccgccccggacctcaaatactcgcggggaggcgggcggagtcccgggtctcgagctaccgtcgcccgtccggagcgcgaagggagaggcggggcgggacgtgcgggtcaaccccacccgccagccggaggggccgcgagtcctgcccggaggccttgactttgaccacagtacagggccccaccagcgtgtttatggtgcctctgtggagactgaatgctggcctgtttccagaaaagggccggctcctgatacacggccatccactggggagtgcagaacacgcatttaaaaatgagcagactagatacaggtcacaaagactttgctgatgaaacagcttgcggcaaagaagccagccaggggcgggcgcggggctcacgccagtaatcccaacactgggaggccgaggcaggcggatcactggaggtcaggagttccagaccagcctggccaacatggcaaaaccccgtctctactaaaaatacaaaaattagccgagtgtaatggcgcgtgcctgtaatctcagttgctggggaagctgaggcaggagaatcacttgaacccgggaggcagaggctgcagtgagccgagatggcgccaccgcactccagtctggtccgtctcaaaaaaaaaaaaaaaaaaaaaaaaaaaaaaagtagactaaatagcttttgcaaagcaaaaggaatagtcaagcagagtaaacagacaacctacagagtgggagaaaatcttcacaatctatacatccgacaaagcagtaatatccagaatctacaagaaactcaaacaaattagcaagaaaaaaaaatcccatcaaaaagtgggctggcatgaatagacagttctcaaaagaggatatgcaaatggccaacaaacaagaaaaaatgctcaacatcactaatgattagggaaatgcaaatcaaaaccacaatgtgataccaccttactcccgcaagagtggccttaatcaaaaaatcaaaaactcaaaaaataatagatgttggcgtggatttggtgaagagggaacacctctacactgctgatggatagtacaaccactgtggaaaatagtatggcgattccttaaataactaaaaatagaactaccatttgatccagcaatcccactactgggtatctacgcagaggaaaataagtcattatacaaaaaagatacttgcacacgcatgttaatagcagcacaattcgtaattgcaaaaacatgaaaccaacccaaatgcccatcaatcaaagagtggataaagaaactgtggtatgcgtatacggtggaatgctactcagccataaaaaggaatgaattaatggcattggcaacctggatgggattggagactgttgttctaagtgaagtaactcaggaatggaaaaccaaacattgtatgttctcactcataagtaggacctaaactatgaggatacaaaggcataagaatgatacaatgg

SEQ ID NO: 585779 - DNA, 4001 bp, Homo sapiens
tagtcgggaggggggagctggggtatcttcaggcaagtcggaatcacagaatcacatgttaaagtccaccaagcccttagagagacctaccatcaatgccccactgcactacagggaaggtgaagttgacggaagtgaagctaagaagtagctgggcttgaaacgcagggcggatgcgctttctgagctgctgctcaagaagaagaatctgcagaatcaggtgagaggacaaggggcagctaagggccccacaggcagtcaggctgggaaggaggggatgcaggaatgcagggatgcggggcctgcctgctctgacacagttctcagatgtttaccaaatgaatatgtcccagtcagagaatgccagcattctaagacagtcccagtgactcacttgagcagtgagtgggaacccacggaacaaggaaggggagaagctggagcagacatttcctggagcagatgggagagggaaggaggtgcctactggaggccctgtgaggagatgctgaattaagcggctctccactgtgcatgcctttacatttggagctggggttggctgagcaagtgctccaaagatacctgggtcataatccctgggacctgtgaatgccccttacatggcaaaagggactgtgcagcacgattagattcaggctcttgagatgggagattatcctggattgttccagttgaccctaaatgtaatcacaggtatccttctaagagggagggagggggagatctcacgggaaaaagcaatgcaaagaataaagcaaaatgccactccactggccttgaagatgaagggcctcaagccaagaaacgcaaggaccacagctgcagtagctggaaaggcaaggaggatcctctggaggagcctggccctgcggaacccatttccaacctccaacctcagaactctgagaaaataaacatgtgcagtttagccacgaatccatggtcatttgttacagcagccacgggaaaccaagacaataactcatacacctgataaagcttgtttgctgtgcttgtttaaatattttgttttcaaactcttctttattcattacacagaatacttggggcactgggcactcctggcttgccaagcctttccaaacatattttaagattactaatttctaataaaaggacaatagaaagtacatattactaaaattcttctgaatataagggagtctttgatgatacataaataaatccaggattccgcagagccctgggaacaccagtataaacaaaagtagccattacacggaactgaagcaaaattgggcctatttttggttctttggattctagatcacaagaactgcccgcttatcaacttgaagagaaacaattggtaaaacagggaaacttctaggttaagaataagaaaagaggagatgccccaaagcaagaagcacagcctgtgaagtccgtgtctcaggactcaaagccagcagacaccctgacacgtggggttttccctggcctggggacatggacttctgtctttgtccccaagagggctcagcccacgtggagaggctgccaggtgagatggctcctccataaaccaaaaaaaaaagacagaggttaagtaccatgtcagctggccaggggaaggtcccacatgctcccccaaccccatcctagactattctaccgtcagcacacgttttcccctcaaatgctgaaggactcttacgcttttttttttgtagagacaaggttcttgccaccttgcccaggctgctctccaacgcctggcctcaagtgatcttcctgcctcagcctcccaaggtgctgagattacagccatgcaccacgcccagcctaaaggacttttaattcaaatggaaatgtccacctaagaaaggctaataataaaacactccgtctccggtaatatcccggagaatctgtttcaggcgctgatctttatatcagtaacttcaacaaagcaaagccacctttgtctgaagacacgcccactggggaggtgcctgtctggccagcccaggttacaccatctggggcagaggagaagtcggtgcacatgagtttcactgtgtcaggggatttaatttgaaatactgaactggagaaaccaaagcaggatattcggaggagaagtcagtgcacatgagttttactgtgtcaggggatttaatctgaaacactgaactggagaaaccagaccaggatattcggaggagatggcacgagtcaggaggaagacagggtctctagtcctggctctggtaccctgggcaaatcactggactcctgataccagtttcctctctgtatgaggaaaagcatataccagataatctgggttcccttccatctctaacattcaataattgttaataccaaatgcagaaggaagagcaaaaatgtagctcaattttcaaagcccacagtgaggtcagtaatgatattccatttcttagttgaaaacactgctgacagccgtgaaaggtaaaattctatctatgccttacataaaaattgctgagcaacaaagaaacaataaatcaaggatgtcctagagatttaattttcttagcagaaactatgttagtcattaaataactgaatatcctactcctgataaacacccttacgtcaaacagcaagtggtacttcccatgcttccttaacaaggtaagaattacctacttcagcagccaccagcacagctgatgatagaacattagtcccttaactccccaaacaggaacaagataaaaatatctgtcgtcccaaccttgtgtaactttgttcagatagttctggcaaaggcaaatacaactcatgaaacataatgagaaaggagattgtcagaaaggagacaaaatgagcacagttagcaaacaatttgatggtctacccaaaaagcagccagaatcagtaaaatactcttaaaactgaaaaataatggagtaactgggctactaaaaaaataggaaaaacagaccccagtagaaacacgtgcaaaggacattaacaaatttacccccaaaaaagaaagacaatagctaataattatatttaaaagtttcaacttcagaaaaaaatatcacttttttgatatatactatgtgctaggtccacactgaaagacccttaccctctgagatagctgctgagaacacctacgttttataagcaaagaaatcgggccttagctctttaagtaccatgtctccagagaacccagggcaacaatggcagaatgacggctggaagccaggaccgcatggctctgtagttcactctcttaacaccatggtgcacagccttcccaaaaagcaatggtggagagtacattaaagatgccttttcaaaccatgaaccttgcaaatacaaaaacaattcatgctaatactgacaaagacaggcaatccttctcacgccatgcaagtaatacggaggcagcagggacagagcttggcccgtacccactcccgtattttccatacatcccccacgccatcacacctgcccaccagaccatgcaaaccagggagggaaacaagataagccatgttccaccccaaatcttacccaagggagttaagcctgatgcccacatgcatacaggatcagaacgacgatcctgacctcttgccttgttgtattactaaaaccctctcctcaggggctcatctgccatgccctgatcatgacacatctgtgctaacatgatgttccccggtgcctgccactagcgtgtgtaatgctgctgacacacctcatgactatccatgtcaccctaaaacaccaggaacacctgtcccgagggccagcccgggaactcctgcccctgtgccgctgccctcctgctccagcataagcccattataaagccttgtctgggacactttctctgtctcatgtcaatttccactgcatgagaatctaagaacccacgatcagtaacaatactgtaaattggtacaccagtatttcctgag

SEQ ID NO: 585780 - DNA, 4001 bp, Homo sapiens
aacacagagtgggacttggacaattgtgtggttttgcttcgttttgttttgtttttaatgtgcttcctaactcagaaacatctatttgggagctttactcattactcccagcaaaagccatgagtgtagattgtgcgtgagaggaaggatctgatccctgcagaacgccagaatggaaaggcaagaaacagcccaaggtgaggagtaaaacaggcgagaacaaggaggtggtgcctgtgaagccactggagaccaaagtgtgaatgtgagggggtgggtctcttggccacaggcctgaaaccaaatgaacccccacccccaggctgcagttcccagtgcacttggaaatgagaccctgactcctccaggtgagcctgggagacctccctgactcctttccatctccccctcctcccccacacccatccccaaggcctgccctctacgcccacatttcttcccacttcggattctgtgcctggtctaatgcccaggccccctcccgagcctctggtctccctagagccactccccactgtcgggacacctcatctgtgctccccaaaacgccacgcaaagcgctggagagccttggacaatgaacacaacccactcccccagccacccccacgccacagccacacggcacctcagaaagcggtgtcttaatcctcttgtccttcctcctaaatctcccaggggcccttaggcccctcaaaggtggccgctcaaagccaccttgttaaaacggtgtcttacccacctgccccctcccttgatccagactcactgaggtcacagcctccacctctggccatcctgaacccctcccaaagtcaactcttcacaaacactgttggtcccccttagaaggccccatgtccatcacggcattaattccactcaccctcaaacaccgcggcccggaggctctgattcccaccctggaggaggttctcttgaccccgccggcgcgaccctccccagcacgacccttcctcccgaaggtgattcctcatcttgctggtggtccccacagaccgcaggctctgcaggcgagcgctgagcctggctctgcagattctcaggaccccattcgtttagctgaattattgaaagaattaagatggataagagtgctcagatttgaaactccgagactggtggctttatttttttgttgttgttggtggtggtttttttgtgtttttcttttttttgttttgagacgaagtctcactctgtctgccaggctggagtgcagtggcgcaatcccagctcactgcaacctctgcctcccgagttgaagtgattttcctgcctcagcacatagctgacattattacaggcgtgggccaccatgcccggctaatttctgtatttttagtagagaccggttttcaccacgtttgccagactggtctcgaactcctgatctccaaggatccgaccgccttggcctcccaaagtgctgggattacaggcgtgagccactgcgcccggccgagactggtgactgtaaaggacagtgaagaagcaggacagacgtcatcctgcggatcccagagcagagaagagcagtgagaacacagggccggcaggtggggaggaggctgcaggggagggcttcggccagggaagggcagcgaggagacatccgggagggaggcgtccgcggtggctgtgggccgccaaggcggagaccggctgccgctcccaggcaccccccagagaccgttgctgaccccaccgagaaggcaccgcctccccggggctcttggctgagcgacctctcctgtcctccggtcccatcactcggtggcagccggtggacctgaagctcgccactcccgtcccctaccccagccgtgcgcggggacgccctcacctgccacctagtccagcgctgccgccgtctccgtgccgcgctccgagcctggacgccgacccccgaggcgcaggacccggccctgctgctgcgctcgccgcggactcccgctagggcctctgcaggcaccgcttttataccgcagggtcgggcgcctcccacgctttctgcgtttaggcggagcctggcgggaccagcgggggcgccgcgcgtggtggccgaggtcagagctgggagcagggtcaggtcagggtccccccagtccgccccgcccggggcgatgtccgccaatgctcccgccagcctgaggccggccaggttcccaaggcgcgcgctcggcctcacccacccccggcgccagggcctcttcaggaccgggttcagaacctgacagcccagagaagtaggttgggagcctgcggcgtccagggcctccgcgcgaagaaacaaggcgtctgcgggaaaggagacggagcctggaaccctgggcttttgtacttaaggaagcgaaggtcgggtgacagccaagctccgtgttccagtgggaaggtcccatgggtctgtgttccacgcctcttgtcatgaatatgggggattcacttagaaccaaagcatttgttccaggtcccaccactaactagtactagtcctgggcccagaaccaggcgtcctcactcctagtacccaagcccttctctagccacaggtgtttgggctgcggtgtggtgtaagcagccccattttcccgcaaagtgatgggaagagacactgagtcacacgggctcaggacactccttgtgtcctctatcagggggtccagaggcagggactcgggggagttgatgcagcagttcgtgatgtcatcagatatccccccacccccttccatctcaggctggactcaattggaagcatttcatgttggcacggtgacgtccagaggaagggaacagacaaatggctctctctggagcacggagcgtcgcccagaagccgtgccctcctgtttcaaattgaccagaattagagctttctcctgagggcctgaattagggagaagcaaggcaggtgcctaaggcacaaaatttcaggagggccacacgcataggtgccaaccctgcatttgcgcggccctgagaatcagagcctccttcaatttgacaccctaggtgcctagcttgtttttaaaaataaaacctttattaaaagacaattcacggaccataatatgcatccttttaaagcatacaattcaatagttcttggtatattgacaaagctgtccaactctcaccactatctaactccagaaggttttcatcaccctaaaaggaactgtgatacccattagcaattattctccatttcctccttcccacaacccctggcttctgggagaggctccgacctccagatttcttttctggccctgcggattgaccgactgtgaagatttcatgcaaattgaatcatacaatatgtggtctttcctgactgccttctttcacttagcataatgttttcaagggtcattcttgatggttccaggtagcatttgttagtactttatttctttttataactgaataatacttataaaaatattataaaatcaaaagggaaattagaatgtattttgaaattaataaaaaatgaaaataaaaacatcaaaatttgtaggatgttattaagtcagctttggggaaattttgcagcatgaaatgcctatattaggagaggagaaaggcttcaaatcaatgacctcagtttctaccttcaaaaactagaaaaagtataaatacattgaacacataatcagtagaaaagaagaaataataaagattagagaataaatcaatgatatagaaaactttataatgatagagacaattgattaaacaaaaagctgttatttatttatccacttatttatttttttgaggtggagtcttgctctatcgcctaggctggagaacaatggcgtgatcttggctcactgcaacctccacctcccaattccagcgattctcctgcctcagcctcccaagtagctgggactataggcatgcatcaccatacccagctaatttttgtatttttagtagagatgggg

SEQ ID NO: 585781 - DNA, 4001 bp, Homo sapiens
caaggtaaagatatgttatataaaaagtgaaagttcccatcccactcgcccttctctgggagattgcctatagctgggtgctggcctttcgacattcaaaaaatttaaatagaaatggagagatctagaagtgttagaaatatgcctactatagcaaaatgtactaacaattatgttaatattgtcattaatactaataggtaattcagaaatactgaaagtccaggtacttttttttttttttttttttgccttctatgaactatattttagaaaaaaaacttactgactttaagttactgcatttgtaatacttaggccatatttgtgccctatactttgctcaggagttccgtttcttgaaagtgtttaatttaaaagcattatggaagctagctatttgaaagaattgtgttattctttttgtaaagtgaatagttttcctataaagcattccttcctaagttatcttctcacatgttgggatgtattaaaaatgaaatacaactatacaaagcttcccggtttcctcaacacaatcccataagcgctgtaacaatatgcaagccaaaatctatttctttatcttttagtttacaaagctatctttagaaattctagatctgagcaagaaccaggactctgcacacaaacatcagcagaaataacagatctattcaagcatgatgattggggctcacttctactcaaaaagagaaaagatctattatgacccgcaaacagaaactgtaaatgttaattcaatactttcatactgttttcactttttggtaaagtttccaaagcgatactgtaagagatttttaaagattgttttattatctgtaaacaaggaacatctaatatgtccataaatgttaaaatctcaaaaaaatatttggtgctttacaaccttcatgacaaagtgtcttcatttaagtttctatgaatatacatagtatactgataatagactccattaaagaaatcacgaaaccacgtcattttagtgagtaaagctgcagaaaaaataattcacatttagatttcttgaactaaggcaacactctgacagcacctgatttcaatccaaatttaaggttcgagttttacctaaggttacattagtaactttcaaatggtttcctatttgcaaccacttagaaaaaaacacaaaatgttacaattaagtacctctttctaaaggacaattcagaaaagggatggcttaatacgcaagagtaaacgctgtgcataacgtcatagagcttgcaggacacacttattccaggcaacatcatctcttccctgagtcaaatgtgttttttttctttctctctcttttaagtaggaggcaaaggggatgaaggtggctaaataatctgttttcacaagacaagacaatcgagggggcatatccacaggctgtttcaccctcaagactcgaggtctgctggatttctgacttgtggagacttgtccagacgacaatgttatttacgtattggagactttcatttacatgaccgcggccgcagtctctcccagcttagcattttctgcccagggacgactcacggtgcgcaggtctcccacccaccgcaggcaaccccttcccccgaggggcgcaggagggccgggacgctgctccccgggagcccgccctatctggggagcgttttcggatgctgaccgggagcgactgtgaggaggcaacgtgacctccgtgttgcacagggcagctcggccgggtgcccacccgcccaggtacccagcggcccgctcagcccctcgcccaggtacctcgtcctggtcgcggcccccgccgcactgcttgcagcccagcagccccgagaccgccaaaggggccgtgtacgcctcgttcgcggcggcggccaagcgcatgtcggcgcggggacggctgcggacgcgcggaggcggcgagcgctgggcagccggccgcggctcctggctgcagcgcctcagtcagcacggacggcgggggggcggggcggcgccgacaaacaagccgcgcggccccgccccgcgcccgtcatttcaccgccctggcggccacgcaagccaatgcgggctcgcgtccccgcaaagcaccgcccctccggcgcggaggctgggaactggcggtctgacgcggcgaggtgaaaaatcaccttgggggcccaggttccccacgaacagctaattctcaggtacggaatgggctctggagggccgcgaggtgagcgtgcactgtcaggaaggtgcagcacgagtcttcgggcttcagggacaggggaatctgccccctacacccctgctcggccatttacctagaaccaaacagcagccaacctcgagactgattctgacagcaccaggagtaatgaagttctctaaattcgataaactattgaaatttcccttcttcctttcccataatgcccaaacgacgctgaatcggcagcagaatgcaggactttggcctataatcaatgcaaaattcattttgctaagctacgtaaaagctataaatatcactcccctacacagataataaaccttggtagcctatctctgaatcgtcttttttcctctcaagtatattcgaaggctttacaatttctaatattccttcataagcgccctccctgggttataaagacagaatttcaatctctgaaatcggatgaggaacttgggaaaatacaggttacaaaggagaaaaacaactgacattgttgggcccagaacccagatccctccagtcctgtgtcagtactatttctttacataactctattctctctctttaaaagaaacaaattcctaaattagatctctttttgcatgtttatgctgttttcaaagcttaagtgctcaggttaaaaaacaaaaaaagttggaacattctgacaaggaaacaagtggaatttatagcagtagttatggccacagaacaggactcataaatgaaaataagtttcagtcttagaagtgacgctaccgtgtctcagtgaaaactaagttactcttttagctcttcaactatcatgtttaaagtggcatgtcaaaatggttactttttatttatctcctaataaataagataaatgatatatgttctctatactgcttttaaaaaatagctaatgcacccaaaatattttttactggtcaaaagaagcaatattgagttaatgtcgatatagaagaaaaggctacagaggcttccaagctctcatccactgagcacagccacaaaaacaaacagtacaatcaaatgcccactcagccgtaagcaaatacaaaaacaaaacaaacccagtacatcatgcaatttgcagcaatatgacataccctgcaagataaactggttgtaaatgaatgagttggacacataaatgcacttgatgtatgggattgtgagctgcaaaagctagttaggtagaagtatgtgaaaaatgatgactctggttctagaagagttgaggtatgattttatttctgaaggaatcacagttttagttgtctagtagggcataatcttagttatgacatttgtaaaatgaagaatgcttatctttccattttctaatgagaggcaagggaaaagcatgcattcagttaaatcaaaagtggcttaaaataagtaaatgcaagtgaaaactgctaactgcatgcatatagtaggctgatacttagtgcttgataaatatttattgaagaaatatttcagatatactgaaattgtataggaagctccaattaggattcctttttcccccagatagtttcaaattattatttaatgctgccttatgtgaaaagaaaaataattttaatttaatattctaatttagtggtttatggagaaccttcaagccattaaatgtcaagattcctttatggtctctataaagactgacctaaattcctcaaagagtactaatttcttgttctctgctatagagcactagagtgaattagtcactctattctcc

SEQ ID NO: 585782 - DNA, 4001 bp, Homo sapiens
gcagatgtagatactaatcacagcactaacctcacaggctctctgtgaaggtgtggctggaagattaacatgagaacaatcttttcccctcaacaacctaataaccatctttgaaagagacaacaagtttccaccatcacaatattacttctgatgtttcctcaatgtataatgcaaaacactaattttcagagtgaaaattcgtagtgaatgttgacagtagtaccacagaaagactatgtttttattgtatcactgtatgaatcaatgtttgtgtactgaaaagtactgttccagtcagatgtttcaaatttgtgagatacatttatgcatctgtatcaatatccttaagtgaaataatgaatgaatgacaagtgcaaaatgaaagcattgttggcttacagtatctacccacctgcaaaattagttgagaagtaaaaatacacaaataatttgaatcattttgttttcctcgctacactattactgttgtgattatcacaacattcacagtaattttattttttaaattcaaaagcagcatgtgttttttgaaaaacatttcaacaaggtaaagatatgttatataaaaagtgaaagttcccatcccactcgcccttctctgggagattgcctatagctgggtgctggcctttcgacattcaaaaaatttaaatagaaatggagagatctagaagtgttagaaatatgcctactatagcaaaatgtactaacaattatgttaatattgtcattaatactaataggtaattcagaaatactgaaagtccaggtacttttttttttttttttttttgccttctatgaactatattttagaaaaaaaacttactgactttaagttactgcatttgtaatacttaggccatatttgtgccctatactttgctcaggagttccgtttcttgaaagtgtttaatttaaaagcattatggaagctagctatttgaaagaattgtgttattctttttgtaaagtgaatagttttcctataaagcattccttcctaagttatcttctcacatgttgggatgtattaaaaatgaaatacaactatacaaagcttcccggtttcctcaacacaatcccataagcgctgtaacaatatgcaagccaaaatctatttctttatcttttagtttacaaagctatctttagaaattctagatctgagcaagaaccaggactctgcacacaaacatcagcagaaataacagatctattcaagcatgatgattggggctcacttctactcaaaaagagaaaagatctattatgacccgcaaacagaaactgtaaatgttaattcaatactttcatactgttttcactttttggtaaagtttccaaagcgatactgtaagagatttttaaagattgttttattatctgtaaacaaggaacatctaatatgtccataaatgttaaaatctcaaaaaaatatttggtgctttacaaccttcatgacaaagtgtcttcatttaagtttctatgaatatacatagtatactgataatagactccattaaagaaatcacgaaaccacgtcattttagtgagtaaagctgcagaaaaaataattcacatttagatttcttgaactaaggcaacactctgacagcacctgatttcaatccaaatttaaggttcgagttttacctaaggttacattagtaactttcaaatggtttcctatttgcaaccacttagaaaaaaacacaaaatgttacaattaagtacctctttctaaaggacaattcagaaaagggatggcttaatacgcaagagtaaacgctgtgcataacgtcatagagcttgcaggacacacttattccaggcaacatcatctcttccctgagtcaaatgtgttttttttctttctctctcttttaagtaggaggcaaaggggatgaaggtggctaaataatctgttttcacaagacaagacaatcgagggggcatatccacaggctgtttcaccctcaagactcgaggtctgctggatttctgacttgtggagacttgtccagacgacaatgttatttacgtattggagactttcatttacatgaccgcggccgcagtctctcccagcttagcattttctgcccagggacgactcacggtgcgcaggtctcccacccaccgcaggcaaccccttcccccgaggggcgcaggagggccgggacgctgctccccgggagcccgccctatctggggagcgttttcggatgctgaccgggagcgactgtgaggaggcaacgtgacctccgtgttgcacagggcagctcggccgggtgcccacccgcccaggtacccagcggcccgctcagcccctcgcccaggtacctcgtcctggtcgcggcccccgccgcactgcttgcagcccagcagccccgagaccgccaaaggggccgtgtacgcctcgttcgcggcggcggccaagcgcatgtcggcgcggggacggctgcggacgcgcggaggcggcgagcgctgggcagccggccgcggctcctggctgcagcgcctcagtcagcacggacggcgggggggcggggcggcgccgacaaacaagccgcgcggccccgccccgcgcccgtcatttcaccgccctggcggccacgcaagccaatgcgggctcgcgtccccgcaaagcaccgcccctccggcgcggaggctgggaactggcggtctgacgcggcgaggtgaaaaatcaccttgggggcccaggttccccacgaacagctaattctcaggtacggaatgggctctggagggccgcgaggtgagcgtgcactgtcaggaaggtgcagcacgagtcttcgggcttcagggacaggggaatctgccccctacacccctgctcggccatttacctagaaccaaacagcagccaacctcgagactgattctgacagcaccaggagtaatgaagttctctaaattcgataaactattgaaatttcccttcttcctttcccataatgcccaaacgacgctgaatcggcagcagaatgcaggactttggcctataatcaatgcaaaattcattttgctaagctacgtaaaagctataaatatcactcccctacacagataataaaccttggtagcctatctctgaatcgtcttttttcctctcaagtatattcgaaggctttacaatttctaatattccttcataagcgccctccctgggttataaagacagaatttcaatctctgaaatcggatgaggaacttgggaaaatacaggttacaaaggagaaaaacaactgacattgttgggcccagaacccagatccctccagtcctgtgtcagtactatttctttacataactctattctctctctttaaaagaaacaaattcctaaattagatctctttttgcatgtttatgctgttttcaaagcttaagtgctcaggttaaaaaacaaaaaaagttggaacattctgacaaggaaacaagtggaatttatagcagtagttatggccacagaacaggactcataaatgaaaataagtttcagtcttagaagtgacgctaccgtgtctcagtgaaaactaagttactcttttagctcttcaactatcatgtttaaagtggcatgtcaaaatggttactttttatttatctcctaataaataagataaatgatatatgttctctatactgcttttaaaaaatagctaatgcacccaaaatattttttactggtcaaaagaagcaatattgagttaatgtcgatatagaagaaaaggctacagaggcttccaagctctcatccactgagcacagccacaaaaacaaacagtacaatcaaatgcccactcagccgtaagcaaatacaaaaacaaaacaaacccagtacatcatgcaatttgcagcaatatgacataccctgcaagataaactggttgtaaatgaatgagttggacacataaatgcacttgatgtatgggattgtgagctgcaaa

SEQ ID NO: 585783 - DNA, 4001 bp, Homo sapiens
atcaggaagagaccaaagtcaagtatcctgacggcaaaggaaagaacagaaaaactataaaaattacacacaaaaatacaaaaactaatggatcatatagtcagtcctccaccctttgctgcacaacaatagttgatatgcataatgatgaccccattatggacaaaaatggttgttacagtcactacagtctagaagatagagaaataactttttgtgtttcaaagggtaaacttcagttacctagtatattaattcctctcgggtaactctgaattgtaacaattgtttccaaagtgttagtgagaagaaatatcccaagatcttaaatagagtcttcattttgtggatattatttttctgttgctttaaactaaattcaagccagtatataaaaactgtcacttttaacttacatagttacccaagtacattttaaattttaaaaatctctcatacaggactttggacaacacacgtggattgagaaatgtaaagattgacaagcatatataaggtgttgctgaatattgtcaatatctaaaaacttaaaaaaaagtattctaagacaccttgtaataaaacaggataaattatgaacgaaatggaggaaaaactataatatttttaacctgctgcactcgtatcttaaatagctacacatgtgaaaaagaaacaattcaggcaaacacagagaaagctagttgagcaatttgccataaaagtgtttctatcaaataccccacctgggtccaccttttcaacatgaagatattagcttcttttaagataggtttttattattttatataattctcttcttgaaaaaagagaggttgcatttagagaacacatcctggtttgttttgtttttaaaaataagagaaaattgttccaccaattatcttgaacaggctgactaggaaacatttaatatcctttatcattttagaggcttttaaatgtgagcctttacactcagaacactgtgacaatgtgaaaaaaaaacactggctacattttccaacaacatgtaaaaagaaatataaggaaaaacaagtatttacttggaattaactgtagttttcatatattcttccaggagcaaagcagtttctgcctaaaactctagaaaaacactacttgtttacttacagaacactctaaagatgtaaactcataataaaagtttacataacaacctaatagaaacaaacacaacgtgaataacggcaagtaaaatttaactgtagtagagacatagttgtatttaaaatgctcttccttacctggatgctcttcagaataaactcacttttctctctcacatctttgaagggacacctcttagaaagcataagcagatgagcaagtagcttattcaacccatccgaagactcggtatttgaaagcccgtctgatggacgatgaggtgtttctttcaccgaacgaagatactcggttttcctcaaaatggtttgcctaatgttttccaatgctgtctccctagtagttgaatctctgctgcagagtccatcccatctcacttcattctctccttcagccatgacaatagtttttcctttgcggtcttcagttacctttcagcatgccccaaaaaaattgctttgtatttttaaaatgaaaaatgtaaaaataaaatcagagaaatcaaatcgtcatgaaaacacacatctgggtgacatttggaaccactggtgccttcagccgatctacaagctaggtcaccctctcaccctctccttgtacacgaaagggcagtcttctttctggaaaaacaaagtttgaaagttgcaaccttgcagcgctggctttggtgggcagagaatttcggggaagcgttctcctccgtctcgcggggtcagtggatatcctcacgttgtggagctgtcaaatccgtgctctgccccaaaaggctgttaacagctgaacgccctccagccattcggggcttttttgtctgtgcagccaccgggttctctccggcgttcccaccccgccccttctccgacaccagtccccgccctccgcagctcctcccagcgcctcagcagccggccggcgccggcagggaaggctcgccgaaccctggcccactggccgcagcggccggaggcttgggcgctgtcggagggcggcagtctcgggcagccgtagtctcggcgggcggcggtgaaaaaaagcgtcccccagccccgccaattcggcacccccgggaagacgctacttctccgatccctgagccctcgcccaccaccgccgagccagagggcacagggcggccctggcaatcctcgagcgccaggctgggccgcggagctggcggggcggcggggcccgaggcgcaaagcccgcccttcgcccagccccatcggtggggatcagcccagagggcgggagcagggagtggagacggggtcctcacccccagcccctcccctttctccgcccggcacaaaccgggagccgccccggccccagcgccttcttccccgcccaggcagacgcgacccgccgaggcaaagccttaggaaaaagccccgccctctggcaggctaccctccggaccccaagtgcgccgcgcgcggctgccagccactgccggctgctacgcatgcgtgactgcgaactgggccaagcgcccccggaggcgctaagcttgcgccctgaggcggtttccgttcccggacgtttggactctgtcctggagaaggggaaggaaaaagtaagacgtagaagtacactgagacttcgtcacacataaaacaagcacgacaaagaaagagggcgcgaagggactcctggaagaaattgagtctacatttaagatcaccctaaaagtagtgacggcctcttcattactccaaaccccagatttaagtcggtaggacgtcttcgcgttgacttgtggggaatgtagtttcgatgctgccggcgcgttttgtttgcgacagaaactacaacccccaggggccaccgcgacgttgcctgtgggtgcccgcgaaccaacggttagcggtggcaggggctgactgagagcgtctgcttggtaagcactgtaagctgggttgtcacctttccttgacagggtttttccttcctccatttcctctgggattttggagacaaagccatctagggtggcctcccttagtccaaggactttttccagtgacttgcgtgggaaggactagtccagctgcccaagcgcggggtgtggtgggtgaggcaaggatttgggatcctgatcccaagggtcgcagggagcggcctaagtaaggccaagaaggaaggatgctgtggaaactggagcttcgcgctgctgcctctgattccgcccttttttgtggacacacgcggggtggatttgggatctccgcgcatttgcacctttgtttgcctttgcttagggatgttctgggctttatttgctcagtcaaatgaaatcctaggcagggctttgaaagcaagttgtcaaatccatctcgtaaaagaatccccagtattcctagataggaattcttgcaggctttaaggatacagcaggaaaaagaaagcaaaaccgtaaaagtctccaaaacttagtcgactttttcaaaagattcagtcatttgcttaaaattagtttgcttttaaaaagttattatttgagaaaagtcgaggtttgaacggccatcagtggactgataatcggtgtagattttaattctttacattgcagaattgcattgcactaaattctaaaaatttcgtcttgctaggcactgagtatacaacaatgaaaaagacagtcttactagttagaggaactagttgttagacatacggttacaataatacatgatatcactgggatgtctagaaggagatgacttagcccaatcttggaaagtcagggaaatcttcatcccaggggaaatgaagaccaaaagaacagcatatgctaaggcccagagtgagagatagggtactttcaggaa

SEQ ID NO: 585784 - DNA, 4001 bp, Homo sapiens
ttgagccaggagttcaagagcagcccgggaaacatgagaccctcatctctacaaaaaaactaagaaatgcaaaaattagccgggcatggtggcacgtacctgtagtaccaactacttgggaggctgaggtgggaggattgcttgagccttggaagttgaggctgcagtgggccatgatcgtgccactgcactccagcctggagttccaaagccaccactgagctaagctatgccaggtcacgtgacttctctgcgtaaaaaccttccaatggtctgcagtggtggctcacacctgtaatcgtagcactttgggaagctgaagtgggaggactgcttgaggccaagagttcaagaccaacctggccaacatatcaagatccatctcgtgtttttaaaaactaaaattaaaaaaaaccacaaccttccaatggctcctcagaggttcatatattgtcctacaagactctactctgttttcccctccattacctgtccctctacttttccccttactcactccctccagccatgcttgcctctttgaagttcctccaataaaccatacatactcccagcgttagtaccattgcactggcagttccctcttcatggaaagcaatttctccagttttccgcatggccatttccctcattttcctgaagtctttgctcaaatgtcaccatctcagtaacttgtgcatcatatttaagattacagccctaccagctactcccacccgcaccacatacattgttctcccctccccgcagcatcttctaacatttgcttattacatctagtgtttgacctcctttctccaccaccagcataatgtaagccccaagaacacgggaaaatgcctgtcacatagagctcaacaaatatttgttgaatgtagaatggatgaactcgcttgccagcttgtcatttctggagacatggccacaaattcccaagaaaaaaaaaaggatgcattttaaagaggctagggaggacaatgacagcaaagactgcaaagagttttaaaacaggagaaaaagaagatgggatacaataaccacaaatttcaatactgaaggcattgtgggcctgaaaataacgctcttgggaaaagtggcagtcggggaattaattataaaggtagacacggcggatctaagtgcctggccatggacactggcatgcgctccctcacccaaacccacttcccgctcagctctttccggagccttccaccctaacacagaaagttcacaccaagagactgaacgatttctaaactttatggaaaaagccaatgacaatcaattagccaaaaacgagacgccaaatcccatctcactccagcgccatgccctcttctcaaacgctcgccggctctaggacctctccaccagcacagttctcaggagtcctgctggtctcccagtgctgttctaagggtccacatgaaggcaggtcaggcgggactccccgggcaagcacttctgtacgcggaaagcacgaggcgcaggagccatggagagccggtcctttggagacaggaatacttaagaggattggcaaaccggagaaacgctgggagaggtgccccgcactgcggtggtaaggcagagtctcagttctcctcgggcttgtcggctggcggtccacaaggctgaagcatcttttccatcaagttgaagcggactcgcgctttgctctcattctccgcaatggcgaagtagttgagaaggtcgaagtggcccatgtaggagcagtacgagtcgcggtgttggttcaccagccactcccacttggtggtgtcggcgtggcccgtgccgatgtacttggactgcaggtgctccagctggctatggatggtgtagcggtcagtcatctcgccgctttccccttcgctctcaggtcagaggacgcaggtaacaactcgccgctctagcgttttacaggagagtgaagccaccgcgcggaagctccaggtccgcgccgtcgcagaagaatggcgtcacaacgactaagtagcgtaactctcgctcatagggctcagaggcggaagcggaagcacattctgtcacgcaattggagttgctgaggcgacgcaacaagtgtgcctcccccctccatggagatccccgccccatcagagaatgttgcatgatggtccacttagtggctaagggaggcccttttccaacaaggagcgttgcatgctgggacttgtggtcttgggagttcgtgcacgcaggcttccgggactcctggtcgcgttctgttgtttgtttgtttgtttgtttaagacggagtcttgcactgttgcccgggctgcaatgcaatggcgcgatctcggctcactgcaacctccgcctcctgggttcacgcgattctcctgcttcagcctcccgagtagctgggatgacagttgcacaccaccacgcccggctagtttttttgtatttttagtaaagacggggtttcactggtctcgaacccctgacctcgtgatccgcccgcctcggactcccaaagtgctgggattacaggcgtgagccaccgcgcccggcccctggtcgcgttttaaaagtgatctggggacctagtggagggcgatgtctggaggtggggagcatccgtgggtggcttggggctgataggaaatgggaaacccaagaatgactggactacgagcagccccgaaaataaactcttggtgtatttcggagccgtcgtggcggcacggccgtcccttcacaaccggggatggattacccagaagtcagcaggcgccagttctggtcccaactatgtctcttaggagtttgtggcataaaagagttatttcagctctaaccagggtgcttggtgagcaagtacagcaccagttcccacacattccggcttccacctcaagctcctccttcctctctagccacttattttgatatcctccctccaaggcctcacctcaccctacttggctcttccattcagtgggttttgtggattcaaccaacctgattgaaaatattgggggaaaatatcagtctgtaccgaaatgcagactttttaaggttattattccctaaacaatacagtataacaactatttacatagcatttacattgtattaggtatgttaaataatctagagacaaactatacaggaggatgtgcgtatatgcaaatacaagccgttttatatcagggacttgagcatcctctagttttggtatccatgggggtcctggaacaaatcactcacgaatactgagggacaactgtatttctccatgttacctgttgtgtccatccccatttccttgtacaagctattccctctacgtggaatgtctgttcccttggtgaacgcatctccctttaaaggcagctcaaatgcatctccttagagttttctctggctgctccagacagatgtaaactctctttcctctttgcaagttatacgtctcttccttattattgctttatgtcctactgtttggtttaataacttccttacatgggtagaagctacttgaaaaaaagatcctttttttaaaaaaaaaaagtccaaaacaaaaatttgataaatggataaattattacaaccgaagagaaggaaaactttactgggaaggagataacttgaaaataattttattctgctgtttaaacttcgttataacaaatgtttcactcctaaaatgtaaagaattttgccaggcatacttgtgggagatgtatcaaaccttaacattttgccatttttctatggagcctgtttttttgattgctgaaagtgtgtatccatgcacaatagttgtttttgttatgcaagttttaaagctctatataaataacactccgtctatattgttataaaagttgctttttgcccttgtcagtattcatgttacatgttatgtaactttagttcattgtttactgctatacagtatgtcacttaattagtataacataacatgtccactctctcaatga

SEQ ID NO: 585785 - DNA, 4001 bp, Homo sapiens
agctgtgctcacatgactccctggcagggaggccttatctaagtaatatggcaaccccaacctcctcaacctgctctgactttttctgtggctgtctgacacattatatacttgtttattcactgtttcctccaattaaaatttaagttccatgtgaaagaggtatttgcactggtcactgttattaacacctgcatcttgaacaatgtcaaacatatgcaggaacttgaatatttgttaatgaacgatcacctcctctgaactcacagcacttgtctatacagccagtcactctaatctttgattgattacttctccacatatctttctcccctctagacagtgggctcaagataagtgatattacctttgcatctccaaagtttagagtagcactgtccaatagaactttctgcaatgcaaatgttctgtatctgcgctgtttaatacagtagcctttaaccacatgtgcctactgaacatgtgaaatgtggttgctgtgactaaggaactgaatgttaaattttatttaattttaattaatttaaatttaattgctccaggcgcagtggctcaagcctgtcatccaagcactttgggaggtcaaggtgggcggatcacttgaggtcaggagttcgagaccagcctgaccaacatggtgaaacccccatctctactaaaaacacaaaataattagcagggcatggtggcaggtgcctgtaatcccagctactcaggaggctgaggcaggagaattgcttgaacccgggaggcagaggttgcagcgagtcgagatcacgccactgcactccaggcctgagcgacaaagcaagactccatctaaaaaaaaaaaaaaaaaaaattcattggccacatgtggctgtggtaatatacagagttacagagtgcaatgagaacagatacttgtcttacactctctgaacccaaaactgtagcccagaactctacccacaccaagtgctgagtaagtataatgacaaggaagtcaggagagacaaatagaagatccttatgaaatacaattcaattttaaacgtccaacttctgcgacagcacacaataacgtgcaatataatcgcatgcaataacaaaaaaacttacaccgcagttcctgctccactgctacttttaaccttcttgctggaggaagtaacccttatcaagtctcgctggtaaggcgcagacacaagggcttttattaagaaaaaaaaaaaaatctcttaccagggctcactgccttaacagaaaaattttaattcaatattatttcacttaccaatgtcctgtttatttttcctccagtctccctatttccaaaagaccaccccccagcaaacacacacataacaccacctttacctccaaagacaaacagatgcaacaagctttagggtctcggctcactgcagcttgcaggataaatgccctgcatagctacttacgctgcacagcccgaggccagaccccgcaccaggctcagaaaaccaaatagtacgtgggagcgatggattatttgggaaagcgagggcagacgttagcggattcctaagtcagaaggccagatgggagagtcgggggggggcctcaaagtgggtttaagtagaccgcatggaaaactggaaagttctcaaattctacccaggaagcaggcggagccctcctaaatcaaccagccgggcagaggagtcccagacccccggcctcgcacccaccccacccgctcggccggtcctcagtgcggccggggccagcgggcagccccgggactggacgagggcgcaagttcgctacctgcgcagtcaggccctgctcctcgtcgtcctggccgctcaggactcgccgcagcttctccatggccctgttacagggccgtagcggccgccactctgttgcctgcccctgacgcccaccaggaaaccccgaacccgaaaccccacagaccagccggaagtccggtcccgcccgcttcctgtgcgtcagcgcggccgccgtagcaatgcgcgcatgctcaccagcctttctctcggacccggtagtggtccgtgaagtccgcggagtgggcgctgatggtggggctatcccttcccactgtccgcgaggtgcgccgtggtaacgcgcggggacacagcgcgggtgtggaccccctgcccacagctggcgcacagccattgagtgtagacccgactggggcacgaccactgaaccctgcacttggcgtcctccgggccccgcgaggggccttgctgggcgggtccgcggcaccccgggttcccagaagtcgaggccccgaatgcgcctcccctcgcctggaatcggagagcggagggctcctgcgggcaggtggccgtgctccgaagagcgccctgccacccatgaggtggccctgggggcgtcgctagccttcccagctgggtgtcctcatccggagacacaaacacctgcctcaggattaaagcgaggagctgtatttcagaccgtctcaggagaaatagcaagaggctgcctcactcctttgcccttgtgagagctatttctttactcagttcactggtcagctaggagtttgaaagagtgaaatcttatttataaaaggaatagctaatgcaacccatttttccagttttgtgtgaacagtgaaaccattgaacaagcgtttactgttctccggctcgtgctggatgaacaaacactaagaaatggggaagtggcatttttctctctctcattttccaccatgctaagaaaggagattaaaaatcagggctgcctgtctaatatggtctccagaagtcattaagtgataggttttgctcttctgtttgcttctaggcttggtaagatggtaatgagaatgcctgttcttttgattactttgcccactccatttcctccctaaaatctttcagttaaaaggtggatcctcaaaaagtttcattgtccatcctactgcctcagtagagattttatctaaactcaattagataaaaacaaataccacaggaaccctaggaaagcaagtcgcgccttcttgtgatgaaacggtccaatgctcagcatccttttcctttaggcagaagatatttctatgtggcctgttcatactaatatgagaagtcttatccttatgtccttaactttaaaaggtcagaaaatagattgtaaaatctatagaataaaactatgtttctgttgaataagagagtatgtccgtaagtgttacgggaaaggggtccggatccataccccaaaagagggttcttggatcttgcgcaaaaagaattcagggcaagtgaaaacaagtttatttaaaaagtagaggaacatcggtagtctgaggcagagaattgcttgaacccgggaggcggagcttgcagtgagccgagatcgcgcccctgcactccagcctgggcgacagagcgagactccgtctcaaaaaaaaaaaaaaaaagtagaaggacaaaagaatagctactccataggcagagcagggctgtctattaccagggctgctggttgcccatttttatggttatttcttgatgatatgctaaacaaggggtggattcatgcctcccctttttagaccatataggctaacttcgtgatattgccatggcatttgtaaactgccatggcgctagtgggagtgtagcaatgagaacgaccagaggtctctcttgttaccttggttttggtgggatttggccggtttctttactgcagtctgtttcatcagcaaggtctttatgatctgtatcttgtgctgaccttctatcttatcctgtgtcttagaatgacttaactgtctgggaatgcagctcagtgggtctcaacctcattttacccagccgctattcaagatgggcttctctggttcacatatctgacataactgctttcaagattttcaagtataggccgagcgcggtggctcactcctgtaatcccagcactttgggaggcaaaggcgggtgggtcac

SEQ ID NO: 585786 - DNA, 4001 bp, Homo sapiens
aaaaccttcccccaaactgggagggagctgagaggccaaaaagtgactcagacaagtccagcttggtgagtagatgagttttttaggacttacatacaaggcactcctggatggcagcaggacagctttagagatccgtgctgcctcccatgctaaagctgctttcaagctaattttctgactctgccgactgtgtgtgtgcgaatggactgttttccttggtgggttcccagatactctccgggatgtttgggttctcagggacacctgctcctcggccaggcaccgtgaccttggctcgccacctggccttcaggattcaggcagtggcatacaccgttaagtaacctggtaggggacctgtcacactacagcaggtaccatcattgttcccattttgcgagtgaagaaatggaggctccaagaggataagaaacatgcccaggaattcacatgtgggctggtgtcacctcatactcacatggttaaccaggacaggctcagcttgcacctggcctctcctccccagcacttgcgcctggctgggcatcctctcacaagctgaacccgtcatctctcacctgagtgcccacccacctcccaccccaattacctgtgtggatccatgggccaggggaaccatgtcctgggggtgttctgcctatgtctctttctttggtttttgagcccctggccccaatgcttaagcaaagggaaatgaaataaaaatcttgcttaaaccaagacctctgtctagtgcctgacttctccactgctattagatctcaggtgagtgacttgccctctctgagcttcaatttccttatctgtaaaataggataatgatacctagtatgccacattcaagactgctgcaagcatcgaaatagggatgcaggagaaaagcaggacttcaataaatgttgcttctctttattcccaggtgttccaaagatctcaatttggtgtgtgttcctatgcatgcgtatatgtgtgtggtgtgtgtgtccccaaacaactccccagatgccttgtaggcctgtgacactggtgttgagggagacattgtccatccctggaaccctctgctcaacagggggacagtcagagacttgagcatccaacccccacttcctgccagctctgtgctcagggacccacagagtcaagcaagttattgaattcagcataccgaattttatttattgccgctcaggagggtgggggcctgctgaaagacagggtcggggcctgcctcctgcatccccggcccaaaagcccgggccaagaaggacacaggcttcaatggctgtcatgtgttgcagacaacatggtgttgagatcttgcatggtggagggtgacgctggtccctgaagggagatggaggaggaggcagagctgggaacaaagggttaaagggcgccatgtaagagagctctccattcccaccacggagacatccagaccccagcagaggcccaaactgactcacaaacacacagccccatctttccccttccaaagaactaccttttcaagcaattccaggaagctggactcataggaggaatttgtcagaaaagactccttcagcttcagttgcaaagtcatacccggccctgcggatccagaagtacagcttaggacccagcagtcagggctgattcctccggagacacagaaccttcctgctcacgctccccggcacagttcctcttccccagcaatgcccctccagagcctcttggaagctcaggactggggtgtctctgtcactctcagggaccatgaagtcccaccccttttctctggcctcttcttgccacagggacccaggagtcctgccctctagccctcacctgttccatgtgagctgccaaggagggtcaagaggaggacaaggggcagcccagaccccatagtggccactgcgctcctgggatggaggagacactgaagtcccggtggcctctccttaacaggcctgtttctacaccccactcaagccttagcataagtgtttgaggggaaatgggaggaggaatctggtcaactggattttccagttctcccagtaagagaggacccaggagaggaccattcactgtgcttttggggaaaatagaaggaagtcccctcttttccactctgtgtcccacccctcccttgtgtctccaggtttgagggagtgagtgcgggtcctacagacagggaaatggagagggaagcggggaccagggaggcgtccctcctgcaggtgtctgggcccccacccatgcccgggcctcccaaggatctttagagattaattattaactgcagctaattttcatcattcttgacaccgaagggctcaggaatgtgggcccaaaagggaggggtggattaagccaagtttcttccagaacccaggtgtcctgctccctcaggttttttttttttaaacactagtcaagtgcagtagtgaaaagagtagaaggagtagaacaaggagttgggtctataatggactgtgaacactgcttccccagccttggtggctttctagatgagaaatctggtcatgggaacttccattgctgaacattctgttttacttgctctaacgcatcctggattgtcagggggagacacgagtttcctcagacatcctctcactcctgccttgtgcacccatgaaaaggggacacccacctactcccggccgagatgcctacaggcaagcgctgggacaggcaagcacaggacagatgtgcagagggagttactgaccctctttagaaactaggaaagtaaggcacagagagggtaagtgacctgctaaggtcacccagccaacaagtagcagagagattagaacccatccctctagccagacaaagagacacaccagccatggaaacttgcttgaacacacaagggcacaggccagcatcttcctatctgccacttccctatgcagcctctccaccttccccaaagccagcgggactgagcacagagagacagaggcagagagagcactgggcagaggtggggagagcaaaagcaagatggggaaacagagatagaggcctggtctgcactgtaagtgtaaagtgaggcaaccaatgactcccagacttgcacaggacaacaggaagaccacagtgggaagaaagcatggaggagaagagcagcaggcacaggagggacgagcaggaggtagaattgggaacacagagagatcttcctcggagaagagtaagggccctccctccctccctccctcccttcctccctcccttcctccctccctccctccctcctttccttcctttttttttttttttttttttgacagcgtctcatccctgtcgcccaggctggggtgcagtggtgcaatcttctcctggctcagcctcccgagtagctgggattacaggcacccgccaccacagcaggctaatttttgtatttttagtagagacaaggtttcaccatgttggccaggctggtctccaactcctcacctcaggtgatccaccccctcggcctccctgagtgatggaatcacaggcgtgagccaccgcacctggcctcccccacactttctacagccatgtgctaggctcatcactaagtattcctttatagcgcataagcgcctgtgaagtaggtactagattaccccgattttagaggtgaaattaagacttaggccttgtgacttgccagagaatgcacagctcagcagtggtggattccagtgcagtggactcagccctggtactgagcttctgaggattcagggctgtctggctccagagctggggtctgaccttccatatcacactgtccccaaacatgacacgtgtcttccttggtgccccttatctcccctttccccttccctgtcaaaggaatggaaagctctgtcagctgcagccatctaggtgagacacggctcaggtattgaccttcccagcccactcttaggtttccagaaggtcagatgcag

SEQ ID NO: 585787 - DNA, 4001 bp, Homo sapiens
aggggccaggacaggttggtttcattttggtttgaatgcatatgctttggcccacagacttggagaaagattttgctttactgatgagaactcagtcaagggtgcttgggagccttcgctggccctctagctgggcctgacatgttgcctgcatttctagccttgccttcccagcttgcccatttggtgcagggagatagtccagcccaccctgaaattcactgtgttctgcggatgagttaactgaagggctgtgtttcaggagtggcacagaaaggacctgaatgaaaggaaggaggaatgaatggagagaaccattttggtggaattgccctagggtattaaataggatggggcaactggggactggaggatgttccttctcttacgttgcttaggaaacactgtccttaagagtgtcagtgtcattcctttaacaatcattcatttcttacctcccgcttgtgtataaatttgcagatttacacagaccaccagtgtggccatcccagtgaactgagtttattgtgaaatatacatgcaaaaaaatccttttttctcacctacaaccaatgcaacattattcatactttgagttgaagaataaggagtttaagaaataaatgcatacagcaacataaccctgaattatcactcaaatacagacctcccactgctctctcccaaaaaaaaaaaaaaaaaaaaaaaaaaaaaggcagttattctaagcaaaagcaaaaattgaggcaacttaaaatagacaattttaaatgctggattccatcatttctgtaaaaggtcattctactcctttgctatttataccacagatagagacacagcaaattattggctgaatggatttgggaaaccagaagctgctgcttctgacgaacgaagatgataatgcatcacttgagactgagtggatgaaaggtgtagaaaagttgaacccttcaaagatgagaggaagctgctaaattagcccctgactaaattactagccataattgtactcaagccagttctctttgcgactgccttgtaatctttgttgtggcttgagagagaaaaatccccattcccagctcaaacccgtttaaggcatctcagcccaaccccctcctcccaatgcaactcttcatagccccctgcccctcctccaacaaattctaatcaagtcaggtatagttctcagctttaccactgccatcagaagcacggcttacattaagggtttagcaacaaaacctcaggcttacttcaggcaaacattcaaaagcatttaagagaagcacagaaaacaaaagaaataagcaaaacctgtccttacccgcttcttaaaaaattggaaggctgagcatttcttgactgggaatccattcatgtctttgtttaccattttccaccgtggggaattcacagttatagatccaggttggcacccgcctggttagtgcatatctgtttccccggtttacctcctgcagacagttaatgaagactgagcgggatggagaatctagcggggctcagttcttcactcgcgcattctgcagcaccagctactgcagcaacctctccccactttcagttgccaccgacagcggcttttctccttccatcattgctccgaaacatatgcatcaccgctgcaggaccctgggggccggacggtgggatacggccaatctccggggagatgctgtggctcttaccgagcgggagaagggtacgcctccccgcccccagctacctggctgctcttccgcggccggcgcggggagcgagtcgctcttctccaggtgatgcgctcctggaggcggcttgagagaggagagttgtttttgattgtgcaagttccagtgggagctgtagttaagcagctgagagaaggagtaagaaagagcagaagccagagggagggagggagaacagcgccagaaaggcagagggagcgagaaggcgaggctggaagaagcaacggttcatgaatatctgagcagcggatggagagaaggcacagccggctcagggcacactgaagagcagttgactccccttgggagggttactttaaatagcttcttttctttctttctttttttttttttttggttaggaccatttaaatcagagtttcatataaattgcacaccgtttttattttatgctcattgacattcttttgaatcctgttgctgaataaaagcctctcaacggaaatgtaatcacatttaatctcgacctgtccaaacgtggaagaaaatgaaataaagtgcaagcgtaggtataacaatggaagatctctcactatgtagaagctcttttagcctcccctcccctacttgtcattatatagtgggcaatggtgacggtaattgtgtctttttcattaaaacagcttattaaaaaaagaacacaatgaacatatacaaagtactttattacacacatacacacacacacgagttattaccaaaaagtactactgaatccatttaatgatgaggaaggtttgataaataaaagagtaaagcattcttcctattaggtgaaaaatttcccaaaaaatccttactcatgttatcctttgcacactgagctccttttaaaaaagccatttaattgtatgtggcttatttttccatttttattctttaatgttgatattttatgggaatgattttaaagattagttgatagtaaagcaagaaagcaaagaaaataaacttggcatctgacctggcagaaagccaccaacatcggtgtgtggctttctgccatcacctgacctcactgtgcctttcggacactgcctcatccataaaatggaggcagccactcattcattcattcactcattcatttatttagtcattcattatttgctatttcattccattaataaatctaactctgacaagtgtcctcaggatgtggagccttttcataatcatcacaagggaatataattgataaataagtgaaaggcgcaatgctaatttgaaactgattatgacctcattatatataacacacctaacattgttaaagtatttacatggaagtctctggtaagaagagaaacatcaggttaaactgggaaagaaatgcatgggtttcattgaattggactataaatctctacagttgggccagagtttttgggaataaacatgaaatcctgtttgctaaatgccttgaggtttccaaaaagaaaatgcaatacaactaaatgatggcatgataaccaagggaaaacaactattcattttggagagatatgttaagttgtccaagatgcaagtatatgttatgtaatctacaacattgataagtttttgtggttcttctaaagagttcatttaaaattatggtagttcaaagggaattattttgagacgatggaagtgttctctatcatgatgatggtggtggttacataactatgcatttgtcagaactcatcaaattttatataggaaaagggaaacttttgctgcatgtaaattatacctcaatggacctcattttaaaaaatgatggtcattcaagttctttctttttcgtcccattgccactcccccaaaagtgttttaacagacatttattgaatttgagtaatatacaggaggggacctttaagcactctgctaggaaggaggtgctggggctttgcttaatcccacattggcctagcatgcatactggttgatatcatttggctgtgtccccacccaaatctcgtcttgaattgtagttcccacagtgagtgatttctcatgagatctgatggttttataaggggcttttctcccttttgctcagcacttccccttcctgatgccatgtgaagaagaatgtgtttgcttccccttctgctctgattgtaagtttcctgaggcctccccagccatgctgaactgtgagtcaattaaacctctttcctgtataaattacccatctcactatgtctttattagcagtgtgagaacgga

SEQ ID NO: 585788 - DNA, 4001 bp, Homo sapiens
tggaagaggaggaaggaaggaaagaaagagggaaaagggggagggagaggtcaggaatgtggaggggagggggcggaaataaaagtcgtctctgcactaaaggaagaagtacaatctgcatttcacttttttttttctgaagtaatctctgagaacattttgtccgttccgcatgtaatttttttccttgcatttttaatctctgccatgccaagaacacgtgaggaggtaacaagcgaagggaggggtagctttgcccgggggcagacctggcgtgaaccgggcatcctcgattcctctgtggggcctgctcctctcccgctgtcccacctgaaaaccctgcaggtcatgatacatggtcttaaaatcgtccctaccctccctgggtttaactcaaggctgccccagggcttcttagttttgccacctcgctcgctctttatgtgagtcccacataaactgtgactttatcctgaaagattagccgggtgactccgctgcagaaggcagggaagagagggaagctcgaggcggcggcccgggctctgcagaacagcgatgccggtgccttccagtaaccccgcggctgggggatgtctgggagccgcagcctgaccgccggcgcggggacgtgagccagtgctggccgggaagccgcgagcacggcgactgggcccggagcgggcagttacaagttaccactattcgcagggccaggtacctggcgctcgctgttgctgtctgcggtggctgccctgccatgacctcttgctaccaaaggctctgccattttaaagttgcctactggatctggcacagtcccgaaataccagctgtcaaaccaggaatagcatgtgaaacgccttttccttggtcttgggcaggggtttgttttgcaggcaaaaccacccccacttgccctaaagtgagctctagtctcaactccttggtttgctttgttgcaacagccccaaaccgagagaagggaaacacattctctctcctggagtctggctgggaaagtttgctcagtgcccacacttataaaaagcatttactggggccgggcgcagtggctcacgcctgtaatcccagcactttgggaggccaaggcgggcggatcacgaggtcaagagatcgagaccatcctggctaacatggtgaaaccccgtctctactgaaaatagaaaaattagccaggcgtggtggcgtgcgcctgtagtcccagttactcgggaggctgaggcaggagaatcgcttgaacccgggaggcggaggttgcagtgagccgagatcacgccactgcactccagcctggcaacagagcgagactccgtctcaaaacaaacaaacaaacaaaaacaaaacaaaaacaaaaacaaaaaaaacactagtacctgaaattgacatgccaacctaaagcaatgtttaggcaatttcaaatcacagtaactggcccatgtctgcttcctcttgcagggaatcttcatagaatgtgactttgttattgccagtgccacccgtatgtcatgtcccaccattcaactagcctagcccagcctagctctgctcccacctggttcctttccctcttgagagagcaaattttgctcaggctgcccagaaacatcaacctgcacacagacttttgcatgtttgttttcaaacattaaattaagaaacctacaaccagagaccctctcctacaccccaccttatgtgccttccccatgccaagtaaccccaaatcctttgaggcatctgcaaaatatagtacggtaagtacgaacctttcaaagggggttttatagcttcttctttcattcttcgggttgcccaaggatatgcaggttggggattacttctggaggctggaggtagagcccagttatggctggaataagcctccctgctacatgcctctgataagctggaactctgagatgacatgagagcacgagccagagacggctatccctgttctgttatgaaccccactttatatcaaggcaatttaagtacaggaagggagcaagctgcaaagttcaacactgggccatttattctccccattgcgacatcactcagaaaattacagtcatcagtgtcctagctttattacacccccagcacgcacacaagaaatgtaacttaactgattatcctcacaaatcagtccggaaaaaattcaaaacacatgcacaggatttattttctcagaggctctgtggcatgcattccgggaggaacgtggcattcaggtcggagggttctacgcggaatagagaatagatgcaaccgtatgatttgtggttggaaaagaaagggaacgtctgatgtgctccttcctcccctaccctaatgttcagcacttggagacggatggtcggctaaacttatcatttaaccgagagaatcaagttgttgagactggcttttcttccaaccggatacgtgatgggtggagcaggcgccccctgttctgtcccagcaacctactaagacttccgaacaggaaggtgacacacggcggaggggtgcttgaggggagggggagacgggggagctgtgtgtgacgcgcgcctgttaacactgcacaggcattaggttgccctgtagctgctattcaaactcttgatctgttcttccttcctgtcgccagcctctttctttggtccagatagtcctcctactgggaggaatccggcccctttcctcatactccctggtggcgaagtggtccgagtagcctcccgaactgtttgtaaatgcaacctagagggcgatcgagttctctgggagaacttgctccatatacgcgtatacgcggcttcccccacttgtctcctgaggttctattggtccagggaatttctctacaacaccttgtgcagtcatagaaaatatagacggcttgataggagataggctaattacctccccactcctccaagcgaattgtctcacatttatgtctcggtgctgggaaaactgcagtcaaaaccctcaagtaggaatgactgaccaggatgaaaagtttgcactgaaactaaacgtttcccagtgcatgtgcattttaatgcttcagaaaaaattttttcactcttctattttatttttttatttctttatttgtcactctatagtctgatggactataaatgctaaaacctgagagcttcacaaagatatgactttttccatttaattttaaaaggcttataaattattgatatttctcaacatattagagaaaatattttgaaaaatattttttataaggacttaaccatattcactcttaagacacttcttaaatgtatcagctgtaattgtcatgattccccgggtatgttatcttccattgataacaaggcaatataattgtttcatattgttcaaagtaccatcaattttagaacaatcctatgaagagtttaagttcccatactttttgattcattgtttgatgctcacagaaacctttccctggaacaccctcaaaaaagctcatagaaataccagaaaacataattattataattatagaaaacataattattactctagagagaaactgaatggatcagtttttgttgaaggttgtcagcaaaggcatgtctttttttttttttttttttacagaaaatgatgatgacaaatgagtttattcattatagctattatagacaagtcactggcaatggtggttatttaaatgtctatttatagacacaggttgtatagtaattattaccttccatattcataattgtcaaatttgacatgcaaaaagatgtgatacagtagataactaagagaacactatctctaatcatagtgttaaaagttattaaaacccacaaaactaattatttcatttatcgcagggtttatattttttccaagacagaggtgataatattctacacccattccttctaaaaagtgagcccataggaaaattgacgggagggtaggaacaagatttggtagtaaat

SEQ ID NO: 585789 - DNA, 4001 bp, Homo sapiens
tccattaatgtaggaatactaactgactcccttacagttctccacagatgcacggcacatacaaaaacttactggaggagaagggttggcattcataagctcaggctcctgaggttgggagatcttcaagatggactgaacttcagggctgcagggaataaagggcacgatttagaatccagctcgccactagggggcacaccaacatcaaaagtgagtttctggctctaccgacttctacccggataattcactgtttaaactgaaaataccccaatacattagtcagttaaagaaaataataaaccccattaaatacagaaataaggattgttgctcatggagaaaggccgtgaattcggccaacacgaaccatttatcttacatctccagttcaagccaaatcagcaaattaactttaatgtttaaaatgtgtcaaatatattagaatttaaggagaaatgagatccccaccccagaagaagtcttcgccttcccgataaacgccgtgatgagaatgtttaccgctggcaaattcaaactatactagttatttcctcaaatccggtcaaacttactgtttgcatgcataggagttattggcaatcttctgaataaagtcgttcagacccatcctcctctgcttcatgaaagctgtggatgaaggaggagaaataaagaaacgtttagacggcttcataacgtccggcgccacacacactaatctgatccgggactttcaaaaaatttccactttgcgtctcctggagcagaagtcccgcaagattcctgcactcaccgatgagaattgccaccatgcccctcatcctggagtaagtgagggtgcccttagcagcctcagttttcaccgtcatcaccaccgcggggagacagaaagacgttagcgctcaaagaccggctcggcgtatgctgcgccaggccgcgcgctcggccttataaaaaaggcaccgccgcgggggcggggcctgcgcgacagtgagaagtggccccgcccttcgcctcgcccctcgccccgccccggccgcctcgcggtttgctggcggctacgctgcctgcggcgggcggttctgtccccattgagagggcgagccccgggcgggggcgcgaggaccgcccggggacggcctggcgcagggccgttatcagtctccatcggctcctggggcaggagagagagaacgcgccggcggagggcgcggggagggccggagagcccggggtagttttccacctctctcatttattccgccgccggagaaagccgggttcgcagcgccgaagcgcttcccggcgggtgcgcggcggccacggtggcttcgctcactgtccctgcagataccctctccccggccaggcgccgtcctgcggccggactcccaccctcctccccaacccgagccggcggtgcgcgccaccctccggggtttatccctggggcgcaggcctgcgcgcgcgacctcgcccgccaggtcctcccgttcccgccgccgggaccccggccccgagaactccgacgaaagccggcccctgcctccaagccgctctggggaagtgagccaagcccccagcggggccggcggcggcgcttacccagtccgctcagcaggaaggactcgctccttttctgcgcctcggccctctttttgtggcggggccgcagcagggactcgagccgggctctggccagcgcgccctgcatctcccccatgggcagcgggcggcggggcgcgcggcagacgagagcgaccggcgagcactgacgtttccttgaaggagccgccgtgactcaggccgggcaagatttcctgccccgagtcccaaaacaaacaaatggcccttgtgcacggtcgggtcgcttccgaaaacgccttttttgtgcttttggccaaaaccaagcaaggctgaaaaatcccagaacttggaagaggaggaaggaaggaaagaaagagggaaaagggggagggagaggtcaggaatgtggaggggagggggcggaaataaaagtcgtctctgcactaaaggaagaagtacaatctgcatttcacttttttttttctgaagtaatctctgagaacattttgtccgttccgcatgtaatttttttccttgcatttttaatctctgccatgccaagaacacgtgaggaggtaacaagcgaagggaggggtagctttgcccgggggcagacctggcgtgaaccgggcatcctcgattcctctgtggggcctgctcctctcccgctgtcccacctgaaaaccctgcaggtcatgatacatggtcttaaaatcgtccctaccctccctgggtttaactcaaggctgccccagggcttcttagttttgccacctcgctcgctctttatgtgagtcccacataaactgtgactttatcctgaaagattagccgggtgactccgctgcagaaggcagggaagagagggaagctcgaggcggcggcccgggctctgcagaacagcgatgccggtgccttccagtaaccccgcggctgggggatgtctgggagccgcagcctgaccgccggcgcggggacgtgagccagtgctggccgggaagccgcgagcacggcgactgggcccggagcgggcagttacaagttaccactattcgcagggccaggtacctggcgctcgctgttgctgtctgcggtggctgccctgccatgacctcttgctaccaaaggctctgccattttaaagttgcctactggatctggcacagtcccgaaataccagctgtcaaaccaggaatagcatgtgaaacgccttttccttggtcttgggcaggggtttgttttgcaggcaaaaccacccccacttgccctaaagtgagctctagtctcaactccttggtttgctttgttgcaacagccccaaaccgagagaagggaaacacattctctctcctggagtctggctgggaaagtttgctcagtgcccacacttataaaaagcatttactggggccgggcgcagtggctcacgcctgtaatcccagcactttgggaggccaaggcgggcggatcacgaggtcaagagatcgagaccatcctggctaacatggtgaaaccccgtctctactgaaaatagaaaaattagccaggcgtggtggcgtgcgcctgtagtcccagttactcgggaggctgaggcaggagaatcgcttgaacccgggaggcggaggttgcagtgagccgagatcacgccactgcactccagcctggcaacagagcgagactccgtctcaaaacaaacaaacaaacaaaaacaaaacaaaaacaaaaacaaaaaaaacactagtacctgaaattgacatgccaacctaaagcaatgtttaggcaatttcaaatcacagtaactggcccatgtctgcttcctcttgcagggaatcttcatagaatgtgactttgttattgccagtgccacccgtatgtcatgtcccaccattcaactagcctagcccagcctagctctgctcccacctggttcctttccctcttgagagagcaaattttgctcaggctgcccagaaacatcaacctgcacacagacttttgcatgtttgttttcaaacattaaattaagaaacctacaaccagagaccctctcctacaccccaccttatgtgccttccccatgccaagtaaccccaaatcctttgaggcatctgcaaaatatagtacggtaagtacgaacctttcaaagggggttttatagcttcttctttcattcttcgggttgcccaaggatatgcaggttggggattacttctggaggctggaggtagagcccagttatggctggaataagcctccctgctacatgcctctgataagctggaactctgagatgacatgagagcacgagccagagacggctatccctgttctgttatgaaccccactttatatcaaggcaatttaagtacaggaagggagcaagctgcaaagttcaacactgggccatt

SEQ ID NO: 585790 - DNA, 4001 bp, Homo sapiens
gttgaaggaaatgctaattctggtaacattctccccaccaaaaatctttgaaaacttttttctcaaactaaaacaaagcaggctgtgcagagacactaagagttgacttctatcccccctgctcacctctccaccattaatgtagtctaggacaaagtacaatttgtcagcagtctggaaagagaagtgaaggcccaccaggaaagggtgcttcacattcttcaacagaacattccgctccgacataatatgcttctcctaggaaaatgacgattcagatttagtggcatgtttcaacttggcaccaacattccagaatcaagattattcaaggagtgtctaccgccaatgccagccccatcaagcacatctcatacctctttctttttcaggattgctttcttctgtaaaactttgactgcatagaacacttcttctgccttgtgtcttgctagaagaacctgaaatttcaatttaaaaaaatcatttttctatcctcatccagggagaatacaaaagaggacatgaaggaagtgtaccaaaagatcttcagatttgaaattacctttccaaaactgccctttccgatcactttcaagaagtgaaagtcagatggtttagcatgaggattggacgacgggccaaggttgatttgctgagaaggacttggctagaaaaaaaaaaaaagaatttcttttaataccattgcttcaaaggaagacatctataacataaacgatgtagaaaatgttacatctacaaatgactgatgcaaatgaccatacatctataaacattcaaaactacatttcatcacatttcaaatgagtatggaaactgcacacagtcatgttgtttcagacagataaaacctttttatgaaatatgccttttaaaataaccactttggaggtaaaatatgcccaggaaaaaaataaaataatactctgactcaatacttaaatatttatatcacttgttatgccataatgaagcattcctgccttgatactaatttctagaaatgctattttaatccattaatgtaggaatactaactgactcccttacagttctccacagatgcacggcacatacaaaaacttactggaggagaagggttggcattcataagctcaggctcctgaggttgggagatcttcaagatggactgaacttcagggctgcagggaataaagggcacgatttagaatccagctcgccactagggggcacaccaacatcaaaagtgagtttctggctctaccgacttctacccggataattcactgtttaaactgaaaataccccaatacattagtcagttaaagaaaataataaaccccattaaatacagaaataaggattgttgctcatggagaaaggccgtgaattcggccaacacgaaccatttatcttacatctccagttcaagccaaatcagcaaattaactttaatgtttaaaatgtgtcaaatatattagaatttaaggagaaatgagatccccaccccagaagaagtcttcgccttcccgataaacgccgtgatgagaatgtttaccgctggcaaattcaaactatactagttatttcctcaaatccggtcaaacttactgtttgcatgcataggagttattggcaatcttctgaataaagtcgttcagacccatcctcctctgcttcatgaaagctgtggatgaaggaggagaaataaagaaacgtttagacggcttcataacgtccggcgccacacacactaatctgatccgggactttcaaaaaatttccactttgcgtctcctggagcagaagtcccgcaagattcctgcactcaccgatgagaattgccaccatgcccctcatcctggagtaagtgagggtgcccttagcagcctcagttttcaccgtcatcaccaccgcggggagacagaaagacgttagcgctcaaagaccggctcggcgtatgctgcgccaggccgcgcgctcggccttataaaaaaggcaccgccgcgggggcggggcctgcgcgacagtgagaagtggccccgcccttcgcctcgcccctcgccccgccccggccgcctcgcggtttgctggcggctacgctgcctgcggcgggcggttctgtccccattgagagggcgagccccgggcgggggcgcgaggaccgcccggggacggcctggcgcagggccgttatcagtctccatcggctcctggggcaggagagagagaacgcgccggcggagggcgcggggagggccggagagcccggggtagttttccacctctctcatttattccgccgccggagaaagccgggttcgcagcgccgaagcgcttcccggcgggtgcgcggcggccacggtggcttcgctcactgtccctgcagataccctctccccggccaggcgccgtcctgcggccggactcccaccctcctccccaacccgagccggcggtgcgcgccaccctccggggtttatccctggggcgcaggcctgcgcgcgcgacctcgcccgccaggtcctcccgttcccgccgccgggaccccggccccgagaactccgacgaaagccggcccctgcctccaagccgctctggggaagtgagccaagcccccagcggggccggcggcggcgcttacccagtccgctcagcaggaaggactcgctccttttctgcgcctcggccctctttttgtggcggggccgcagcagggactcgagccgggctctggccagcgcgccctgcatctcccccatgggcagcgggcggcggggcgcgcggcagacgagagcgaccggcgagcactgacgtttccttgaaggagccgccgtgactcaggccgggcaagatttcctgccccgagtcccaaaacaaacaaatggcccttgtgcacggtcgggtcgcttccgaaaacgccttttttgtgcttttggccaaaaccaagcaaggctgaaaaatcccagaacttggaagaggaggaaggaaggaaagaaagagggaaaagggggagggagaggtcaggaatgtggaggggagggggcggaaataaaagtcgtctctgcactaaaggaagaagtacaatctgcatttcacttttttttttctgaagtaatctctgagaacattttgtccgttccgcatgtaatttttttccttgcatttttaatctctgccatgccaagaacacgtgaggaggtaacaagcgaagggaggggtagctttgcccgggggcagacctggcgtgaaccgggcatcctcgattcctctgtggggcctgctcctctcccgctgtcccacctgaaaaccctgcaggtcatgatacatggtcttaaaatcgtccctaccctccctgggtttaactcaaggctgccccagggcttcttagttttgccacctcgctcgctctttatgtgagtcccacataaactgtgactttatcctgaaagattagccgggtgactccgctgcagaaggcagggaagagagggaagctcgaggcggcggcccgggctctgcagaacagcgatgccggtgccttccagtaaccccgcggctgggggatgtctgggagccgcagcctgaccgccggcgcggggacgtgagccagtgctggccgggaagccgcgagcacggcgactgggcccggagcgggcagttacaagttaccactattcgcagggccaggtacctggcgctcgctgttgctgtctgcggtggctgccctgccatgacctcttgctaccaaaggctctgccattttaaagttgcctactggatctggcacagtcccgaaataccagctgtcaaaccaggaatagcatgtgaaacgccttttccttggtcttgggcaggggtttgttttgcaggcaaaaccacccccacttgccctaaagtgagctctagtctcaactccttggtttgctttgttgcaacagccccaaaccgagagaagggaaacacattctctctcctggagtctggctgggaaagtt

SEQ ID NO: 585791 - DNA, 4001 bp, Homo sapiens
attttacagaagagaaactcaggcagagatgaggtaccttaaccaggcttacactgcactagttggggcccacactaaaacttaagtctcttaattttagctccatgtgcaaaacacaaaacattaaatttaaaagttaaaaaggcacacagcaggcaggcaataaatatttgccaatggcactgaaaaaacaaagatgtggagtaccaaaactatctcaatatactacctactaatagagtaagccaagtcattaccttgacttggtccgacttgctccaaagtagcctaggctttatctcttgtggaagggataaaaaccattccttccataatcaatataatgctattgggacaattattgaagcatgcaagtcggtggtgaaaccaagagctttgtagcattcttagtaaggagtgcatttgaacaaatctacccttgaaacagtgccagtttgcaaacacatgaagtgtggcttcagtggggaaatctacaaaaggcaggcatgactaagcaacccaaatagctagaaacaccagaaactgtcagaagtctgaggaccccaacatgactgcacataagtgtaagttggattttcccatctattgtttctagtgcaaatgggggtggaggggctttgtatgatcgtgttggtttctttttaaataaaaaacttcagtggtgtacaaggattttcaaacaatattttattccatcctccactccacccacttaagaaacaaattttggaacaatctgactgagctactgggcagacaattgaccagaccaaatttaagcaatctacaatgcactttttgatgttacttgattatatatgtcacaaaggaggctcttaaatctatagctgaactcttggttaaggaaaccaagtctcaataatcatgtaaaacacatgtgctatgtcccttagtgggctgtcaaatatactaactactgaattttccttaaattctgacatctctagctatttaactttcctttctttaaaaaaattttttttctctaaaaaaattcaagaacatccaccaaagagaatagctaaaaataattaaatagaaaaccacaattcatagatccccaggataaaatttccacagcattacaggtggaaagaaaatgcgtgcatacacacacatttacataaagatgtaaaaatatttatggcaccctaagaaaaaaaatgacagtgaaagcaaacaatcctaccacaacaggacaaacctagttttactattctctttgcgcaggtataaaactaaacaaatgcacttgctggcggggaagggaggacagagagcaattcccacttaaacttgcttcattcaggagctagggtaacaaaccaaagcagcagaaaaggctcccgtgcaaaacataaccagtctgaaggtcccaaatcgggaagaactaaactaggggaagggggatccccgaagctcttgaacaacccgttccccaaatttccatgccacacaacaggagctgggggcttccctcggactccattttcaggccgcgttgtctgcctttcaggccacgcagggtgggcatttgggtgaggccggggtcccccacccacctttcctccccgccctcttcattgttgtcggagtgtgatggatcacctgccgggcgcgggctcccgcgggcggaccggctgagcgcaaggacgcgcagtgacgagcgccgcgcgcctcccgcaggacccgcgccccgcgaccccaacctactgcccgcccccaccgcgctcaccgccacgaagcccgaggaagaggcgatgaacacgcggatgaccatcctctcgctgcgcccgggacagaccccttgccccccgggctccgggctggcgtggacgcagagctgaacccagctacgagccgccggcagcctctgggtaaagcgctgccgtcggggaagatcgctgggatctggctccctcccggcgggtccgcagataaaagcccagcgccgcccggccgcaggctgaaggggaaggagagggaggaggagggagccggctgcggggcttgatgggatttgtagtttccgtctctccctggagtggctggtggactgagctcccctcctgaccgcgcttctatcccgaacacgcgcaggtggctggaggggagccacagcccgggcagaagctgtgaggtgggttggcaaggatcctggcttgatgaggaaaaagcaaactaggcaaaagggctcggttcaaagtccaagcttgggttctgtattgtggtttattggtttggagcatccacacccagaaatgccaacagacacgatcgtgctgcgggcacacatcgtctcagggccgctggcgtaccgggcaaaccccagctacctgaagcaggcgggatcggcgagccgggtgcttgggaggtgtgggcggtggggttgggctcgtttgtttgtccagtagcactggagattgcagaaaggtgattcttttgggtaaatgagaggtcttctcttgtctgtacacactgaaaattagaaacccagatggaagcacaaccaatattttatttttctcagcaaaactgtaattgtagtagaaaaaaataaataccaaacgaaattggaatccttctatcaacattggaaatcaggaccctacctgccccacccctccctacacaatggcttcgcctctgtgcacctaatatttacagttcagccaaatctgtgcctttttcagaaccgctgcacattccagcgcagtttcccaggaggatgctgttaaataaaaagcttctatatagttgctaatagtttaggaatagttttttatcaagtgctttctgtttgacaaaagctcaagcctctctctcagttttgtcgaaaggaaccagttttccctgctgtactgtatttacttttttcctttcaacacgggagtttagcagaggtctgggaacaatgttaattaagaaaaagtaagaaattagatgatgaggtctctggctctttgatacatttcttgcacaaagagcaatcattatgaagtattttttagaacagttatgaatatttcaaatttataacctttcctattgcttttcttaaagccatttctgtagtaggaatctttttaaatttccttcaataatagaagagacactcctaatgggactttatttcttcttcgtgtttaaaattttaaatagaagttttgctgtctttagtatctctcggcaaatgtactttaattttgctaccataaatgtggaaatgcacgtttataaaatagaaaataattttcttaaaagtagataccgtatttcctatataaatgcaaatctttataaaagtcagcattttcttcagtttggaattattcagctatgaagatatagttaaactcaaataattggaactcagagcctactctgtgaaaggtacaagaatggataaaaagttgaacgagtcatttctctgtcagcagagcacctattgtctaggaaagaaaaagacagatacagaaatagtgacagaacaagacacactgtactaatacagtgttgtgtggatgtaaaggaaaaaggtggccatagaaggtactttaaagatgagtagaatttctgtctgcagatagggaggatgcagggtgagactattcagggtgtgtgaggagaacagcaaggagttggttttgcttcagaaaggaatatgagggaactagtagaggacaatgctgaaaaagtaggtttgaatgaatgccaacaaaggactttctcactgggttatctgctcagctccttgggatttctgctcctttcctctgatcctagaggttgtaagggtcccccaagccctgtacatacagcagggcctaaccctctgaccacagcttattgatctaggagtgagcacctaagccaagcaaggccaagcaacatttctaccctaaagattcagaattggaactgggaaaacaagagagcttgaatttgtgacatggaag

SEQ ID NO: 585792 - DNA, 4001 bp, Homo sapiens
tactgtcttgtatttaaatataaaagccttttgcttgaattgcttttatgcctgtctccatcccaatcttccctggaaaggcttccatgactagagaagctgagttaagggcctctctctcctcgatcccaactgctagagtgttcactttgaaagatgggcaggagtagtatcctattcagtgttgtactcccaatgccaggtcagtgctaggaagtaaagacatacaaaaagggtgaaacaaagatctctaattccgtggatgtattccctccttttgaggacctaacgatactttactcttatttctttttggagaagtctctcttatccacattctagaagactataggtaatatgaaactagtatttctgagaaaaatgaaatactagaacgaggcagggaaaactgcctgaactgtatctttaacagaaaacaaggatggaatgctagaaaaataaacataaaatgttacattactaagacaatccaacaaatgaataacacaacttaaattcacattttttccctccaaaatattatttcctctttaaaagatacacacaaatcttgaattacaacaaatccatggtagatctgggtttaggctattaagggcaaaaaggattacatacttgccatattcctgtccaaaatgttgtgttatggaaatgaagcccactcattactaagtactaggaagctcttaatgacccagggttaacataatcttttccttttctgtagaaataattccagcaaggtgagagtattttcttctactgaatgctaaaatatgctagttacataaactttaaaaatgccctcataagaagctttttcaccagcaaattgtttcccctaaatcttactggcctaaactcttaataataaaagttttgttttaataattctgtaagtccagctcctttcgggtggacaaagaggatatacaagagcatctctcaaaagtaaactattttattctcaattgccagcttactggttaactggtcctttaaagctctagaaagtgcaggttatcgagcacagacataatcattacaatactgctcaggactgctctgtctccagcatgtttactaatcataaactaaatagtcttttttgtgacagtagagatatcatggatcgtttctattcaagagtttcatcattcctactaatgcccactggaataatttaaagtaacagtaataactttatcttattttgttcagaaaaagccccaagttccttaagttccttaagtacaagttggaaggcatcaaacatctcggatttctacctcgtgctaatgtcaaactacttggaaaaagggcacaagcttcctggtcattatttaactgatcattatacagtgactattaatcatcaaataacaccctatcttcgttcataaacatagcaactaccagtcaaactgtacaatgtcaaagagtggttctgaattcgaatgtaattaatctggctccaaaggtaacggagaactttgagtgggactgagaaacctctgcctccccttttactaatacaatgccgcgcacaaagaagggaggcggcgacccagttccagcctccgggggtagatctgcggcgcacggtacccactcagttatcttccgaaagacccacaagcggctcccggagtctgagcggggctgtcagcgccggatcgctcccagcaggccgagcaaacaagcgaccgcgaggccaaggagcgtgacgacggactcccggatcctagtgtgttggacgctcgagacaaacaccgcaggccccagtgcatgaggagaagcacagcctcctttcccacgaccccactttatccccggagggacgtggtggtccgaagttcgctagtccgggatcgggaagaggtggggaagactcgcgcagcggctccctctcagcccttgagcttcccgggctccaggacaaccagcgtcctccctccctggtcccggaggccaaagaccacctccctccctccctcccgacctctgacccctgaccttccatcacccaagcgcctacccaagctggttctccgagcctcttgagtctgtttgcaccaggcctgcgctcctctacagacccagcagatcacgggcacgcattcgccacccaccgaacatgggcttgaggtgggcacgagcgctttttgccggaacgtgtaggggtcccccgggagacccagaaaccacagcgcctagctgccgggcgcgcgctgtagcgtggggtcaaggcgaacgcgctcgtcagagcaccccgccccctttctcctgcgctggcttcatgagtctcttctgcgcaagttcacactgttaaaaacttgctgaggatacagtggagtctcgcgatagctctgccccacgccattagagaacacaggatggccgaatgcccgaagtagggggcggggctccccttgaagcgaagggcgtgtgtgatttgtatctctaataaaaaggcaggggccaggagcggtggctcacgcctgtaatcccaccactttgggaggccgaggcgggcggatttcctgaggtcaggagttggagaacagcctggccaagatagcgaaaccccgtctctactaaaaatacaaaaattagccgggcgttgtggtgcgcgcctgtagtacccgcctgtagtcccagctgctcgggaggctgaagcaggagaatgcttgaacctgcgaggcagagattgagtaagccgacatctccccactgggtgatagaatgagactccgtctcacaaaagaaaagcagaaaagaattctgcaaaagcatctattttactgctataaagcagccactaagtaggtacgaataaagcttctccccctcaaaaacagactttaaagggaaatgtgaataaatattcaaagatgagagaaactattaaatacatgtgttgcgctgaagctggccttccactattggtcttttttcctctcacctcttcctcatagaagtgaccttaatgttggaataactctgagaggcttcagggtcaggagcctgtgaaataaccctcaggaaacactggggactcagtacttagttagtgagtacctaatagcagcttttctgctgtggaggccttttgggttgtgtgaccacagaagcacttgaactaagttcttgtccaagtgaatatcggttgtagttgtgttagacagtccagggtagtccatattttacttagtatattcctttatcacagatacgaagctgtttccataagcaaatccccgcctccttttattttgcttccctttattgtactttgcagataatatgttttcctataaattgaagttttttggcaaccttactcaagcaagtctgtcagcatcatttttcaagcagcatgtgttcacttgctgttcatctgttatggtgatctatgattagttatctttgatgttactattgtagttttttgggagcattacaaactctgctcatagaagatgctaaacttaataaatgttgtgtgtgttctgaaagcttcactattggcgcctgtctctcttcctctcttcaggcctccctattctttgagacacaacaatattgaaattaggccaattaataaccctacaatggactattaagtgttcaagtaaaaggaagggtggcacatctctcactttaaatcgaaaaccgaaggaatttagtgaggaagccatgtcaaaagctgagataagccaaaagctaggcctcttgtaccaaagttagctaagttgtgaatgcaaaggaaaagttctagaagggaattaaaagtgctactccaatgaaaacacaaatgataagaaaacgaaacagcctcatgctgatatggaaaaagttttagtggcctgaataaaagataaaaccagcctcagcattcccttaagccaaagcctaatccagagcaaggccctaacttttttcagttctgtgaaggctgagagaggtgatgaagctgt

SEQ ID NO: 585793 - DNA, 4001 bp, Homo sapiens
aggcgctgacagtataaaagacaacgagatctcttttttaaatagaaggcagtgtggtataatggtaattatcccatcaacaattcatagcacagtttgaacgggaaatgtggtttttagtatataagttccccttctttttcttctttttttctttctttctttctttttttttttttttttttaattttcaggtactttaggctttcatttcttttttccccacagtttccagggtcagagaagaactgttcaaggaactgctttaggagggaacgactaaagcatcacttgtagtttgaaggtagaactgaactataatttgaaagttttcctttagcttggagcatgtttttcatgctccactaatttggagcatgttttgcaggctttttgacttagataataacttttatgtcatgatcaagcaaagtgaaactgcaaacccaataatgactgtttcctgctcatccattcatttaacggaaaaccacaaaccccaaacatctaaaatcaacaacaacaaaaacctccaggggtcaaatcagaagttctcatttgtaaataaacacaattctttcccttggatttttgtttgtttgcttgttcagtaatccctcttttacatttctgaatccccttcccccagcaaagacatatctaaaatatttttaaaaatctgtttgcattatttgaatccaagtaaaggaaaagatggacaaatagaaaagtgtccttttctagtaagtataaatggttgtatataggacagtgttctatgaaagctgctctgtcctcacacagtgaatcttgataatctaaatatgagttttaaatcatgtcaacagctcagctattctaacttctaggccttataagacaattttctcaggatctatttgccaacctgccacccagaagatattttctaagcgggctagccatcttaattcaatcttatgtattttaggactagcctattatcttacagataacatcaagcccacagttgcaaatcatcaagctccagagttagtttcagaatctgcgaatgtcttgaaaactcggaataaatttgcttagaatttatttaagaacttgagtaaattcaggcatacttgttcacaaatatgcatgttactcatttgcaaatctttagatatatagagaaattattatctggcctatctagctccaggtacatgggtctatccacacctggcaaaaaaaaaatacagaattaggcggtgctcctggtttttactggacaaaattctaacaagaggagtaaaaaagaaagtcatgtttggattagtagtactttcaattgagcctagtatctgaagtgttgacaaaaggactgttgggctgcttcccaaccaaacatatctgatggactgaagagaaagtattgatggggaggtagagggagcctcaaaaaagcgacagaaattctgagttcagtgaggaccttagtgaagcagccgagctaaacttccctttgcaaaatatatatgtaaatatgtatgcatttctctggtcactgatgtcggctcattgcctggcaaatccccggccccttctgcctttgaaattccatctgggcaaagtcacttaccttctgggaacaccactctcattttgagatagctggtcgtgagtctgattatggatgctttgtccagctgcgaggtgatagccgagggcaaaggcagtaatttagccagttcataaaattcactgttttccttctccctcctagtccgcgcagcatttttggacttttctttcattgtgtcttgttccccctttcttctcacaacttaagctccgcagattcatccaaaaccaaaaataaactttcaattagagatcatatttggcaaaaacataaaacatactttgaataaagaggctgaagtatttgcaccaagaacagtgtattgatggcagtaaaagaccagcgggggtgaacggaaaatatgttctttgaaaattcgggatgcagtataggaaagttgctgatccaccgaatttgggcgatccaccgaatttgggcaatcctgagggtcgttcagggtatcaaatgccagtgggacccctgaggagccagccttttcttctactgccagctgcgaaccctggtcctcggaaaatcgacataataatccctgacgtttgctcttcagtctcgcggcatttaaggtatctccgagcccctttgggaagagcaggaaccccagacaactctttcaaggccctgtgaagacaacagcatcagagcataagagatcagcggctccacaagtactcacacactcgtcccaattccaaaaacacggccggaaagggcctcagtgcgcctagccaggcgttttgggtttgtttttaaagaaacgggtaaatcggcagcgagacagccccctgcaaataatgctggcattccctcacccatgccagccgcatcctccagacccctgggaagttgcccaaacaacaaaatacatatttctgaagacccgcaagggatcttccgccgcggatccccgagtccgcgcccaggccgggcgcacgtcccaggaaagcaggtttccgcaaatcagaattcctccaaggcgaggcaggggcctttcagctccctaccttggcagatctggaccttggctacctctttaacttgggtctcaagtctgagggattcctcaaaaagtgacacttacacaccaagtctctcgggactcccaaggcgacccagcgctctggctgcccagcaggggctgcaacaagcggggcccagcagcgccaggttaacaggtggcgcgctcgcgacagcccctcgcaggctcccccgggggtgggaggcgccgcggcctctcccacaccaccgcggagctgcggggctgctgggcgggcgcggggcgtcttctgcttcacctaccttcagtccccacaagcggcagaggtttcgggggcgcccatctcttaactgttctcatgcctaccgtccaacccagcgacaccgccggcctctccgcttcccaccggcagagaggagcagagcattcccggctcccttttctggatcatgaattggaggaggggtgcgtggcagaaagaggaggatgcaagctttgggacgagtgaggtgattttagaatcctggtcctccgtagttgctacgaagccagttcactattattcctaattggaagccgaaaactgccccccgtaacttctttatagcttaagggtttagcttcaacttcactccggggccgcctctctcccgccctccctcaatgccactcacaagccccctcgcctcccattggcctggcgcggccaggggcgaggcgctcattggccaatagggctgagtgacacgagtcggccccgagccgccctccgcgcgcccaggctccgggctctgaatcttactacccgcgggaccgctggactcctaatgagctcagggtgccgggtcggcgctgtccggttgccgccgctgctcgcggcctcctgggccttcccgacgtcgtgcgcgacccgcgctcctcgagctccctggggtcgggtggttgagcgctcagtccagcgcggcggcccagcagaaccgggaacgtccggaggcagcggaggtcgggcctgcgggttaggtctaccggcggaggaggcagggttcgcccaaaggcccatcccgctggcagtcgctggccgacggcgtgcgcgaggccggtttggggagttattttctctttctcgtttctctgaaaccatggcgacacggaattcattgccagaggaaataaatacaataactgtctttaaattaatcccaaagaagtgcgtctttttcgaaatggcttgggtttggggctgatttttttcaccgtggaaactcggccggggagttttcctatggggagcagctagggggacactaggggaaaagcttacatttcagggcaaaatagaatgattgatatagagatacatagctc

SEQ ID NO: 585794 - DNA, 4001 bp, Homo sapiens
aaactcaacagcaaaacaaaacaaaacgaataacccggttaaaaaatggacaaagaacctgaacaggtattcctcaaaagaagacatatgaatggtcaacaaatacatgaaaaacgctcaactttgctaaccaccagggaaatgcaaattaaatcacactgagctaccacctcacgcttgttagaatggctattataaaaaagatcaaagacaacaagttttgtccagaatgtggagaaaagggaaccctggtacactgttggtggaatgtaaattagtacagccattttggaaaacagtatggaggctcctcaaaatctaaaaatagaattaccacatgacccagaaatcctacttctgggtatatatacaaaggaattgaaatcagtatgttgaagagatagctgcattcctgtgttgttttcagcattattcacaataaccaagatatagaagcaactaagtatccatcaactgaggaccggataaagaaaatgtggcacatatatacaatggaatactatacagtcttaaaacagaaggcaattctgtcatttgcaacaacatggatgaacctggaggacatgaggccaagtaaaataagccaggcacagaaggacaaacagcacatgatcttacttatatacttggggtctaaaaaagttgaactcatagaagcagagtagaatgatggttaccaggggcctggcagagggctgatgtggaagggagggatgttggtcaaaggatacaaagttttagttaggtaagaggagtaagttttagtgatctactgcacagcatggtgaccatagttgatgatgtattgtatatttccaggagagtagattttcaccacaaaaaataagtaggtgaggtgatggatatgtcaattagcttgatttaatctttctacaatgtatacatatatcaaaacattacactgtacgctataaatatataaatttgtcaataaaaataattatataaatatatatttatataaaacaaaatacatgctaaggataatgcaatgaactgcaaaaagttgtacaggctcccaataaataatttttgaacgcctaagagctaaataaatgcaatacatcactcccaggtgtctccactagggggccccattccctcccgttccatcacctgctttcctcaaggtcgtctccaccctcctatttgttgatacccggcctctgacccagttcatcactttcccgggcttccgggcgccaccctcttcaggttttcctcctacccctccagccctgcccctctggatctcccatcctcccagcgcgccagactgcatgcggcctccccgccctgtgtccaagaggcagcttccactccacgcgggcaagcctgagctccagagccgtcctcaagccgcctccccccgaagcactgggacttcatcctcccggctactactcgtgcccagggactaggccctgagccttcccttctcgcacgccccatagccaagctgctcagcagaacctgacggctccaccttcaaactacgtccggaatccgacccctctccacgcccactgcctccaccccggccaccttcctcggtcaccctggcagctgcaatgaccagggtgacctttctgaaaagggaggctctgttcggagccctcgcggggctccccagcacagcggcctcccatgcccacctgctcgggtgggattactttccaaccccgtttccatccccctccctggtctccagccgcagcgacccccacgcagagcccggaagaccttgggccccgcacatgctgccggcccgctaagagctctgggtacccccggagcgccttccaggctttctcctagaggcgctgtgtcccgaccgcgctccggacctgagccacggctcacctggggcagctcgcgcccccgaatacagtctcccacgccccgccccccggggtgcctccctcccagctctctgtacccacccaccatcccccacatcccttcctccaaccgctagccagtcaccagcccgggaccgcagggcagaggccgggccgcgcatgcgcaccgcggaccggtgccacctccgctcgcgagcccgcggcaggccctgggcggtgcgcgcagtcccgcgagagcagtgcttggtcgggacctcgaagccggagcccgagcgggagaggccgcggagaccccggcccggcgcaggcagagacgcacctgcgggaggcgggcgcgccggctggagaggaggccgtggggcggagcggctcagcgttctgctcggctgcagcggcccctgccggagacccgggcgccgtggtcttctttataattgaaggattgtctctctgtttttatttggggtgggggtgggggtggggggcggcgcagtgacttgcttcgactttgtcagcttccagggttcattccactgcccaaatatgtagtgagttactaccggctttgcttcctccttcagcaaacggctggaccacacaacttcaggagagaggattttaaatgttagggtcattttccctaaaacgatttcaaatgacggtgagttggttcccaggctaggccacctaacctcgaacgcaatgacgagtgcactctgactgctgagctgagagccttccgtggctctgggacccagtgactcacgtggctccgcatgtccccgttcccttaaaatcggagtctttccttttcttggattccggcttgccaccagcaccacttggcagaatggaattgcttgcgggcatgtcagtggactagaaagggaagtaagtggtctgagaacttgggggccaaaaatgttacattaacattttttgcctacctaaaatctcagccacttcccacagtttggctggaaattcagcccatgttgaggcccttctcattcctgcaggtgttaccagcaactcagaggtttatggagtaacgaaattggggagggcctcacatccggctgctgtttttccccctaacgtgtatggtgcttattctgagccagacacttttaagaactgcacattattaaccattttaaatcgtccccaccacctgatgaaataggtactgttatccccactttatgggtggggaaaccgaggcccagggaggtcaagtaactgcgcaaagcacaaaactgttgagtagtagtgttaccagggcagtcctggagaaatcgctcagagggcaaaactgagagctcattattttcttaaacagtagacagctgaaaatgctcattgttttttaaaccgttttgtttgtttgattttttttcctagtctctttatctataggtaacccagcttaaaacaactgcggttggcccgggatcctcactgccctttgccaagtaccagagaaagataaggcctactaggaaccagagaaaaccagaaccagccaccccttgttacttttagatcattaatacatcattatatgctcaactcccgacccgtagaagagaatcgccgccattttctgatagtgcattgtatgaagaggcatgtttatgaaatgcacctgtgcgtctagagttcctcccggcatatgcttgcatacctccccactccacatctaacgccttacaattccccagcttcccaaagctctggaagaagggggtctttagagtgaaagtttactccttctctattcctggccaggaatgaaacccgcttgccgttttttccagttggtgtgctttctttgcaactgatacagactaggaaaagaacgcaatttaccagtaacagtagagctgggatttaaatctaagtgctttgacttcaaagacaaggttccaagctgctacacataccaattctcgttaaagtgtattccatttcttttgtgctttcatattgaccattgtgtgttaatcctttcaattggaagaagagggagacagtgccagttattgcaaactttcacagtccacaggcccgatatgtagccttcaccacccacag

SEQ ID NO: 585795 - DNA, 4001 bp, Homo sapiens
ttaacagagtaaagagacaacccacagactgggagaaaatatttgcaaaccatgcatctgataaggggctcttatctaaaatatataagaaactcaaaaaactcaacagcaaaacaaaacaaaacgaataacccggttaaaaaatggacaaagaacctgaacaggtattcctcaaaagaagacatatgaatggtcaacaaatacatgaaaaacgctcaactttgctaaccaccagggaaatgcaaattaaatcacactgagctaccacctcacgcttgttagaatggctattataaaaaagatcaaagacaacaagttttgtccagaatgtggagaaaagggaaccctggtacactgttggtggaatgtaaattagtacagccattttggaaaacagtatggaggctcctcaaaatctaaaaatagaattaccacatgacccagaaatcctacttctgggtatatatacaaaggaattgaaatcagtatgttgaagagatagctgcattcctgtgttgttttcagcattattcacaataaccaagatatagaagcaactaagtatccatcaactgaggaccggataaagaaaatgtggcacatatatacaatggaatactatacagtcttaaaacagaaggcaattctgtcatttgcaacaacatggatgaacctggaggacatgaggccaagtaaaataagccaggcacagaaggacaaacagcacatgatcttacttatatacttggggtctaaaaaagttgaactcatagaagcagagtagaatgatggttaccaggggcctggcagagggctgatgtggaagggagggatgttggtcaaaggatacaaagttttagttaggtaagaggagtaagttttagtgatctactgcacagcatggtgaccatagttgatgatgtattgtatatttccaggagagtagattttcaccacaaaaaataagtaggtgaggtgatggatatgtcaattagcttgatttaatctttctacaatgtatacatatatcaaaacattacactgtacgctataaatatataaatttgtcaataaaaataattatataaatatatatttatataaaacaaaatacatgctaaggataatgcaatgaactgcaaaaagttgtacaggctcccaataaataatttttgaacgcctaagagctaaataaatgcaatacatcactcccaggtgtctccactagggggccccattccctcccgttccatcacctgctttcctcaaggtcgtctccaccctcctatttgttgatacccggcctctgacccagttcatcactttcccgggcttccgggcgccaccctcttcaggttttcctcctacccctccagccctgcccctctggatctcccatcctcccagcgcgccagactgcatgcggcctccccgccctgtgtccaagaggcagcttccactccacgcgggcaagcctgagctccagagccgtcctcaagccgcctccccccgaagcactgggacttcatcctcccggctactactcgtgcccagggactaggccctgagccttcccttctcgcacgccccatagccaagctgctcagcagaacctgacggctccaccttcaaactacgtccggaatccgacccctctccacgcccactgcctccaccccggccaccttcctcggtcaccctggcagctgcaatgaccagggtgacctttctgaaaagggaggctctgttcggagccctcgcggggctccccagcacagcggcctcccatgcccacctgctcgggtgggattactttccaaccccgtttccatccccctccctggtctccagccgcagcgacccccacgcagagcccggaagaccttgggccccgcacatgctgccggcccgctaagagctctgggtacccccggagcgccttccaggctttctcctagaggcgctgtgtcccgaccgcgctccggacctgagccacggctcacctggggcagctcgcgcccccgaatacagtctcccacgccccgccccccggggtgcctccctcccagctctctgtacccacccaccatcccccacatcccttcctccaaccgctagccagtcaccagcccgggaccgcagggcagaggccgggccgcgcatgcgcaccgcggaccggtgccacctccgctcgcgagcccgcggcaggccctgggcggtgcgcgcagtcccgcgagagcagtgcttggtcgggacctcgaagccggagcccgagcgggagaggccgcggagaccccggcccggcgcaggcagagacgcacctgcgggaggcgggcgcgccggctggagaggaggccgtggggcggagcggctcagcgttctgctcggctgcagcggcccctgccggagacccgggcgccgtggtcttctttataattgaaggattgtctctctgtttttatttggggtgggggtgggggtggggggcggcgcagtgacttgcttcgactttgtcagcttccagggttcattccactgcccaaatatgtagtgagttactaccggctttgcttcctccttcagcaaacggctggaccacacaacttcaggagagaggattttaaatgttagggtcattttccctaaaacgatttcaaatgacggtgagttggttcccaggctaggccacctaacctcgaacgcaatgacgagtgcactctgactgctgagctgagagccttccgtggctctgggacccagtgactcacgtggctccgcatgtccccgttcccttaaaatcggagtctttccttttcttggattccggcttgccaccagcaccacttggcagaatggaattgcttgcgggcatgtcagtggactagaaagggaagtaagtggtctgagaacttgggggccaaaaatgttacattaacattttttgcctacctaaaatctcagccacttcccacagtttggctggaaattcagcccatgttgaggcccttctcattcctgcaggtgttaccagcaactcagaggtttatggagtaacgaaattggggagggcctcacatccggctgctgtttttccccctaacgtgtatggtgcttattctgagccagacacttttaagaactgcacattattaaccattttaaatcgtccccaccacctgatgaaataggtactgttatccccactttatgggtggggaaaccgaggcccagggaggtcaagtaactgcgcaaagcacaaaactgttgagtagtagtgttaccagggcagtcctggagaaatcgctcagagggcaaaactgagagctcattattttcttaaacagtagacagctgaaaatgctcattgttttttaaaccgttttgtttgtttgattttttttcctagtctctttatctataggtaacccagcttaaaacaactgcggttggcccgggatcctcactgccctttgccaagtaccagagaaagataaggcctactaggaaccagagaaaaccagaaccagccaccccttgttacttttagatcattaatacatcattatatgctcaactcccgacccgtagaagagaatcgccgccattttctgatagtgcattgtatgaagaggcatgtttatgaaatgcacctgtgcgtctagagttcctcccggcatatgcttgcatacctccccactccacatctaacgccttacaattccccagcttcccaaagctctggaagaagggggtctttagagtgaaagtttactccttctctattcctggccaggaatgaaacccgcttgccgttttttccagttggtgtgctttctttgcaactgatacagactaggaaaagaacgcaatttaccagtaacagtagagctgggatttaaatctaagtgctttgacttcaaagacaaggttccaagctgctacacataccaattctcgttaaagtgtattccatttcttttgtgctttcatattgaccattg

SEQ ID NO: 585796 - DNA, 4001 bp, Homo sapiens
gcagtagcccagtgatagcctgggctcttcctcctcaaggctcagactcagagccccaccttacctttctcaaagtctatctcctcctcagcctcctcccgtgtgttcagatctgttatggtgggttcatccatcccccctgggaagagacaggacagacagggattcatgggatgagggtaatacgagataggtggggaacccttccctggagattaaagacaccctcttctaccatcccatctccacaagagtcacctggccagaagggatactgagttggatttccccataaggactgggaggctggccctggaggccggcgaagagacaaggaggttgtagccgagagatttgtgttctccagcaagacctaaggcaagagatcagagccccaatgaggctgagcttgtctctgaccacctccccttctccccaactgtttctcatgacccctgacctcctacctctttgtaacccagtatctggcctgtggttgggtgtctttgggcctgtaggtcggatgggactggggctcccaggacagccaaaagagaccagggatccgtcttcctctgccattttctggagagaaaaatagtaacttttgggtcttctttcttcctctgtcccagcttccttcaggaacccatcaccctagtctaagcccctccagactcctcaccgggctgagtgctccacaccatgcagaggcagccaggctggggatgacagaaacaactgttctgcttcttgctgcagatctggggcacaaggagggaggccatggggaagctgaaacaagggcaagatgagaggcattaggtaaggaaagaggataaaatgcagacaaaagagatgatgggacttgtgttcagatcagaaatggcagatgtgtcaaacagactaggacaatcaggcttggccaaaaactacctgctactgaattacctggggcagattttggatttcagaaacatggaggctggacctaggaatgtgcatttttaaaaagctccctggctaatcatgaagcacactgaaattggagactcactgattttagaaaaaggggtcccagacctaaggatgaaaggttggaggctcaaagcctatcatctcagtcaccaagtgccctggtgcttggatacagaagggagctccacggagaaatgccacatttgaaagagcagctctcaaagcaaaaatatccccagccctttctgctctgtcctcacatgtactgcaggtacactgggctgtaatctgtccagcaccccttcaggctgggatggacaggagtacaggcacagatgaacaaggttaagctagatcctactgtgaggagggtgaaggaggtttggactcaatgcgggtcaaaggttagggtcaaaagtcactcacgctactctctggagctccaggcaagttcagcagctcccagtgccccgtgcatccgagctccacggcccgaaggggtaggtccaggggatctggagggggtagcactacggggaaaggtcaaaagtcaggggtcaaagttcattccatatcggctactccgttccatttccctcccctccccctcaccaagtcgctctgtctccatcatcctggagccacagcagctgcctggcagcccggaagtgcggcaagtagtcgctgcgaagtaagccccgccccggaacgggcggaagtagaggcaacttccggtacagccccgccgagagcgtgaactatcgctgcggaggggcagacctggaccggtggaaggccgggcggaagtgcgcgcctggggccgccttggttaccgcgttttccgctcctcgctacgtcatcgttgtgagcccgctatcagcggccagcgcgggcgcggccggagaccgtggggcccccggttgccgccccctcgggtaaggccctctgcttctcactcttcggccctttttctcatagccgtttctctgttcttcctctttgcgttgctctgcgggcgctacgctggctccaccgccttctctgccgttcaaaccccgcggttgtccttaccctagcgagggtaggggggtcgggtgccatcgtctttccgacggagtggatatttgtccctccttgaaccacatggtacctaaaggtgctggtgtctgtgatccctggagacaggagggaatgctggatgatcccgaccagcgggagcttggacagcagcctggtttaagcaaggggtagggaaagccaaagacaagagtaggcagacctgaaggggtggggttgggtacagtgtggacggcgtgtgaaccccgggtggtaacagtggagaaagatgtcttgggccctgcccctgaactaggagccaccatgttggtgataccccccggactgagcgaggaagaggaggctctgcagaagaaattcaacaagctcaagaaaaaggtgagggactgtgtgtggacatggcctaacctttcacagactctgcactctgagaagatatggggtgagtgtgagcgaatggggaagtttttctggcccatacctagagacatatcacctcacagtgtagcttcgagaggtgggctttcccaagccttggtgtggaccttctgtcttttctatgcaatttgccatggattgtcttcctttcccatggcttttagtaccgcttaagagctgatgatccccaagtttgttttttccagttctatccagtgttatactgaaaaacttcagatactcagtgttgaagctatcatctttctattcttgatcttccaaataagattgactacaccaattctgccacatgtttggactcaaaactctgacttccccactatttgcatagtcaaacctttgccaagtcttattgtttcttcttttgaagtaatttttcctgtttattcttcactgtgcattcccccgagcagggctttattgacattcatgtgggccattgtaatggtctctcaacaaatttctcagtctttttttttgaacagacttcttcactcctgttcaaatgatccattgaaaacacaaaattctgctccctctgtttctcaaaaaccataaatggcttcacattgtctataaaaaagcctcaaaaccttagtttggcagccttgtctagtaaagtagaactattcactacttccaaaagatgcattcccaaagccttcttatctctgcatctttgccaccctgttttctttttctaaaatacccttctcctctctgtgttgtgcagagatacgggagagggcctagtttaatagccattaaacatcagaaaatcttactagctttcagctatgaataatctgcacctcttataattgtattgctaactcaatgtattttatttctcagactgtaagcttcttgagggtaggaacaatgcattagcctcctggatatccctgttacgaagtcatggctgggcctcattcaatatgcaggaaatagatggatgaagcttccaggaaaggcacataaacttatacttacttgcagcttatatcctaggattctagtccatgattgagttatttgtcttcaacttcaaaaatgtaacactctggaaaacctctgggttccgtggtttggttagattaggaatttccagcatcatacatgatctaggggaccagaggcaagaggcagagcacatcagtgtaccactctgagggcatcaagaaagacggtccctggagtgatgtgcccaggggccttaggagaggaaccggctaggggctggccctcacttacctctctcttctcacccttgttcccagaaaaaggcattgctggctctgaagaagcaaagtagcagcagcacaaccagccaaggtggtgtcaaacgctgtgagtgacaggggaaatggggatggactggaagtgggcagcatggagctgaccttcatcatggcttggccaacataatgcctcttccccttgtctctccagcactatcagagcagcctgtcatggacacagccaca

SEQ ID NO: 585797 - DNA, 4001 bp, Homo sapiens
ccattgacccgcataccacagcagtttcaatagctatttaaagaacagaaattccaggttaaaatggtaccgtattcacatgcataacgagagtgtacaagaatattcattgcagcattgtttagaatgagtttggaagcaatctaaatgcccatcagagggagaatgcatagagtataatatagtcaaacaatgcaaaccacctaagttaaaatggaaagaatttgagttatcagttcacactgaggtattatgtggataagtcacaaacatgatgcggaatggaagaaaagtaagttgcagaatgatacaaatagtttaatagtatttatgtcaggttttaaaactctcagcataacccagcattacctttgtctcagaatttattacagtcttgcccattcctcatatgcatactaaagacctaagaaatattcactctaaaaataatagaaaatcaaggttaaaaaaaaagactattaatcatataaagttaccccaaatgatggggagggaggttgatttagtaatggaaatcacttagcccttgaagtcagttgatatgtgttttattgccattctactacccaccaagacactttcactgagctacagttttctcacccaaatggggttgaccgcgctcaccttgcaggataaagtgaaagaatttatgttaaagtgtcatgcagaaggtcttagatttgttttttgcctaaccagccaaaaagtcataataatgctctacagggagaaaacgctgaatctgcaccttttgtatctaatttactatatggttaaaaaaaaatgtcaaaaaacacaacaggaagagggaagaagcaacccttcaccttcctcatcctagtccctaatccggctgcctcccgtgttttctacatttaacccagagggcaaaaaaaggcggggggacgggaacgcacggaaccgtgactcttgcagggccccctttggaactccagtgaccttcgtacaaatctctttcattcctccaaactccaccccccgccccgccaacatacgcacacccctctgcggcccagggaggcaggtgaagaactacataactggcatagtcacgaaagagaccacaaaaatgacagggcgatgactggggttgaaggttctggggttctgtttgttttcaaacaataaaaggaagggctcctgtggactgttagcgtctgctctgctgaggggaaaggaggacgatctcggcaagtaagttctgcgacctgcttgcaaacacacagctctgcagctggattccatataaagacgggcaccccgaggccccagaagcggcaggctctgtctgcaactcgaaagacccccctgctcgcaccctctggcacagggacccaccgacatgcacactcggaggcagacacagcccacacgcgggatgcgctcgggggccccacgcgggtcgcccaggctggcctcggcgggcgccgcgcctcacctgtcttaaagaccatcttgtcatcgtctttggagccgaaggtttccagcatggacacgaagagcaccccgcaagcgttctggatgccgaacaccgacccgttgcaccacatggccgccagcatcaccagccagccccagccgccctcggggggttcggggggctcatggggctccgcggtcgccggccccgccagctccacctccaccttctcgacagccgcctcggggctgtccgagggtcccgggccgggcggcggagcggcccccgtgggcgcggggccgagcggctgcgcctcgctcgtgccccgcgcggagtccggctcctcctgggagagcaccatggcccgaggcgggcccctcaggcgccggagaagcgcgagggacgcgagttaccagcgggctcccggaggagctgcggggctcctggcgggctaacgaggccgaggcgagggcggcggagcccctggcgggcgggcgggctggcagcgcgcaggcggccagcgcgcaggcggccgcgaggacagctggcgcgcgcgaacacctcggggatcgacactgaagcctctaggtcacagccccgcacccccgactgagcccactgccagccgccggttcttaaaagcaccccccgccccgccggctgggggcgtggccgggagcgggacgtgcccccacagcctccagatgattgggcctcggagagcggaggcggggcgccccgcggcgcgcggccccaggtgcccgcggcagacgctgtctgcgcgcgcgtctgcgacggggcctcctcctgctcagagaggggcacagatgtgtgggtcaccccgcctcaaagcatgagcagaaggggcgcgtctcctaggtgcgggcgcggtgggccttcaggagagccacactggatcgttagcctcaactcaccgacacagcgtcacagtcacactaacattgtctcgattgtgtttgttttatgttttggcattcacctctcagtactaattataatatgtaagattcgttatgccacctggcttcttaaataagtcatctgaaggatcagagcccttattttattacttcagttccattctcttgcattcgtatacaatttccttatgaatatttggcacaccaaagatgcttattttcagtcctcactggactgcaattccgaagtcttcaaccaacaaacatttttaacagacagctagaaagcattacttttcaactacatcagagtcgttttcactttaaacaaaaactaaaacctgtattcaactcctctgtctccctgaagcatggagtgccatcctatgtaaaagaaaagaagagtaacctgctatgcaatattgaggatgcttcttaatttctgttattcgtattcttcacttcaatcaaagtcaaaatatgctagttacttgatgtgcccaccactgtgatagagtacacagatgagtgcgattgatctcgtttctgcctcttatcagttgataaactggtaggaaaaaagagtcctgggagagactaggaggctcagatgatgtgttataatacatgtacaaaagagagagatgagatagtcccttaaattctctccaaacactgtagaagagcctctacagcaaacagcctttggccgaagccctgattcatacatacgacttcagtgggtcaagacaggaaaagagcattccaggtagagaaaatagcataaactaaggaaagcaagccgtgcttggttgtggaatggggaacatagctcaagtgtaatctgccttagaaatgagggtaaaatagtaaacaaaggaataggcacataagtgcacaaaaatgtatgtatgaagatgataccccagtattgttggaaataaggaaaatttggaagtataatgtacattggtagaagactgattagatacttactttaaaacctctaaaagttctgaaggtcatctgtatttattgactttgaaagttgtccacaacatattattgggcaaagaaagcacatcgattatatatttgcatgcacacaaacaaacacatatgtaagaattatccacgagtcagtactgatgtaagtaaatgattaaataaataatgaggagagaatagacaaatctctcctgcaggaaatgtaaatactttatgaacatactccctccctcatggaggtgaagtacaatggtttactctttaagtgtgggtatgcgtagtaactttcttccaaagagtataggatggaaagggggagtggggggaagaaataactttagggtgcaaaaaatggcacacagtacctcaactagatgataatgtatccccgatatgatgtgatgaaaatggtactttacctctgtggtcttcctgccaaaacccataatccctggctaaccatcagaaaaacattagacaaatcccaatcaaggacagtctacaaaatacccattaagtactttcattactgtaaaagtcatcaaaaacaaggaaagtctgagaaactgtcacagtaaaaaagagtc

SEQ ID NO: 585798 - DNA, 4001 bp, Homo sapiens
acaacgctaaaccaatagcagtaatcctttattgtcattacactaccctgcctaaaataaacagcttctctcaaaaaatattcagtacacattcagctgttgatgtccaagaatgcagggactcaagaacattcatcctgccttacttccacttacagatctatctctctttctcttggagatggaaccaaaatagcccagttttttctgatattttccactaaatgataaactgacaagtgcgcaaaaatgaaaataaagtgtaagccaccagagtatgtagaatctttttatttagggcttttctggtggaaaaccatagtaggactggtttcttctaccttcttttctgaacatttttaagaccccatatgtatatcacaaaaatattcttccacatggaatctgtgatgtaatatttaagaaaaagaacacctgtttaatggaacagaataaagtgctaccttttttgggaggcaaccggttatccatttgcatacacggctgaagttgcttctcttcttgctgaagggttttgcctccacccactgtgagtgcaaaacacgttgatgtcagcataatgtagagaggcaactgaccaaacactacccagtactcctctctgatttaaaaccgcttccaaggataacttgctccatcacagcagtgcccattcacctccattatgtgcttcccttgatatttattttacttttgtgattgttttggttgattaaaaatatatggaagacctgaaaactacagagaacaaacaaataaccctgccaatccagaattctaaatccgtgataatattcctccaaagtgagaaatggaaagaattcattgccagtagacctgccctgtaaggaacactaaaagaagcctttcaggcagaaggagattgctataggtcagaaactcggcagtatgaaaagaaaggaagaatgtcagaaaaggagtaagcaaaggtaaaacaaattccttttttccccctgtatcttaatagagctggaagatactatctgcttattgataagatcaactcaagcagaggctaatcattcgttacacgtccacatgcccctgtccgtatcttcagtttccgtggatagagcagccactgatgcaaagctttatggcaggaagctcagtggagaatcagaatggagcagtctcctatcaggcaaccccttaccatcagaattcagcaccaatatgtgctggtcaggttagacctcaggattttaccatatcagattatatgatacctagtgccccaaagataccaaagtcctgagattggatttgcaaaatatttttgaataagcaatttgtcaaccatcattatcacacattggaacctcttctggggctgctgtttatttcaatacatatatacatacacaccaaatgcacacacaaaccacccatacgtatgcaccacatacatacatacaacataaacacatggtacaaactccccttatgttctccacacatacactccagacacatagcaaaccaaacatataaatacgttacaatactgcatcctcaaaacggaagtacaaactacaaacaccacacacataaccacacacacacataaatgatgggcacagatgcaccaggcgtacacagtgtgccacacacattacagacacagcacaccacagctatacaagcatcacacactgtacaacacatacttctctttccttgtgtccctgtgaacctcacactgattgctaaaaatatgttcttttttctcttgtgaaaagcctcagaagatagggcatattccacccctccccacattttcccctattgctaagtactttcaataatatctttgccagggaatgcccccttacggccctctggggaatcaactgattgctcatttcatttaatgagccccgtagactaacctgattcgggacaaaaaagtgatttcttcttccgctgtgaagacttttctctcaactttacacaatattgactttctaggattaccaagtttagccccataaatcattcaccaaatcttttgacatcactgtgtcgaagttaaaagcttaatttttaactttactgttaccttttccttaaagcttcagggaaggtgtgtgggtcaaaatcatccagtggaccagaaactgggaatctgccagtaatttcatggcataataagcagacacccttagtctctctccctgcccaggaggtagagcttgcctgccataagtgctctcaagatttctctattaaggatggctctgagtatacaatgctgttctcacaggaatgttgtggctttctaaatgccccataaatgccatattaaatttttactcttaattcccttccttcctttcttcctccttttcttccttttttctttctttcttccttctctttcccttcttccttctccctccttccttgctttccctccttccctcaccctgtctcctccacactcctctctaaacagtacatctgtttgacattcagcatactcagaaagaggtacattttattgaggcatgtcctctggaaggtgtggcttctctcatggctcttcctgcaattactgtaggttctggttcatccacttggttatagcaatatccagaaacattaaaaaaaaaacatagagagacaggatctcacactgtcacccaggctggagtgctatggtgcaattatagctcagtgcagacttgaactcctgagctcaagggatccttccacttcagccccaagtagctgggattacaggtatgcaacactgtacccagctaattggtagagacagggtcttgctgtgttgcccaggttgatatcaaacttcctgccacaagcaatccttgtgccttggcctcccaagtgttggaatgacaggcgtgagccgtcgtgcctggcccctaatacttttaacttagaactctttgaaggtaatctactaattacttaaaaatatccaagcactaaaatcagtgattttgcattataggtaatttatttcatgcttaacaagtttttttttaatttttatcatgcttttaaagtgctcattaaatgtttggcacatagcagatgctctgtaaattcaaccagttatttttttcctctaaagaaatgttgtaaatctttaacccctttgcccaggagactttgatgttgttattcagttagattttttctttttcaaaagtccagattctgctggtcctcttctgtgtgttgcagaatgtttgtactgtcctgtttcatgctgggcaatttctggcattttctgaaagaggagcccttttagtgattgaaacccctaggtcagcagttgttcaaagtccatgtgttaaataataacactcccatctgccatcagtatcccagttctggatactgattacctgaaggagaaccatctttctgtttgctggccccaaagctttctgctgctctgtgagattctttgaaattgtttcttttggattctgtgttttatgtattaaatttttaaatttatcattttattatggaaatgtttaagcatacaaaaaagtagatcagtttaagataactgtgtacatattcacccacttcaataattatcaatatttggccatttgagttttcatttggccttttgaatgttatcaacaacattcaatggttgttttttgtagcattttaaagcagatctcagacattatgtcatttcttctataaaacattcagcatggctatctaattcattaggaccttaaaagatataactaacatggtatcagcacatctagtaaataaacaataatcccttaacatcacctaatatccaacctttatgacaattttcccaattgcttcaaaattgtgtcctttatatttgcttgatttaagtgaggatttgaataggatccacataatggcgcttaattgttacggctgtcatgtctcttattttataataatcccctctcccagtttac

SEQ ID NO: 585799 - DNA, 4001 bp, Homo sapiens
catagcgtaatgaacagaaatctggacctagacaacaacacagatgtatgtagtgagcatcctgactgagacccctttcttttcctttctctcacagctcgatctgatagaactttggatgacacatgaagtctcattgtctttttttcaccaaaatagccagcactacaaacccactttgtcaaattatttggttggcttcaagacagcgaatatgggatcttataaccaagtaaagcaaatatggccatctttcaaggggataggaaacacatgataaatagagaaaacccacatgtaaggcatttatgtcatattgctccaaaatgaagtgaatggggatgacagtggcagagccagtcacataaccttctcagcgtcaataaaattccctgggctgtaagtgaatagtcccatctgttatgcacatttgtttatcacaaagcttgagagtttatacataacgagctgcctttgaattaaggtattgcacatccaaggattctcttttaatacatttgagagatggtactttaaatgagcacttcgactaattccctagtgtaatgtctacttggaaatgttattgctatgtgtcactaggtcctgccttcacatatgttcaacttaaaaaaaaaaaaaaactacgtggggtgcagtggctcacgcctgtagtcccagcattttgggaggctaaggcaggtggatcacttgaggtcaggagtttgagaccagcctggtcaacatggtgaaaccccatctctactaaaaatacaaaaattacccaggcatggtgatgcatgcctgtaatcccagctactcgggaggctgagtcaggagaatcacttgaacccaggaggcagaggttgcaatgagccaagatcatgtcactgtactccagcctgggtgacagaatgagactcaatctcaaaaaaaaaaaaaaaattaatatgtagaactatttttacaaagcttgcaggtgatgtggtgctggaagatattcaatatattgaaaggacaaattttttctttaaaagcatccccataaaatggaacaaccacagaccaatattgaaagggttcccatgtgcatgatagattggatttttcctgcttatttgaagaaaagcactaaagtgaaagaaagagaaaacctgtgaagacacagataaaaatataatggaagaaataatttttaatggccaaaaaagctcacagataagagtggtggtctgggaaataattatttccattttactggaggtttccaagctcaggagaaagagccagccgcttggtgagaatattatagtagggattcatacataggttggtttaaaatgactttcccgggccaggcgtggtggcccatgcctgtaatcccagcactttgggaggccgaggccggtggatcacgaggtcaggagatcgagaccatcctggctaacacggcgaaactccatctctactaaaaatacaaaaattcatctgggcatggtggtgtgtgcctgtagtccaagctactcgggaggctgaggcaggagaatcacttgaacccgggaggcagaggttgcagtgagccgagatcgcaccactgcactccagcctgtgagacagagcaagactcagtcaaaaaaaaaaaaaaaaaagactttcccaaaacttattccactccctagatcccaggatttattgcttatttggcttaatttctcacagatgatttcatggggctaaggaaaaagcaacaggatcaggggctggagctggctccaatgttacactgggagtatctttacgaagggtcagtgtgatgcagagatgtgtaaatgtgtcggaataagcttcagcttattaacatagcctgcaaacaagagcagtggctttacctttcctggtggcaggcttcccgtccatttagcttctgtgggaaatggtaccacgctttgtggtggagtttccctgtgccctgaatctcttttactacgacagtcttttatctatggagagaacataatccaaaacataatacacaaataatttccccttgttaatgttgcctcctcttagcatcagtaaaagttttgacccaacacagctctataacttacattttatggggcactactggtatgcttttggttacaggattgttaaaaggaaatctggctgtaagttccagctgtgtgacctagagctagtcatttaaattctctaatcattcatttcctcatctgttcaataaagataaggctcctttcttagtgcagctggaagaattaaatgaaaaattgcatgtactttatcaaaccacagagaagcatgcgaaggtgaagagtggtattgcttgtagcagaccataagacaggacaattaaactaagctcaagagctaaggaggaaggttccagagcggtctttcctttcattctgatggtgtttctctcccctctgtaccaccagaacaatgttccatgtgccttcgaacatgaaggatgacattacataacactaatatgtattacatttaaaagtttaaaatgtttattctcatgtttgctacacacaatgtggacacttgcttggactgacaaagtcttcatatcacctagaaaattataatgaacagggactaattactacaattgtgaataaatccagctattgtgacaggcaaagagaattcatggctctaaatatggacatgtttaatttaatatttgtatactaatcaaattatctttggggatgcatacatttgtttcttttaggaaaaatccatatcctaagaatatcatcaattttccattcattcctaaattgaagcttctatgactttattttttaaattgcttaaaatccttcaagacatctgaaatttctgtgactttaaaaacacatgtatcggccgggtgcagtggctcacacctgtaatcccagcactttgggagactgaggtgggtggatcacttgaggtcaggtgttcgagatcatcctggccaacatggtgaaaccccatctctactaaaaatacaaaaacagccgggtgtggtggcacatgcctgtagaccctgctactaaggaggctgaggcaggataattgcttgaacccaagaggcaaaggttgcagtgagccaagatcgtgccactgcactacagcttgggggacagagcaggaatccgtctcaaaacaaacaaacaaaaaaacacatatatcaaacctctattttatcattcaaggctttgcactgtttttgcacacaaaatttaaaagacttgtccgtactttaaagatattcataatctgtgaccttaggatgaaggattataaagaaaggcatagatgaaaaattgtgtccaaaaatatcctttgtagtattactcatgactgcataatgttagagataaattaacctaataatgagagtctggcaagtcaatttgatagattattgtgatggaagctattttaaaatgttttcgacaatattgaattacattagaaaaatgctagtactctagtgtacaaagcaggatacgctgtgcacatccacatacaggaatagaaactgattcacacaagtgccagtaatgactatttctgggttacaaaacaggatgatcacttcattctttgtgactttctatatttaccaagtgattttgtaaataattagtagatactcattttatattcagaagtagctaaatgtatttaaaagagcaataattggacttcatcagcatggcaagtatagttttctgctttccaaatatctctagaattctgggaatagtatctctccatctaaattttgaattttgggtgtttggagattttattgttgttgttgttgttgttttgtacaatggacccaaatggaggcccaattgctagtaagatcaggtcagcaccaggacagatactggttgttgctctgccttagaaggcctccaagtcttgctaacatctggatatcaggagttcagctcattgctcta

SEQ ID NO: 585800 - DNA, 4001 bp, Homo sapiens
actggcatggttgatatgtacttagagacactggaataattattaacctatttgcaaacaattgagaacatgtaacagtgtcagaacccttccctttaaggagatatacctctaaaaaaaaattgtgaattctagtgccaaagttgtaagtagacacagaaaaatgaattgaaattaagttaaaggaaaatgttatattaaaaaaaattacttgacacagtataggttgaatttgagaaaaaaataaataatgtaaatattatggtatacgcataagcaaaaaaacaggtttttccctttttttaagtctagaactcatgattttattataatggtcgttagattgctcttagattctcctaatatccagcctgtcttgcttcatctctgttagcccagagtcctagtttactcagagtaaatgttacacctagatcaaagagcatgaacctgcagtgggaggatattcaaggactgaattctgctctgccattcccaaattgagtaaaccaggtaaagtttcaaaaactcttagggctttcactgtttcataggaagaattgggataatgttacttcactgggcagtttggagtgaaaacaaaagtatgagacatgcctcgtaaattgcaaagtgttatatgttgtataatattctagatactagcaacagcaataataataaacagtcacaatattggcagtctagccctctcagatccataaatacaggcctacagcaaatgaaatgtatttctataaaagtgcctttgattggttgttaaattggttttaaatgtttcttttttaaagtggattcttctggcctggaatcctcaagatgagtggggaggagttcaccagaaaacatagaagcaattccttcagtgttagaaaaactgagggccctctcatcatctgcctatctttctgagaaattggtgctgaccacaatgtccctgggtgccttttcttagctgtacaatgagggcaacaagctaggtgatctctacaagcgtacaattttcttgccttcagtcttattcataactttggtcatgttctccttttcttttattattattatttttttgagacagagtcttactctgtcacctaggctggagtgcagtggtatgatctcaactactgcaacctctacgtcctgggttcaagcaattctcctgcctcagccttctgaatagctggcacgcgcactatgcatgcgcataggtgcacgcgccgctacgccctgctaatttttgtatttttagtggagacagggtttcaccatgttggccaggctggtctcaaactcctgacctcaagtgatctgcccgcctcagcctgccaaagtgctgggattacaggcgtgagccaccaggcccggccatgttctccttttcctgagagaccatttcaaattcatatagaagtctgaaaagactcgttagccacagtcccaaacacaaatcttgtcagttctgatcagtatttcattccacagccaatcccagtctgactaatcacagcatcacagttaatactcacagcgtccttggagaaatgaccattgtccacagtgtccattggtaccagtggcttctcaagccttgccctagggtcttcattgaatcagttatctttttcagagagtctcttcattttggaattaggcaatattaccagatggagatccttatgttgctgttaatgtcttttctctgacttctcctaaaactgttccctccccttaatggacctttggtaagttagtaataatccttctacccaaaaagaagaaaagcacttaccttcaccattaaaccagtattttaagccctagactataaggctaacttggaaaaggagggagttttctgtcccttcttccctttcaaatacttttgcagatttttacagggataaatagtgagccacgtggcagtcagacggcaacaggtttggccccactttctcagaaagcctcggcttggttttgccgcttaatttttaacttcattttcaagttctcactgttagagtatctcaaaagatgtcatcgtgtgtttctgctttgaactgtgcatacaaccattcagtcaacaagcctttttttctgaaagcaagggggcatggtgtggaggaaagggcagggctcctgaaatcagtgatggagtcagacccatattcacttcctagtgttttccctgagcttggacaagtcactgaacctctttgaattggcttccgctttagtaaagcaaggattgtgttactgtactcatggggttattgaacaaatgaaatacatattctaattggtagtagctcctcaataaatgaggtgttcattcctcttcaggagttcagttaagtcagctagattttccatatgcatttggtgcccacagcctaatgaatgtgaactgtgactgccctggcaacttcccaggaagctgccttgtacccctccttcctgtttcatatcatccatgtcttccctaatccattttctgcttggctcccgactcttggaattgtgtcctatttgtaatcattaattttgagactgtggttgctattggatcttcctagtgtgacgcaacccttataaaatgaaatgagagccttccctctctggcttatcagcttcagacttccttaattgagttccgccatcctagtgagtctcaccatactcccgaaataacctgctggagtaggcttatcctactcaactcctcagatctctgtatttaattctattttattgctgttgtagtaaattaccacaactgtgatggcttgaaacaacacaaaattatttatttatttacaattctaaaggtcagaagtccaaaatgggtttcactgagccaaaatcaaggtattggcaaggttgtgccccctccagaggctttaggggaaaatccatttctttttcttttcagcttgtagtgaccactgcattttttggctcttggcctttcctccaccttaaagccagcagtgtaacatcttgaagtatttttctcttattctgactcttctgcctgtctcttataaggacccttgtgattacactagggcccatctgcaaaattcaggaaaatctgcccatctcaaaattcttaacttattaaacatgtaaagtcccttttgtcatataaggtaatatatttacaggttctggggattaggacatggatatctttggaggacaacattcagcctacccttttgagggatagaggggtagcaggaagagttgaaacaattccttcctttctttatttaaaaattctggttattgatttattatagttatcatgtgcctgataagccaatgaaaatagttataatggccaggggcagtggctcatgcctgtaatcccaggactttgggaggctgaggcaggagaatcgcataagcccaggaatccaagaccagccttagcaacatagggagatcccgtctccacaaaaaaatgcaaaaattagcttgatgttgtggcacatgcctatagtcccagctactcaggaggattgcttgagccctggagttcaaggctgcagtgagctgagattgcaccactgcactccagcctaggcaatagagcaagaccctgtcagaaagaaaaagaaagaaagaaagaaagaaagaaagaaagaaagaaagaaagagagagagagaaagaaagaaagagaaagagagaaagaaagaaagagagaaagagaagaaaggagaactttcttggcttaatttacccaaaaggtatgatattttcttaatttgcataaggcagagcatgagctgataccagttctggtagaaaaagtaggtgagactggatcccccaaacaagagtaaatatttaatataataaggaaagagtggccgaaagtattcaatgccacaagtaagattcagagtagatttttcaaactgcataatttgtttaaaaagcataattttatagctggattttgcaagctctc

SEQ ID NO: 585801 - DNA, 4001 bp, Homo sapiens
gtgctattgcacatctctccccaactctgaattcagtaatgtcatgatggtagcttggaattggccataatacgagctttaacgccaaaaaaaaaaaaaaaaaggcaaaggctacaaatttgggcttaatttattgttttatggacttcttgggcttaagaaatttatcaaacaatgttcatctaagtgtgtgtgtctgtgtgtgtgggtgtgtttgtatgtatacacactacatatctatatccacaaagacacaaagacacacacttacataaacatatagaaatagatatgtagtatgtatactacattcattactatatatatgtatattttatacatatatatatatttatatatataatgaatgcttttcaggcatgaaaaccctgaaacatgagtcagacttcacttcccactgatttcctttgcaatgatgtgacctcttctgcaaagcatgggtactcttgctaagatgacatccttcatacccagccctgcatctgcattgccactgcctctattcatcagtatcatctccagtctccacagacaggtcaacgtcccctgattccataccgatcttcccatttgtctcctgacttttgaaaatattaatactttttaaagctatctaaggtttcacatgacagtctaccacctgcacacagcttgtaccaacaccctatctctaagtgaaccaggatgtcacatcttctcctgccagcaggtgtggtctacccacctcaccatgacagacacctactgccatggtaacctcaaaacatttcactgacttaaaaagctggattcaagctctgctgacccttcccacaccctggggctataactagaggaaagagaagtaatctagagggaaatcccaaggcacccacaggtgagccaagaacaggctcaagtagcacaacatagaaaatgcactctcattatcttctcttaaatgtgcccttccaatcagtcttatagcctgtctacaccttggctttactcaagtaaatcccttttgttttaacagctctctttattttccactaaaaagctatgctggttatctgggtcagaaactatatattgcactctgagaagtttctggtccaaagcagtgttcatagagaaccacattgaggatcagctttcagtagagatggttagtttaaaggcagggagtgttctaacagcatcttcccacacatctgtgaagttgcagctgccacaaaaagttgtaccttctccattctggccttgaggactccctgattccctccttcccactgccctcagcccacctaccatcttctgctgactctggtgactgtcccattgcctcatctctccatttcctcttctatccctagccattttagtttggttaaatttcacaccaactcactggatcttgatgcagcatttctccagatgctttcttggaccagagccaccctagccattggtataatagaaataattattattgccactcttataaattactgcaccagccagtctacatcaatcccagatggagatattactgaccctcttcctccaggtcacccagttggtaaatgaaagagatgatatttgttcagaagccagtttgacctgcaaaattttgcttttaaacacctcgcaagagtgcctatttcttggaattatcttccatagctgctactgtctccactagctagtttcaaagcatatggatgatcagatacaaagcttcagcttcctgccacttctccctcacttttgtcagtcttgttaatatggatttttacatttttcatttttatttttatcatatgaggaaacttggggttggggagtatataaaaattgtccattgctatacagaaaagagttttggaggtcttcatctcaataccaagagaagtgacttaccgacttaatgtctgtggaagggcttcaagttgaacccagcgtttcctccaagcttactcccttggactttttggagcagagagatgaggattctttgccaccctagggcttaagttgctaatcattaataaaagtcatcaaactacaaagttgactcagaagggcttcttgccaaataggctttgaagaagcattcggaaatccagcccaatcccctctgcagttctttctgctttttggctgatgtaagcttctccaccttccccttgtgagtgtctcctcaggacctcataggtgtcctctggttcagacacttgcatatagctattttgctttgctttgtggtgtcttcaatgtctttagtcttttttgaaaaggttaaaaagagataaattataattaaagagttcagtatttttgtgttttttactttgctatttttgattttcccccttaattgaaattttgttaatttttttcttctttgaaatatgtgaattgtaatattatgggtaaacttgaacttcattcactctgttgctttctctttccctgggtccttgtccttttctcagcaaaccaaaccaaaccaaaccaaacaagcctggcataaatataatatgatttctccatttttttctattcttactatttatatgagtattcacaaactatatgtaataatgctttgtattatttctaaatttgcacacatgctatcatgtagcatttatgggccattctgtaaccactttggaaaataagtggcataaatttggcatacctacatgtgcacagtgaaggccaaactctttcagtttcttgtggttaactcttgcgctaacacccaggaagtcaaaagcactgtcactgctttccaagaatgtgtatagttctgcttgtccttgtctcatagatgaggcaaagccttcagactcctagctttctgtagtttatttccagctctctgaatgccttgggttcataatccagactcctttctttatatgagcattagagtcagccatggaaatttacaccttgttctgtgctttaatggctttcctggccttagctcatactcatcactttgactttaaatcccttcttactttatggccctgaggagatctcctttagattctaagtttgactctttatacctatttgaactgtattgtgagaggagagtgagtaaactacctctcaacaccctggctgagaagtgggagcctggcagtatatatcacagatcaagaattcagaaggaggaacccgggtcctggggagtcagagctaccatttactgcgcatttattacatgtcatcctcacaatgctttcaggtaagttttattatattctttataacataaaagaaaaaaaacagatttcttccatctgcactttaagaatttaagtatggaaaatttaagcccgttatcgtgtgggggtagtgtcaatttcacctttctaggtaaaagatttttccctgagtcatttctgaaggactctggaccctgggataaataatgatcaactttgggattcacatatcacaggaaatgtttctgaccctgaattatccaagtcagaaaacgttacttggttttgcaatttaatgtttaactttatttaaagtgctcctgagttctttacatgctacttggtttgacttggtagaaatagacccaaattgtctctgtgtagaaagaataacaattcagcttttcttcacctctatgattaaacacttgaatatgaattgagatatttccttgacttaggttgtaatatccatctcttttaaaaaaagaattttacattttccttttgaataagatttatttttaaactgctttgttttagccatggggatcatcagaaaagatagagtacacatttctcctttaacagttatctttagccaggcgtggtgcttcacgcctgtaatcccagtgctttgggtggccaaggccagaggattacttgaggccaggagtttgagacaagcatgggcaacagtgagacctcctctctacaaattttttttagaaaattggctggagatggaggacg

SEQ ID NO: 585802 - DNA, 4001 bp, Homo sapiens
ccttttacttattataaccagaaatcaattgccagttttttcagtaacaggcgataatggttttgctggcgttaatgagagcagtgggaacagacagccgagggtgaagggaggacagtgctgttgtggggacagcgtgatgcaggcacagacagtacacctgcgagaaagttacatcccaggaggggcacatatgaaaagaaagaagtaagaatgccacatggtatgaaaaaaacaagagtagcattgacagcaactaggtcattagcatcaggagaggagggcaagcactctgcctagtctaaccacttacctagtgtggttgtgtgaaatggttatatttgagctgaaacgggaacactgagaaggagacagcgctgagcaagaacaattccaggcagaggaaccagcaagtttgtcacgtttttctaggcagaaggtagtccaacatggcgatgcagagtgaatgaggaggttaatggtaggagatgagatcaaaggggtgggcaggatggtctcgatctcccaaaatggccagaccattttgggtcctataggcctggtaaggggactggatctactatggccactgtgtggcacatgggctgtaaaggacaagattgagaaccaagagactgaacaagaagttgtttcttcacctgtacaagtgttgatggtggatgggctaggctagttgtggtgaaaaagaccacattcaggacctgttttggagatatgccactaagacttgctaatgaggtgtatatgggaatgagagaaagggaagaatcatcagagacttctagacttacggcttgagcaaatgagtgaatagtgttgcactcaaagaagttggcgaaatgagcagggagggcaacaggttccagaggaaaagcaagaactttattttggacacttggggttgagactcctgttagacccagaagggaagattgacaggtaagttttgtgtctgtgagtccatagctaagaacagaagggcctttgtagaaatataaatgtgtgagtcatcagccttatctatttattttgaaaccaggtaaatgaggaaaaaacagcaaagaaatggagccagccattcttatatcaatttctcatcagtttttcttgccaagactgcttgtgtctgttctttttggattcatatgcaccctgttcctctgctagttatcagtccactgtagaatgagacttttccttaaggtgctgggcagagctattaacagctcaaatgtcatcttaggtggtctcagcactgaacatttttcctccttatgagaaacagcccatggctcttattcacagtttgcaaataaagtcctctgccctaaactcttcatcattaactacttcccaaagccatattagatttcatttattttgctttcccataaattcgctggaaccaaaccagaaccgtttggttttcattaattttttaggcatgatgaaaatcttcctctctgagaattcagtattggcatttattgtctcactgtggatttgatcaatgcttaaaaaaattaatgtacttcacaaaaacaatccaaatatatcatttagtttctgtctcttcctctctctctttcttcctctgtgtgtgtgtgtgtgtgtgtgtgtgtgtgtgtgtatgtgtgtgtgtctgtctgtctgtctctgttcagctatacttttagaaaatttcattctcttgaattaattccctgtagttccagggctcttaatgcaacatcccttctcacttaccagaattatctcaggacacaggcattctcttctccactcccacaatctctgcccctaaacagcaaattaagctgctctctaacagaaacagacccattcccatcatctcaaaagcagaatattaagggtaaaagtttgaaagctaactaacctgagggaggaagagtgcaggatcctcattcctttcaaataaatattctaagctctttgcaattgtctaattctgggaggtaaataattacccaaaacctttagcccttatgttaccagcttggagaattttattggcccagtggtttaatttttaactttacattttattgtttgattgataatcaaatcaagctcattaaatcttcctcatgcttcaagcccagctgaggtcacctatgtcttccctcatccttaatcagaatcaatgtcccttcttataaggatcctgacaccccacatgtttcactgacagcactatccccttctggggtctctcagagttattataatcttcatggagatggggtatattttgccccttttgagtcccttttccaccatcctgctgtttaatagaactgagctttccaaagaggagagacttaatacattttggtcgacttgagtgatttttatggttttctgattgtaattttttgcacaaaggccattgagttttccatgaaaattaactctgtgattctcctcccttttatggcaaaacatttcagaagactcatacatatttgcattctggttccccacctctagttttctcatgaatccatcagcaacaagacagcccttagcaaagccatcaccagcctctctgccagcaaatccagtggtcacatcccaggccccatctgtcagtgcttgacagattccaccactcgttccttcttgatgccttgtttcatttaattcattcagatctgattttcctcgtgtctcattggttgttccttgtcaatacgttttgctgaatccttatcttttctctggtttctaatgttgatatgcctaagactctgtccttgaacttcctccctatctaaactcactcccaaggagatctcagccagtcccctttcctttcacacccaattctgacctcttctctgagcttcgacttcaacttcatccatctctccttgagtacccattaggtatctcagtcttatgactgcaagcagaactgaatctccctccaaccctactcctggcccaggatcccccatcttggttaatggcattaccatttccctgttaatcttgccaaaaaaaagtcagccttcattctatactttccatcaacattaattccaacagtatgttctatcagttccaccttcatctctttccattattttttattttctccattcctatcacaatcatctatcaccagggtaaataaaatgattatttaccgggccccactgtttccattctctctcttttaatccaccccacatagcaggcagaatgttggaaatgtacatatgatcatgttacttactggtgtaaaagtcttccaaagccttcccagagaacctaggagaaaagagagcaaattcaccttcctgaaggtgctccaacaccttacatcaccttggacacaccaaccttactgacctctgccctgctgtccttccctcactaaattccaactagttctgccttgtccatgaagttcaaggcctttacacttgcagttcctcctgtcagtgatgcccaattccccaagatgattgccaagtgttttaccaatgttgttagaaaagtaaaacacttgaaaatagattttccaagaagcctctaatatggtcttgattttgtgtcagcctaggctaacttgcatatttgtgtcttagttttaataaatcttttttaatttttaaaaattaaaaatagatcaaagcttatagaataagggtataaagaaaatgtttggtgttttttttttgtttttttttgtttttttgagacggagtctcagactgttgcccaggctggactgcagtggcgtgatctcggctcactgcaagctctgtctcccgggttcacgccattctcctgcctcagcctcccgagtagctgggactacaggcgcctgccaccacgcccagctaattttttgtatttttagtagagacggggtttcactgtgttagccaggatggtctcgatctcctgaccttgtgatccgcccacctcagcctcgcaaagtgctggga

SEQ ID NO: 585803 - DNA, 4001 bp, Homo sapiens
tacatgggggctcattatatacttctcttaattgccatatatgctccttctctataaaacttatcatattctaaatagcaaaaacagtatgttactattatttccacttcacttgctctccagtgggtatgtaaagagggaaaataaaaaaggaaatggttgtaacaaacgtagccacctaaagccaggaaggacagggccagtaccataagatccatacactcaacacatgaatcaagtagggattgtttttaaaagggatgctataagctacttttttaaaaatcaactttattgaagtataatttacgtgataaatgtatacatttgtccatctcaatctttattgagatgtataacttttctatccacatctctgctaacatttggtattatcagccttttggattttagctattctagtgggtgtatagtgcctcgttgtaattttaatctgcattttcctgagaataatgtttaacatttgtgctaaattttgattatacatatacatatttttcaattgtaacaatgtaataatctctggcaaatatctttattataacttttatttctgtatttctatattattttatgaggaatattatacaatttgaacactacaagccacagaaaatgatcagtttatggaactaagtccgacttccaggtaaaacgtaactatggtatggtatttacagtttgtgttgactaaaataagctcccggctgccagatggagctataaggttgccacctctactgccaccatctggtaacattaaaaacaaataaaaatatagaaactatacaattctgggttagccaaagtcaaatttccaacacaactctttctcacgcacagatctttgaaactatagaatgcattcaaactgatttgttctttagttttcgttacttttaaataaactatattacaaaagtgtcaaatagcaaaatattttaattttctcaaattcagggaagatgctttatgacgtacctgcttttcgatttgttccaagacctttggcaaattactttagaactccataggtatcttgaggataactgaaccttttcctaacttaaatcatagactgccagacggaaaaaaaatgtcctcgatgtttttagtctcttactgcacaatgtcaagatatcagctgggttatacaatagttgccctctgcatactcacaaatgttaactccagtccttttttgtcttccctccccgcctaagaagctaccaggtcacatgctggcggatacgcagtggcggaaacctagcggtgacagggaaggacagccctctgcctactgatctgcaggtttctcctccagtttgctcttacaccggggtcctccgctcggaccttagcccattcatttgatgattctctcccagttcgttcttccactgggtcccttgctcagcactacccaaaataaccaccagctcagcgccggctgcaccgccgctcccccgcccccgcccccgcccccgcccccgcccggtggggctgcacctgccgaggccccggctcggctccgcgatcacggtcgcggcccccggggttcccgaggggcttctgcgcaccgaggcaggcgggactgagcggcactctgaacgggctcccctcttaatgtcccctcgcgcctgagcagctccggtcccgccggcgcagggtgcgggtacccgggccatgccggcccagagaccgccgcccccggtaccgctgcccactcgaagcccctggacgaccccgccgcttaccggcttcggcccgtggggcgcccggtagaagaggcgtgcggtccgtgctctcctcgccatcgttccgggccaggtctcgaaccggagacctcatgacgcctacgtgagcaggtgtactcgccacctggcagagaagggagcgccggcccgacagcccgaagcccccgggccgagctggctggaccgggcggggcgggggcgatgacaccgccccgcggccacgtctagtccccgcggtcccgcccagaggcggccgcgccgactccgcccccgccgccatcttaggtgtgggcaactctggcttgggttggactagggaagcggagttctgggagttctcgtaggattggcgcaaagtgagcccgctccgcccgccggtctacgcatgccggggagccggtgttcggacgaccgtctcccgctcctgcacccccttgtaaagtgcaggggccaccctgcccgcagcgaggatgagtgggggcttgcgggcgggcagtggggacttgaattgcacataattaaggggagggcttcgaccgaactagggaagtgggtggtgtgcatttcacaacttgacattcgcttgttagcggtcagttgccatactgttagcaacctttgtacgatctacctcgtgactgtggcggcatatttacctcgtgactgtggcggcatattgtccctaaaatagcttttttttttttttttttttctcccaggcagggtcttgctctgttgcccaagctggaatgcagtggcgcaatcgcagctcactgcaacctccaactcctggactcaagcgattctcttcagctcccccaagtagctgggactacaggagcatgccaccacatctggctaattttgtttctactttttatttttgtagaggcttggtcttattatattgcccaagctggtttcgaactcctgggctcaagcaatcctcctcggcctcccaaagtgctgggattacaggcgtgagccactgctcctggtcctaaaatagcttttaggcggaaaaacagcaatggaaatttgttgagtcctatgatgttgctggttttataggtaaaagtaatcaacataggtagtttcatatggttcgacctatggaatcctctgatgtatgtgtgcatgctttatctccacgatagaatttggatagattgtgctagcatttgcggactctgaaagtgaaactaggaaaacccagcttgccttggcagggcagatctggatccgccaataaaggctgtctctgtggaggtagaaaataagatgtagatgctctcggagagtttggtgtagacagggaagacccacaagccactaattcagtaaaccaggttagaagcttagtgaggttcacgtgagaacaaaggggagggtcctttacctagaagggagggcgaggatttctgtaggcatccctacctccagatcagtaaatgctagaaaagttctcaagttaaagcagcaaatcaagccttgtttctgagttactgaattaccatgtagatttttacactctctaagggttgtagaaaaatgcaattttcaaactggattatgcagagtcacctggcaaatccttttaaaatgtagattcagattcagcagatctggtgtgatggttaattttatgtgttaacttgctggttgtctttggatgaggttaacactaaaatcattgaactctgggtaaagatggctgccttccataatctgggtgggcttccttcaatcagttgaaggcctatctagaataaaaaatccgactcccccacttctcttgcccaagcaagggagacttctccagcagagtgtcctcagacttcatctgcaccacaggtcctcctgggtctccaggcatgtgcaccatcatctgttttgggtcgagttggccagcctatattgtgaaagccaaaactttattacccaaactacccaattggggctgtttctctgagaagcccagtacatctgggatgtgcctgagattctgtattgctaacaagctcccagatgaccaaggttatagataacttgggccagggaatatagttgcaacagacttgaaagacttcaaaccagaggaattcttttttttaatattttttattttagaaattttaggtttacataaacgttgcaaagatagtacagtgagttctccataccctttgcttagtttgacctattattaagatcttacattag

SEQ ID NO: 585804 - DNA, 4001 bp, Homo sapiens
gagaaaatagttactgtcttaacacagacctattgcagtaacatttgaatctcagttattcagtgcactcctttgtttcagttgcagaaaccaaataaagattaatcagactacatggtaagaaaagtaattctcagaagatcaactacttttaggtgaattacctcccaagaagatgttctttttgactggattttttttcctggtatcaggcattctataagaagtattctattggctggagttctatacaccatctgtcctatatgcagatttttacattttatatactataaaataaaataattcaaaaggcttttaaaaaacaaacaaacaaaaaaacagaggtcctaaggatttaaaaatgtcttacctctttggggaaaaacggtccaagtatagaatagcacatcatggaacctaagttcaccgaagctgccgatatcagtacaaaaacctgttctctcgaaagccacccgggggtctctcctgcacttcctgcaggatcatcaccttgaatgcaaacatgcagcaattaggcatataattgagactactgattaaagtacacaaatgtgatttctgtgcacatatgttgcactctgaagatatcatttgctaagcttagggctattttgaatatagcacatttgatcaaatggaacacaatccttgtacattactgccgttttgaaaacgtactgctttcggctgggcacggtggctcacgcctgtaatcccagaactttgggaggccgaggcaggcggatcacgaggtcaggagatcgagaccatcctggctaacacggtgaaaccccgtctctactaaaaatacaaaaaattagccgggcgtggtggcgggcccctgtatcccagctactcgggaggctgaggcaggagaatggcgtgaacccgggaggcggagcttgcagtgagccaagatcgcaccactgcactccagcctgggctacagagagagactccgtctcaaaaaagcaaaacaaaacaaacaaacaaaaacaaaaacaaaaacaaaaaacaaagatttctaaggcagtattgaagtcaaatgaagtgtaagtaggagaaaacaagctaaatcattcagctggtgaattaatatttacagcggtatgcttctggatagacaagtcccacaaattcataaataaatactttttttttaccctaattactggtcttttacatcagttaatttaacacttatttccagggctaaattgtcatttaaaaacacgaaatcaattactgagttccaaatatccaagcaaatccatcagccatttataaattaaattgtttttaggaaaaacttaagagaaatacatttgctttgctctatttgtcagaggttgccattgcagtccagaaggaaaaaaaaaatcagtgcaacatgaggaagtcttacgaatctttgtaaaatgtttgtagtagatgagaaagggaaatgaaagttaaaaagaaaggcaacaacaatgggtacttgaaaggtaacgttttacatttgcctaatggcatacttatttgaatgcattaaacacacagtacttaaaaagcagaggtataggttagaaagtcattagaaaccgtgacacatatccaatcctggaactttaccccgtccagagagaaaagaaacgctggcccgaaccccacgatcaggccccagccttttccaatctctcggaaacagatcaagctataagcaattcaatcgttgctaaagagacacgccggaagccgccgctggtctccgggctcccggccacgcaattcatggtcacctcctggtgcgcgtggtccctccaggtcacccagcgcctccatccccggtgcgtggactccggcgccccagctcccggcttcaagccacgtccttggactcgacctccaaggagccactggcactctggcgggcggccgctgctcagctggaacctggcatccccgactccctgcaggcagcgatccgcccggcccggagctccccaaagccttccaggactctgggtccccgggaggaggccgggggcggggcaggggtggagcaaggctccttttttttttgttttgcgccccccccccgcctcattatcttaatccaccacctcagctgctatatcatggtgtcctttttcattctgtgacagagagtgaaaaaagatgagtctatattccatacagctgtacccccctcaatcttaaaataagttcaatttattcctacgaaacgaaagaaaggaagcttatgtagacacagaaaaggcagggagtacctcaactgaaagacacaaaagtgaattagaaaattaggttatacaggaactttgaaagagtgaattatttttcacagtgggtaaatgcggtagtgttcgtaattactgaagccagacactattgaaccggaaatgaattaacctatgtgaagcacctggagtcgaaaaatatttgcaagaatactaatgaatatcgaggaagcatggcgaagtggctaggagtgcgacctctggaggcaggtgccagggattcaagccagggcacttgctggcagtgtgtaactttggatgacaaggtcagtttctctacctgtacaactgagattataatgtttatctcgtagggcggctgtgagcattggcgataaagtgtgttagtagttagcacatgaacatgatggctgctaccttactctcacactcacagttttcttgcataaaaaataggtttcacttattttcaccgtatttactatttgggaagtgttaaagctcgaggactggctggacacggtggctcatgcctgtaatcccagcagtttgggaggccgaggtgggcagctcacctgaggtcaggagttctagaccagcccggccaacatggtgaaaccctgtctctactataaaaatacaaaaaaatcagccaggcgtggtggcaggcacctgtaatcccagctactagggaggctgaggcaggagaatcgtttgaacctgggaggcggaggttacagtgagccaagatccaaaagaattgtgtgagggtagctttatcgactgagaatctgcctcagatccactgtacaaggtcagttccagtacacagtatggctgatagtaagtttgtaattactgtgccacctcattccagcctgggtgaaaaagcgaaactctgtctcaaataaataaataaagtttaaggactgggaaattcttgttttgaagccaaagcaaaacaaaagactgagttaccactttgtgccaggcattatgaatttaaagaggaatgagccccatccagactctgccctcaagtagcacaccttctagcagatgaaattcacactaattaataatctactataatgcaatcggttgtatacaaacatattggaagaaccatttactttggcaaatgggtcctggatgacttcctgaggaagtgatgttaccttggttcttgaaggttatgtaaaaactccccagtgagggccgggcgcggtggctcacgcctgtaatcccagcactttgggaggccgaggtgggcgggtcacgaggtcagaagttcgagacctgcctgaccaacacggtgaaaccccgtctctacaaaaatacaaaaattagctgggcatgatggcacccagctactcaggagactgaggcaggagaatcgcttgaacctgggactcggaggttgcagtgagcagagatcatgccattgcactccagcctgggcaaccgagcgagactccatctcaaaaaaaaaaaaaaaaaaattccccagtgggcaagttgtaaaggagaacctagagaaccactctgaacagaaagttccactctaagccaggtgctgtggctcacgcctgtaatcctagcactttgggaggccgaggcaggcaaatcacctgaggtcgagagtttgagaccaggctgaccaacatggagaaaccctgtctctactaaaaatacaaaattagctgggcatgg

SEQ ID NO: 585805 - DNA, 4001 bp, Homo sapiens
ttgccatcctcttcccctctcagtccccacaagactgcagactccttgagggacctcacaatcttcttctgcatctcccctgcggcatcacacccagtgccagaatagagggagtatgccgaacatactgggtggatgtctgactggaggaatgatcacatctgatctcctcaaagcagagtatgtctcagtcccagagagcaaacacatcctcatcctggtctgcttctagattcccagtgggaatgtcagatggttggagatccctggaaggtgggctgcctaacttgtcatccattgttggaggatgccttggagacaagatgtctcttcagcatcgtaaagccagttgcaccggcacctgctctgctccaggcaagcaggtagagcaatgctcaggcccagaggggagggaccctaagctttcctccagtaatagccctaaatgtgtcaccgctgataccactcaggaaagggaaaagaggaagaacagagacccaagaagtccggagagcttgggcgagggtagtgggggcagacaagtgggcaggaccagaggcagggagggcccagttacctcttatttcagggaagcagtgcctgcaccaaaaccacgccactgctcgttactaacagaaggcccctgacgggctttggcccacagcttctccaacccaccaagcatccacacttgttaccgtgcaatagtttcaaaagggctcatgatgggaaaaaaatgtggtgacactttttactaaaggattctcaaagcaaaatgctcaaataaccaagtaaactactcaagcaaggcccttttgaggccatcgccctatcccatgggccccatcggactgcacggtgtgactcagtttggatttgctcagtgctttcacagatcccagctgaagctcacacccctatgaggcagccgtcatcatccctggttgactgatgaggaaatgaggcttagagaggcagtgacttacccagtgatgctcagctaataaggggcacagctgggattccaccaaatattctcacttccaagccagggcaattccaggccacctcaacaccatcattgaggtcaatcgtcatcactcttgagcagaaggagggggcccacagtactattggtggggaagcgggacccagagcaagttgatagttctgggagaagccagtggggcaggcagagaggctcctggtctcccagtcaactcccattcaagcaacctggcaacctggcccccgacttgtgctagctgttctctcctgcctcagcttcctcctcaaagacccagagtttgtggtggattaaactagagaagagaatgccccgtgcctgggacacagccagacacccacgaactgcacaataaacatagccccctacctctttcctgatatggaactgaacttcataggatttgctttatatttctccctgtcccaggaactcccatgttacagaggcttttttacctcagtgacgatggaagagccgggcgtgtcatacacccagccatcctggcagggacccagcggcaggtggctcctgttggtggccaggctagccagggggtctacacagctgagggcgctctggttccagtccacttcatagcgcctgcactggccaaggaaggcctcgcccgcgggccccaggcctggcactgtatagttcagctcctccgcagggctccagccacagcgctggctcagctcagccaccccaggactctggcagtggtggtcaggtgtgaaacccaggaagacgatgcccacacagatgggcgcaaaggcagccgacagcaggcataagatgaggaaggcttgcttctggaaccagccagactccccaacctgctccagaatgtcatccacggtgggcatgatggctcagcatgctcatggccgtggccagacctgctctgggctgcagtggccaggtgcaatgtctccctcagagatctttgaaaaggagtggtttgaaatcagtttgctgtccaagtgtgaaacatctggaaggcaaccaagtagaaataatcttttaccctatggtgctggtttcaggaaaaggaagaatgcacgtggccatctgatcaaatcgtttgctttgcccgggagcgagtcagtggggtctaagcccgaagagaattgaagttcagccacagagcaagaagagggcaggagagcaggccgtgcaaacctcctagtagctccctcagggctcttccaaaaagaatatctacttgttttctagatgtgatggtatgaggcaagtattgggtgacagccaggtactagatactgtattcggctaattagttctgtgataccatttaagtattttttttagtttttttttcccataggttttgagggaacaggtattatttggttacatgagcaggttctttagtggtgatttgtgagattttggtgcatccatctcccaagcagtatacactgcacccaatttgggtgttttaagctccacctcttcatttgtgtgtgtgtatacatgtctagatgtgtttacttgtatgtacacttactgttatatgttgtgtctaccaaattggcttataagtaaaagagtgttcataaattaagtaaataagtctaagcaattttcaaattcacttaagtatgactttgctaaataggctgtcttttaaattatcagtaaaatgaaaatagaaatgtcttcaaaatatagacatggtctaaattatgcaagtcagaaactaggttgactaaatgctttaaggtcataaactgctttggcttttgaaaattgttcaactttcctgctttgcagtttggtagggcctgccctagctatgctggaaatagttagacctcatctgcacctaagtacgtaactaaaataacttactgggtatttcaccaaaattaacaattactaagagctaccattataacatgtagtgatgactactgaaaacagatctacacgtgaggtgagtaaggagagtaaaatgtatcattagtaaaataatataagaaggcatgggaatgtaaatttttgcctagttcagagggttaaatgattgttttaaattatataagataaagcttaaggttcaaacaagttatggaaggtttgtaaaaaattaatcttgtaaaaggaatcctgtgtgtaaacatattgactacactaaaaaggatattatttggttttccataagttgaacaatggaatacaagcacaacaaggttttcttgaagcacttacatgctgtttaacaaaaaaaatttgtaaaaggttataaaagatttataacaatctcagttcatgatcaaactgattaagattggatggatttctctgtaaggttttattttttttaattggggttgacattaatagactaatgtaagggtaaaatttggctttcacttgaacaagattttcatgcaatgaaagattttgttttctttgtgaataagctactgacacaagaagggaaggacaagagatcaacaggactccagggtcaatagggctccatagctgaggggaagggagctcagcagcctgacatgctggcgaaagggtaaaagttcttaccagtcagacttttggtttctctctctgtgcaaactggttgcaggaacaataaaaaaatcactatattctctgcccctccatgaattcaactggccatttggcatggctaaagttggataataagagacttaaaaggacttcttaaaaaggagtgcgatggttaaaagttagattgtttggaaaattaggtcttccctcttagtgactgaaggtttttgctttgagtcatttaaatgaatgacttatagtaaccaaaaattctgttaagtgttttgagcctttacagcttcaaaattttctttcctaacccctgagttttggatgctacagaagacacctggagcatcgaaagggagaggtaaacagggttatttgacaagtttagttacataggattacc

SEQ ID NO: 585806 - DNA, 4001 bp, Homo sapiens
cctcaaacccatttgccccctcttcaccgtagtgagctgtcaccatgggtgcgcagctgctccaggcacagacagggagccccatgcagtggatgacagagctgtcccacctgccagggtccttgaatggtctcgtggcacagatcctgctgtgggcagttactggagaggcataaacttccatttgaggaatctgtttgattgggcactttagtcaaacaccaactaatataattacctcagctaatccctaaaaaacacaggggaactaagatgtaagtaccacctacctcattgagttactgtaaggatgagaaactgcatgcagagtcctcatatacacattttcactactcctatttgaaaacatttgtactattattagccccattttacagataagaaagtggtaaataaaatgctcaagaccgtatagttaatgtgtggtagcgccagagtgggaacttagacatccagccttaaaactgatcttttaacctctgtgctattctgcttccagaaggatgaaatgagatcatacataaagagcttggcccagctgaggagccgtcacctaaccgtgctcaggagtgcatcatggttgagagtgtgggctgtggaggtgatgggcatccaatggcatccaattctgccctgctagtattagatttgtgcttaggcagaaaccttggttttctcatctgtgaaaagagggtgatactaccaaccttataaggctgtagtgaagattaaaggaagtaacatgtaccaacggcttatgaccgagccaggcacaaggcagcgttcaatgatgcaagcagaggaagaagggaacagctggggcttcctgcccgtttcctctgtcctaacagctcctttttgcagacactgggaatcaaaaccaaaacgcatgcaaccttccaccttgaagaacagcaccacatcatctctttgctaagcctgattcccgttttctggataggaaactgacacacaaagtatctccagaatcatatcagaggtaagtagcaggccaggatcgagacgcagctccaaatctccggccataacgctgcatggcccctcacccggctacctcccctctcaaaacactctgagtcagatagaggagctctgtccatgagtgaacgaacgaatgaataatttaaattttttaaatcaatttgacaaatgaaaagagggtgtacggaggttaaacgtggttccaccatgcgttggctatgagtccttgaccccgccagcttgtttcccaatcactaaaataaggatttgaacacctcctttgcagggtcccggtgaacatcaaatgaagaactatgtgtaagcgccaggtacagtgtacctggcacgtattaggttttaataaacggcaaccaactctgactaacggttgtccctggggaacacctgccaggcacagagggaggccctacggaggcgcagggcagaactgggcagcagccgtctagggaagtggcggcggattagagaaacgggcggccaggcacaggcaccccctacgagtgagatctggcccctcgagccagatctccagccagatgcctccagcatctgctgccgcggagagcacgcaccaggtccctcctgcccggcaacaggcgcactccgagcgagcccagcgcctctgctcaccatgccaggtcccgctgccagaggcctagaggagaagcccagctaggggccggcgtctggacgcccgtgtcccgactgcgcggggtgaggaggaagtggagatgttttcggatcgcgagcgccgcgcgagaaccccgccgcaacggaaagaaacagacccctcggcgccgcctcccgcgtggcgccgcggggcccctcccccatacctgccgaagtgccccacgtggtcataaatcccctcgaagtggcgggaccccatggtgcggccgtgcactgggcgccgagttagccgagctccggggactgcgggtagcgcgccccgccccgaacctccccgcccggcctcctgctctccccgcgcgtcccagtgctcgggaccagcgcgaggctgtattctgttcctccctccgtcgcttggcccctcggtccccccaagtatcttcggcttttttcctgccgcctcggcctccttcccggcgcgctgtggtcccggcgcccgcggtcgcatggtgccctcgcccccagcgccgccgctctcccacccgccccgccgcccaccctggctcttggcaccatgtctgcggggtcgccacgctcgagggaagccccgacgcctgggaaaagttgtcgctgagagagagcccagggtgggaatgcaagggctaggctcggtccgggggccgcaagaatatatagccttcagcatgacgcccctcagaaacatggctctcaaactttaatgcctaagaatctactgcagaacttggtttaaaaggtacatttaaggccgggcgcacttgctcacgcctgtaatcccagcactttgggaggccgaggcgggcggatcacctgaggtcgggagttcaagactagcctgaccaacatggagaaaccccgtctccactaaaaatacaaaattagccgggcgtggtggcacatgcctgtaatcccagctactcgggaggctgaggcagaagaatcgcttgaaccctggagacggaggttgcggtgagccaagatcgtgccattgcactccagcctgaggaacaagagtgaaactccgtctcaaaaaaataaaagtacaattaggccggcgtggtggctcaggcctataatcccagtgctttgggaggccgaggcaggaggattgctggagccaaggagtttgagaccagcctgggcaacgtatagcgacacctcgtctatacaaaaataaaaaataaataaatgtacatttattttgagactccatccctgatgattcaggatgcctggggaacaggaatctgatttttttttttttttttttttttttttttttttttttttttgagacggagtctcgctctgtcgcccaggctggagtgcagtggtgcaatctcggctcactgcaagctccacctcccgggttcaaaccattctcctgcctcagcctcccaagtagcggggaggtgcccgccaccacgtccggctaatattttgtatttttagtagagacggggtttcaccgtgttagccaggatgatttcgatttcctgacgtcgtgatccgaccgccttggcctcccgaaatctgatttttaataagcagaccatggcattccaagccacactttggagtgggcaggggtttggcccatagccaacccaggcagggggtgaccttccttctggaaggtatcaagtgaatgaactttagggaagaaaggtcaattgctggtccacagcgctgaagcagaaaagccagtttccgactatatccacagtgagagttgccttctctagtcagcctggcagtcactggccccactgttggcgtgctattccactctataaggccactaaaccttgagttcctagagaacagggatgcattctcttcgtcactttggtagcctcagttccatagcaaatgccctctctctgaacttctccacctcatccttaaaatctgagcacacctatcgctttctcagagaagtccaacagtttgagggccagggcagagctctaccagagcagagcatcaagagtgggtctgatggctccgagaagcggcaggatcttgcaaggctgtgttgaacattttactttgaccaaaggacaaggagaactccctgtagacagtcttaaagcagaagagtaacaggcgcaaacttgtacttgaataatatttgaaagagaggagagtccatttcccaaagtgcttccctcccctacttgtcacagagcctacaataacaccattaaaaattgacttatttttgttatgcacaatcctatctagacattctcttctgaaacataaatactcttggaaggactaat

SEQ ID NO: 585807 - DNA, 4001 bp, Homo sapiens
ttgctctgtcacccaggctggagtacagtggtgatcatggctcactgcagcctcgacctcctgggctcatgtgatcctcacacctcagcctcccaaaatgctggcattataggcgtgagccactgtgcccagcctcagttttctttacataaccaaaaggcttgcccttccatctggcaatttgtcatgaagctaaaactacagcattggctaaatcagctgaaactgggtaattacttatagacaaatttattttttcctttctaatttcaatgcacatgcagataggtgtgtggacgtgatacaatgcaggcaccaggaggttgggccatttagcatctccctgctgtctgtttaataaaaggggattaggagtgactgctgaaggctgctgcatttgctcttatttggaataagaggaggtggtcgggtggagcaggtgctggaccaggtcaggagacccatcttttagggctaaccctgctaagttattcactgtgtggcctggggaaaaaccttctctgcttggggcctcagtttcctcatctctgtaggaagcaatgagattggccatgtgagagagcctcggagagtttgtggtgtgaagcccatgagctgccacatttcctgtaaatatctgaccactttagacccttcaaattagactctacctacccatctgttcacacagaatatcttcccattgtccaagcagtcattttaaattaaactaggcaactggctctctcagtattttcaggtaacttaattcccctattttgctttgctttcaataaaagcaagctccattttttgtctttttttctattatatttattggaatcaggcttcacaaatagcttttgatgtcatctgtagtttttaacaaaataatagtgccatagcatgatctccagccccaaatgattttatatgaacactttgaggaaattaaagagaaaaaataggtatcgagagaaaagcacatcctatcacacagtcaggcacagttcagttgagttccacgggctttcaggtgtgtgtgggcatctgcgggatggaggaatagagggggaggtaaggcttccagaaaaagaggaggatccacaatatccctatcttggcaacatttccaggagtcctaatatgctttggcctgttccttattgctgggacatgcacaaactagaatcattattgtcagcatctgaggacgttttaactaatccagttattctccagacaaattagaagctgcatgttctcatttggaaactaggattttgtaagatacatgcaggccaaagagatgtccaggcagggtttataagagccgggccttccctgcttgcttccttgagaaaatctccaccatttgcttctccatctgagccctgagctcactctcttacctcggtgacgatggacgagccaggcgtctcgtacacccagccgtcccggcaggggcccagtggcaggcggctcctgttggtgtccaggctggccagggggtccacgcagtcgaaggtgctctggttccagtccacctcgtagcgcctacactgtcttggggaggcttcgcccgcaggtcctgggcccggcaccgtgtagttcagttcctctgcaggactccagccgcagcgcagactcagctcggccactccggggctccggcagcggtggtcaggggtgaagcccaggaagacgatgcccacgtagatgggcgcgaaggtagccgagagcagagccaagaggaaaaacatttgcttctggaaaaagtgaaactcccctccatgctccaggacatcgtccacggtggtgggcatgatcctgcaggcaggagggcccgaggctgcccgacgtgcccggagcgaggctgagagcggctgcagccagctcagcacaaaccctggccagaagtcaaagaggggagtttacctctgcaagtgaccagccttcagggcagggcctttccttggtccagctgacttcaaaggtgcacccctccagcgggggtgcatgtccttctgcacttcccaaatgccctgagctcactcccaggatgcctgtcgtgtttattataactggttctccacaggcttgtcggtgctccacgccagcagcacaaacaacccgccctctgtgtcccaccgcagggaatctgagtgctggcccatatcacagcccagtaatcttcccgtagtgccccgagcagccaggaacttaatatactcctatctcatgcgcaccgccagcttttcttcaaggccctatggagaaaacacacgtgtttggccacaaggcccagcgtgatgtgaaccaggatccgtgtcagaaccctggtccagattcgaagtgggttgcaagcctgactgctgggctcattctccaaccaacaacaagagccgtcgggatgcatgctggggctgcttgttttgatgttgtccagattttataactctgcttttaaaaagtgtttgctccaatctggtattcctgcgtttcaaccctgaagtgtccttccccttaacccatctggagggaaagaggaaagtgtttacgtcgcagacaggtcaagtgtaaatgcaggcaggtgtgtccaagccactatctttgtgtcctagatttttctgtcaaggtctgttggggctcagaaatccatgccccaaggtggaggcctcagaagcaaagtctctctctctgaccttctcctgccctcctgtctcttctctcacccatcattctcccccggggcaagccatagaactgagaatccttcttcctcaaagcagctcgtggaaaccagactcttttctccccaaagccagccagaaagcctagaaataccactgtaacttccccgctgcctttctgtgtaacagtgggccgtaaagaaatccagacccgcattccagaggagtcttgtccccggtgcctggaggaaggagtgctgcacagaggggccaagacggatctgaacagacaggccttgctgggttttcccctcagcctgcgaacatgggctgctgccctttttgtccaactacagttctatactgccatccagttttccctgtatctgtgggtcttcattctgaatgaaggctcctgtgtcatgtaaaacgtgatcaaataaatttgtcatgcttttctcttgttaacctgtcttttgttataggggtgttggccgtgagccttaggataaggaagaaagggatcacccctttctgctctcacacatcaggggcatctctttaggatgatgttgttgcatctaaatgcaagacaaacaggaaatttgtctttcctggtggacaaaaggattcttaatacatcgtgatcctgccaagtagagaaggtggcctgctgacatatctgcaaactaaataccagaaagttaacccgattttccttctccttcttttttctattggatagtcagcaggtgtaatagcgtagtctaaaaggagcgacccacggggtctttctccttgccgcagctgcaggcttcttattttcttaaaaaagcaaaaagcagggcgccggcaaggacatccattgacctccactgcggctgtgttgggcacacagaggcactctgcttcgtggtgccctgggctgctgccagccccgtttgctctgagctgaatgagggggctcagttctgtttagggacttcccattcgcagccagcatcgtgagtgcatgagccggaagccaaggctgctctgtctgcacctgttccccgtcaaagagctgtaggagggcgagttaaagagttaaaaagtgacagaggttgtcaaactttactctaccccaagggccaagagatgctcctgactgcctcttacaagaaatttgcagacacgtgcacttgggtttgactcacttaacatgtcaagacatcagatcttcacgtcatgagcaaggggcacaaggtaagggccagaagagctttgctggccaatgggaaacaatgttgaaatttgctacaaattact

SEQ ID NO: 585808 - DNA, 4001 bp, Homo sapiens
aaacatcccaaacaaaattgctcagggctctgtaaagctgttccctgggaaaagtaggccctcaaaaagtgtgttttgctttttaccaaaagaaatctagaaaaagacatgaagtacaatggaggagaggcagagaagttactgagaaacaaggaagacagactgggaaaggcttggggaaacccttgcctagctctgcagtggtgacaacacactttgtcaacaagggactctgcatttttattttccacggggacctgcgaattatgtagctggccctgactagaagaaatgtttggaaagcaggagactggccctgtgtgaaggcaggggtgggagtgacaattggcaacactgtgttggtgactgtccaacggctccttccaagatccctgggtgatctggagctaatatctaaggccatgtttaattattcctagaagagaagcctcaggaggtatgttcctgctaattccacactcagctcaagtagccagcaggtgagttacatcctgagtctctgggagggaaaagaatactttgtttaaagcatttagtggttaaatcatcaatactcaattaccctcaattaattgccagaaacatctgcctataaccccttccaccccagcttgaagaacagccggaaccatatcctgtcacaccgtttgaaggagtccccagccctgcgtaacctcactccctgctccaaaacctcctttccctcaccccaatccatgctgggaatcagatttgcacccaggaagctggagttggacagagagatgctgacctctgtgttggccgttgcttgaccagggatcacatgagcaaaagcatcaggcgaagccagtttgaagtgggaaccgagctcacttctggagaatgggatgagaagatatagcttctgagtgtcctaaaagacactccccaccccactttgtgatctcagatcccaccttccacctgctgccctgcatctttccaagaaattccttttatattttgttaatgtaatttaaatttgttttagttacttgtagccaaaagagaccgaagagaggtctgacaggatacaataccatgcagatgccatgggtgggcgcgtgctggcggtatcctctcacagcaatggtttattttagaggaatccacttcatgcactcaacagcccctgccctttcccagacaaataggtccctgtcaatctctaaatcacttgtgtggagggagatctgctcatcaatagtgacacaaagaacaaaacaactaaaccccagcctgcagaagattaaggtttctacaatactgaggtcaaagtccatggcatcccataaaatctcagctgcaagtgggaaggggccccagccctttctccagttttcaacttgcccctacgtttgctctctgagctctgctgctatgagctcaaagtcaccaacaactcgtctctcaaattccactctctctgagccatatgttcacgcagcacacccaagccaggctttcaaacacatgcagctcatcttccactcaatggcataaactcagatttctggcctgagaactccaggaggcagtgaagcgccaggcagagccccactctcccggccttggctaaccaggccttggctacccaggaaggtcccctggctttctgatcccggcctctctctgagccctgtggcccggtgacctgttttgttttcaggttggaacttagacacataaaccctgtagagggtgctttttggtggggctcctcccatcaccctggatgcaggcttcctgtctgaagggcatacctggctccgaacatcatcggtttctgggtgaaggcggcagacacctggcagcgcccaaggaataaatcgcccttccaggtgtggccttcagctcctcccccctcaaagtgcttctcagacgactcatcccggtcgtcctcaccccaccaaggggaggaaggaaggcacctgaggcttccagggtgggggctgtttgccaggtacgtgggggtggggcacgcttcccagtgttctgcgtctgtcctcacaatggccctcaaggtcaggcagcactgaccgcattctaccattgaggaaacaggtgcagtaatgctctgggagagagacccatgacaagtggcagagttggggctgcaagccaggcctgccactcttgcccccctttattttttttttttgagacagagtctcactgtgtcccccaggctggagtgcaatggcgccatcttggctcactgcaacttccgcctcccaggttcaagcaattgtcctgcctcagcctcctgagtagctgggattacaggcacgcaccaccatacccagctaatttttgtatttttagtagagaccagggtttcaccatgttggccagctggtctcaaaactcctgacctcaggggatccacctgcctcggcctcccgaagtgctgggattacaggcatgagccactgtgcccggccactcttgcccttttcatgacatcaagttcagatgagttcagacatttatggtgttaacctcataaagtcaaagagcttcaggaggggagagagacgggcatccttccaaccagggtccagtgagggcttggataaggggacagctggttgccgtccttcagatggagactgagctgacctgagggatgagcaggaaccaaggggctgaaggaaggagggaaggggctcgagcaagtggaatagcatgagcaaggcacaaggcagtgagagagaccgggctgggaactattaatatatacaagatgccccctacaacaaggaggggtggcaggggaggagaggaaagacatgtggggctcagggctgagggcacccttgatgggtgctgcagtgatggggagccatggaaggcttcaagcagggaagtgatgtgggcaggtttccatcttattttctgtctctcgggcctgtggtgttaaaagcagcaagacaagatgggggcctggctagccgggactaagaagacagagagtagagaaatctgcccagagaggtgttctgcggaagtccacccatgcaaagccacagctgaactgtccagaaacccaaacatacagcaaccaccattctcaagcacaacgggagggtcacctctgaaaggccagcgccagggagaagtcacaaagggtgggagcccctgccagcccttcccagcccctctcccatggtaagggccactctggggcagaggataaggagaactgaattcaaaccctaataggttggtggctttggacaagccaatggccctccagctcagccttctcatctaaactgaaggcttggactagataatcatattaaacatggccacgcccaggacaatcttttacctagactaagcaattagcaaaggcaaagccagctgaatttgaaggcaaattctagccccatggtttcacatatctgggtctttcagctgtgtggaaacttaattagcatcctcccttgttgagtaggagggccagagaaaatggcagaacacgccaaaggccccgagttttctatcgacagccctgggaacaggctcaggcccccttgtctggcctctgagcttccagtaggacttcccactattcatccccagaacccctgcgcaggccagcatgtctgcttcccaaacaggcccagtttcctccagaacctctggtcaggctgcctttccctgtcaaaagctctcctccctcccctctgcctatgggtggctacagagccccaagtctccatcgtacgtgcggtgtttgggcccaggccctcgtctcactccacatgccctccattgaagccctccattcccaaggcctcacctcagctggctaagggcatctccctggtatctcccgagagtgtctgcctccccgtcagccctgggggagttatcagcatcttctacaggcctcgctggctttctcctgtgcactcagcacagcctcccctccccaccacgcgagatct

SEQ ID NO: 585809 - DNA, 4001 bp, Homo sapiens
tgctgctaaaccaacaaagaaatattgccctccgtgaagggaaaacagtcacagaaacacctttagaaagcagggggtaggaggtgggtgggatcaaggtgaacccagctagaaggaccttccccattaccttgcagggcagcaggggcagctcagtcagacagttcccacaggacagagcatttctggccaggttggtacaagattaaaacaatgattatgatgatgtaagagtttatcttacacatccatgagctacaactgttaaccaatgcacacggggggaggaggttacatgcacattgactatttaaaactgtccaatttcatacatttcgacaaagcatttaaaactctgccagaacagcccagaatgggtagcgggtggggtggaggagagtctgtatttactttaaaatgtgaattaattagtttagacacaaggagcaaaactacaaatgtcttgatatctcttatatgttaagaataaaattacagctgtctaggggcattgagtgtccaccattgcccactctgtgtttaggccttcacacttgtctcacaactcccttctgctacatttcacaccacgcaatacctctgcaagggagctttagctacaggactcagaggacaaggtgcatgtttcagctaaagcacacccccgttctcagtgcctcagcccaaagcagctgctgtgtaagagcggtgacggccggggaacacccaaatgacatattctccgcgtccttcctatactgtagtgatgtttactgaagtgctgagaaaacatgggaggagacactggggtagcaaagcctaaagtcagatatctttggggaggactaagcatcggctgcgggttggggatttgcaggagtctttgcttctctggctctccagttctttagtaggctttacctgtgtcaaaatcaagtgcgagatggaagactattgctttgtgggagacccagggacaactagccgggcagaacagggctgtggtcccgactcccccagcagaccttgaacgacgccagtccgactcctccagagggggctggtgacaggtcagctgcctcgccccgagggtgggggaagggcgcgctttccatccgcgtactgggacaggagtttgggtgcaaactagtaaaggctatggtgctccctttacacccaagtaaaggcatgtggtttgggggacggaaggagattaagccaatgcggaatgccctacacacactctagcaccaccactttggggacttcggttctcccgctggctcgggcttggacctcggtctgcagggagagggttggagggactgggcggctgcggcccttaccttgctgaccacgttctggacgaggccggcgcggatgccgtagtcccatgcgcggcagtcacagttggaggcgttgtcccccttgtccggaggggatggcaggggtggtgtgtcgcctccgtccgcgccgctgctgttgctccggttgcccgcagcctcccagggggcagtggcgaagggggtggtggggaggctggtccagttgcccatgtccccgccccggcctgtggtggtgacccctgccagctcggtgcctttgccggccccgcggcaccagaagttgggctggtccaggaggaacgagtccgagaactggctgaagccgatgaacagcgccgggatccaggtgagcagcacgagggtcttctgatagcccccgcccaggcccccgaggaagggcagcaccgacccgtcatagtccagcaacaagaggctcggggccgcagccgcggagcagcagctcgggtgcgggccgcctccaggatgcagtgggggcagcggctggatctccgcgccgccgccggggcccgcgcgtcccccgaggggcgccgaggccgccgcgtccccgggcggcagggagccgttctcctcggccggggccggctgccgcccaggcccgccgcccgccgcctcgcgccgccggtctatggccatggcccgggcccgcggctcccgcagaggcgcatagagcgcggcggaggctccgcgggcgccccgggcacagcgcgccgggccaggcgcctgcagccgctgccgccgaggagggcccgcggctcgagagagagcgctcggcggctccgggtgcgtcaggccgcccccatgtcacccgccggaccccgcgccccgggcgctgcggccccgctcgggcgccgggcagaggcgggcagaggccggccgggccctcagccgccgcggctcatcagttccgcggcccgggcgccggctgccgagcccgccgctctccgctgctccgcgccggacgcggcaggaggaggagccggcgccgcgcccggcccgcgcccttgccggcggttcagggccctgcgggcggcggtgcgggcaaaggctgctgctcccggggtggccgcgctgtatttctccgacttcgggcgcctcccggaagccgcgagctctggacccagcctgccgagccggccgcgctctccagctcctggagccggccccactcctcctcctcctcctcctcctccccctcctccctgccccccggcccgccccctctccccccgccgaggtggaggtaaccgcggcacctgctgcgctcggctcctgctcgcgagcgccccctccagcccggacgcgcggccgccgccgcccgggatccacgggaggggggcgggggaaacgggacaccccgggcccgcctggctggaggatcccctgcccgttgcccgtttcgcgccgggcggggcgggggaggaggagacgcgcgtagcaggggtcgccggccggcgacgggtcccggcaaagtcggcgtgcgctgagaacgtgtgggccgggtcttctctgaggctgggctcccgcagccgcgcgggccccccacccactccgcgcgcgccaggtctccgtgacctctgtctcttcagaggtgcccggcggtcccgctgcccgcgccccgctcccagtcccaagcccgagggtcttcagccttcgggaacaaccctctgcgctttttccaggagcgaataaggttgatttttgtgtccgtggagcagggtcaaggaggcgcctttgccaatttcaggtcgccagtcccccgcagtgtctggccacctgcgacccgccgcacccactcccaaatcgccatttcttcccccactcctaagtgcatgcgatgtaagcacgatgctgggatatatctccaacacaagttataatacacacagtataaacgtgatggcattccccaccccctccctaagatcttgtattcacgtttggaacgccgtgtgcacaggcgcacacatctatactctcacacaagaagacaaacctctccctcctctcctgctccagcgccaaccttgcccagccagcgctgtataaataacaccagccctgcggcaaacggctacattagcatatttcctcctgcacccagcgcacgcaccaaagagaattatccggcacctttcaacccagcgtccccacattttggaggcatttcatattctgagaagtttattaatggaagtcttaaatggagcaatccatttctagtcttatttggggcaaaaaaaaaaaaaatgtttagctttccaaaaggatatattctaagctccatatactgaatgtattcttttgcattttcattatttgctcagctaaccgctgcacaatttagtggaatacatttttaacctgcagttcagtgttaagggcaacatgtgtttactgcataaaatgctggcacatacgtaccagagaactatttctgaaggctgccggggggcgggtcttgggggacaggggaggttgtggaccttcctgcgtggccgagaaggggtgattagataacaatgggcggaaggggccctaagggctgcaaaagacaccagaccgctgagaaatgggtctggaaaccacatatataaagagctgggggcttggggcggggggggacacgatagtgca

SEQ ID NO: 585810 - DNA, 4001 bp, Homo sapiens
tcccaacacacatatgtattgcctggctgtcttgccaggggggtttatcctgagatcactcagcatagagccactcagtgtgcgaacacacttgcatgtggcattatagaaacaccctgaacacacatacacattgcctggctgtcctgccagggggttttatccctggagcacttagcatagagccatccactgtgcgaacacagcagcacacggcgttacagaaagatcccaaacacatacacacatcgcctggctgtcctgccatgggttttatccctggagcacatagcatagagccatccactgtgcgaacacaccagcacatggcgtataaaacatgtacaattgcaaccaccgacactcccaactgcagcgagataagctcaccagaccaacagcaacagcggcagaaagggcgctcctacctcctcatccagtgttttccccactcttcaagtaggtgattttttaaagtttatcacaaaaaaaagacaaaccttttttcctaatgtacctgatcacattcaatctttttttaaaattaacttaagctgtgattgtagacaaagctcagtaaaactgctcatctctgcaacccatgctcaattgaggccgtttctgagttccgattattacaaagtgactctgctctatatctggacctcacagagaggcaatcttccatttcagcaaggatgcagaaacagattactgagggcaagggtgaaggaagctcccctaacttccaaatgcactgactgcccaaaatgtggggatcgcccccgcccacccgccggcagcagcctccgcctgtaaatgggttggggatttgcgttggaaggctgtggccctcccgctatgttcctaaaatttattaccagaaaaaaaaactaaaatttatccaatacttcagttttcccaacttatcccagatgttgctctttgccccaaagcaattttaccaaaaccattccccgggaaagcctcgacctttgtccccttgcattttgagtaaccatttgggcaactggaaaaaagctgctgctgccttcaaacgttggttcgccctttcctttgaccctggagaccataagcgaatccggaactgccaacgtcgctcaccccagagactgaagttccctatcgcgcacctaaccataatttccaatgacggcgcccgcacacctcaaagataaggaacgcggtgctgggtctttgactcctgagcaggcgtgcgccaggcgtttacaactcggcttcgaagaaagtttttgttcacacccgaaaccaaagtatctgtgcattaactcacgggctcaggcagataacgaaaggcttttcccagcatttacgacgcggcacttccaagggtgcgctgaatcctgtctgtccccagaggtagccgaccggtccccgtctccaccgacctcccctggcggccagcgtctcacacgcggcttgtccgcctgggagccagcatcgtcctctcccgccggcttccaaagggccggggcgcccttacctcgctgacgatggtggagtgggcctgggcgtagcgccagccgccgcggcacggcacaaggggagccgagcggttggggaaggcggcgagtgggtccgcgcagctgagagcgctagtggcggaggcgctgtcgttggccgcctccaggaggtagcgctggcagcggccgcggcgctcggggggctctgggccgcgggaggcgggcgccgtgcggttccactcctcctccgggctccagccgcagcgctcggccagcgccgcggcacttggcccgcggcaccagtagtggtcgggctgcgtgcccaggaagaccacgccgacgaagaggaaggcgaaggtgacgcccgtcaggcacagcagcaaaaacacgcgcctctggaagcgcccgaactcgcccacccgctgcagcgcctcgtcgaaggagggcatggtgcgcccgccgcccgccgcccgcagcccgcgcctcggagtgacccgcggacccagccggcggcctctctttactccgccgcctcccccgcgccacccgcctcactcgccctggcgctgtgccggccgcagccgctcctcctgccccccgcggcccccgcctctcttccccgggcgcccgcagcagccccgggccacaggtcgcgggagggacggccgcgagccggacgcacccggccggggtgggcgcgcggtggggctcgggcggtgcggcctgactacgcgccagggacccggccgggaccgcgagtgacgggcgcagcctccggcctggcgcggagctccttttggtccctgccagcagcctgctctgcagtcagccccaggtcgggctccagaagaagaaagttccagggtcacccgaccactcccggaacttctgggacccgatctctcagcggcccggagtgcagcccggggactaaggacgcgcgcgcgcgccccgggtccggtgcctgtgcccgggagagccccctccagcccttggcccttgcgcgtgcggaggcctcctgcgcccatgtggggcagggcagggcagggcagggcagggcagggcagggcagggcagggctgcccgttcccagcacagcgctggccatcgccctcgacccatcgagagctacaacttgggatttgatcacccaactttccccagagggcagccgggcaacccacacaggcgaaggggcttgctcagcgtccaggaggtttggggtgagaagggatcgcctcaaggccaggcctgatgcagacctccttcgccagggccttcccacccaccttcggtctgaacgccagggaagggtgttggtggttggtttgaatcctggtttttccgcttacttattgcgcctgccaattcggcagagcgcgatcagaacttcccgcccaggctgcccaggctgctgggtccatgctgggacgccttccccgggctgggtcgcggtccccccacgcccccacgttatcggcccacgttctgcctttagctcacttttctccaaggccttgggaggacttgcggttcctcctccggaacaaggagtttgaagccaggctgcttggattcaaactggcctcatgtcctcaccagcagtttcaactgcccgctggaccccagactcagtctgtccccctccaacccagctcccctttcctgccctgcctttcggtgcaaccatgtcctgggcccagactcagaacctcagtatggcggggacaccactcactcctcaggcctgtactcttaggtcatctcggcttggaaccccttttgccaatgttggagctcagaaaacaatacgccaaaatgaaggcctcagaagcagtctctgtgtcatcttctgccctcctgtctctcggtcccattctcccccaggctagccatcgaaaccagaacgcttttccccaaagccagtcataaaacaaaaatatcactgtgattttccctcacttgtctgtgtaaaaactggccataaagaaatcaactgttctaccttgttgattgcagtcctaagacctcccattccacagaagaacctgccccttacccagaaggaaaaaaaggctgctcagagaggccaagaagaatctagagccaccggcctcgctgggtttcctcactcagtatcagcatcagatcacacccttttggtccaatcctatttcgacagggctctccatgttttgttgaacctaagcataaaactaggcaatttcccctgtatctttgggccttccttctgaaggcccccatgtacaccttaaataaataagtacaccttttcttctagccatctgcctcttgtcagtgaattttcagggaactgggaccagtcaacaacccaccccaacctctgcatacactagcacattcccccctttcctgctttgtctccaaagcacttatcatcaccatatattgtcatagatatgtttttattcatttatcatatatttatatttatacttattcattttatttatt

SEQ ID NO: 585811 - DNA, 4001 bp, Homo sapiens
cttttccttgccatcttctttctgttgatctctgtctctctgtctctttttctctgtgtctctttctgtctcttggtcacttcgtttctctttcccttcatctctcaatctctctatcctcaaatctcaggctctgattaatctcatctttcacttcctgtatctcccgctccccagctgcctgcagtcctcaccagaggctgaggatgcctggggcacaaggcagggtgacagctagcagaagccatcgccagtcccgtatcaggtacccaaccagtgccagcagcatcacgccccctgtccagaaggtgctgctcaggactccagccacggtgcggtgctccacatccagccactccagctctgggccaggacaggagacaggaagatggttagtgaggaccagatgggctcagcctcactctgacaactgccttcttccagccctctaggtcctgcctgtttcttgcctgcctcacccagtggcatcacgatgatggtaaaaccagccagggctgagccagtaagggtgcgggtgatggcaaacattacatagctgacggaggctgcagatgccaggcccagcaccagggtactcacgtaggctaccagcagcagacgccgccgcccaaacctgcaaaggggtcatgcagggtcagttccctgtggaaggaggttctaaggcataggtagactaggctcataccccagctagtgggagaaagttcccccagccagtttcttattggcccagtgcctcaccccacctgtcggacagatatccaaaggccacagcccccaccagcacaccggcgaagaagaaagtggacgcagctctgttcagacctttctgctcacacaccagatcccactgcaaggacaggcagaaagggacctcctatgaacatcagcccctctccagcaggcaccagctcctcctctccagaccctggagccttctgaggcgaactctgccattctggtacctccatgccagataataaacctcccaacgattcacgccagcttggggaataggaaactttgtccctccccagtcctgcagcctcagcttcttcccaaggaaggcctcgacctgctgcctcccagggagactgcctccaccgacattccacctccagatggattatgtaaataccgacctgggactggaaaagaggaagggagaaaagaaggcctctattgtttctccacctcttgctgcagaaattgccttctcagctctttgtctcaactccctgaagccactttagcccttccctgccttaatcacctcccaattaatgatgatgataacagttcttgtgtaggatcctgttactacaagccatgaactaaaagtgccttatattcatagcccccatctacagattggtaaactgagactttaagaggtaaagtaatacatctaatgcctacacagtaaccacccaaggcaatggcaggcccatccctctcacatgtctctcaacttctgggcttaagtacctcagttgcaatggtagaggagaattctgagtggtcgtactcccagccctgagagcagggcactgtggcaggttcatcctccagctccccacggctctgcctttcttcccccaacgtggtgttggggagagcctggggataggcaaagcggaggcaggagctgagcgtgccatcaggctcccggggaagatgggcctccagccacacatcctgatggctgaagttggcaggggcacccggcagggcacatcggtgggcaggcacggcagccaggaagatgggcaggaggaagtgcagtggtagcagcactcggggcagggccagcagtgccacattccgcagttggaagggcccaaagccgcccacctgctccagcagctcctcaaagcccatgctgctcacccaccaaatgcttcaggtgcagcctccctctagtatccagccagctcaaactgcccaccacatagacccttggactctggaggtgggagtggatggactggagagcctgcagccagaatccagccctcaggggctggcccaggactgggccctccccagccatcaggtctccagggacctctacctgtcttgcctggtgcctgggggaaggggaagccatccattcagaggtcactggctcgtggctctggggcttacccattagtgttcagggaccaaggctaccatgatgaggtagctgggtgatggcataggaggtgagcccctagccccttggtcagcagagctcccaggatccctaagaagaggaggcccctggggcctggggccagctctcccagggtgccctttgtcctgtgagaccttaggtcagccttgcctatttgcagctacagccatggcctggccgacagcccaggattcaggactgaaagctggatcctaaccaggtttctttctgctgagccatgaggcctcctcgcatccctctcccctgctgggagctgatgccctggcctaagacacacctgtgatcacaccgggcaacttgatgtctctgaggatcccaggctcatcccattcccacttcactcagggactctccccatacatatggttccaactgcctgtcccattcccctatttccagcagcttcctaaattaccttttggagggatagggaatggcgggggacatgttgccaaggtacctgcaatgcctaagattaccttttggaggggtagggaatgggggagggggagttaccaaggtcttgtcaaaggtacatgcaatacctaagactcaaatgttcaatctgaccctcccactcaattctcaatcatggtccctgcagcaaaagtacagcagaaaccagcaatgtctggtttattctcatctgattctccaaacacttagctggcagacccactggtttaatccagctcctactttgaacaggtcagaaaactaaagacagggaggggacctgctggggtcacacaatgactcagcagcagagctgaagaaaagaccaggtcccctgactccagaccaggaatctcacttttgacctaagctgctgagctggtgatgtcccagtctgctccaggctgggatccctgagaaagcgctgggaaaggagctaaatcgatggcatggcgtgtgttaatgggggtgctgacagccatggagtgaagcaagaggcagctaatggtggtggcagtgacagggggtgacaatgagaagaaatgtttgagtctctagtgcatcctcgccattctagagggtacatagatgcctcagacacggtccctacccttagggagcttacaggagggttaaaataagctaaccctccctgtctccagtctcacccctttcaacccattctccatacactggccacagtgaacatttaaacacaaatctaagagggtcacatccctgtttaaaacccttcaccagcttctgctgcctgagggggaaagtctagctccttagcttggcccttatgacttccctaggactagatcctctcccccagtccacccctgacccctctccaacatgctcccttccctctagttctctgcacacaccagctcattggcatgtcacaccctagtgtggtcccttggacaatgtggcttcctcctcattcaccaagtggatgcccaaacctccctgaagaccagctcaaggggagacacctccacccttctcatcctcactcacgtgtgacctcacactgttggttcctccctcatttaatactatgtaatgatattattaatataaaatgtataaaataccataacactttgcagctcctgagaggtaagttttgtggtcaccccatctccatgtcccatccagtggctccacagggtaatactctgaagttttttcacagccagagaagacagctaacgaggccaacctcagccattggctgtgacgacttagttttcacaatgggaatttctctcctgctttaatatcagaaatagctgataatcatgcagtggtt

SEQ ID NO: 585812 - DNA, 4001 bp, Homo sapiens
taagacttttcaatgaccaccacctgacacaaaaccttagtataccttttccaagagaaaacaatgtggggaagggaagtgaatattaaatcttaccactggtttttggaaaagttagtatcttgctgacagtttccctagaacagaagtagcttgcatagacttcaagcaatattttattgacatatgaaacctgaaaaatcttaatagatttctccatattacacagattatgtctttcaaaataagttttgttttctcgctggtttgttaaatgatgcttcaggttcctgaagtggtttgtacttaaaaccatcccacattttgattcccatccattctccacacacaattctctccatgaatttttaacgaggaatagtcctgtataaaagccattgagtcagagggggacacatcaattaaaaataaaacctggaaatatcattcagcaatctgcttttagatctttttaagctgatgaattttatttcagtaaaaacaatgaaaagtaaaaattctccatcattttcgaaaggagagacattaaaaaatagaggggctaaaaggcaaaaatggaagagcacgaaacaactgatcatggctggctatgctagaattaaaaaataaactcttaaaataggaccaactaacatttacaaatgataacgcatcagaactgttctttttatttttttgtaacaggcaagaaaatgtaagggtaatcttaaaatacacagttaaggcttcacaggaaacacatgagtatactactcacaaaatccttggaataaacgctacttgctcattcaagggcatcatcattccactctagatggcctcttaaagttttttcttactcatgtaggcagatgtaactgctcttctatgcttttatgacacctaataatatcttcattataacaagtagcacattataattgtctttctctgtctccccagcagcctgtaagaaggtcagaactgggtcttttcaaatatatatccacagtccctggtattgtaggaattataaaaatgtcgcaactaatgggtgtcctgccttgggtttagcaatcatatattattgacttctcagaatcctgcaaggtaaacagtatagatgaattacactcaaagaggtcaagtagtcgatgctctgtgagtggcaggttaataacggaagtcccacaaggtaggtccacaacttggacccacaagataatgacagtgtggctgtgtaagactataaaccacagagatgatctcagtaaggatggaaaacagattacgtttttaaaaaggtcatcctcatgaaaaggaaaatgattcctacagaggaatgacagctcgcgaagcttcttaaagtacaacattcaagcaccacagcacatgcctaagggaagcattagaagagattagaaggaaaaggccgtggagacctcaatccctcctcctcccaccgcgggcctggcctccaccgccacctctgccaggcgggcatggaaggggcgacctctccgatgcgcactgccgggcgcgaagccgcccgcgcaccctcccccagcgcggcgcgtgccactggcccgggaggcccaggcgtgggcagccgggtacctagctcggccacggtagccgcgcagccggacagtaggaatttgctcgctcggggccatctctgggtcagcggcaaaagcctctcctcctcctccgggacggacattcagcagtagcgcaagacgataacgcactccttctcgccgctgcgctgcaccgcgccgcggcggccgcttccctgccagggcggccccttttcaaccggcgagtggccgggtgaggaccatttccctcgttcggctcggccgggtggacccgcaaccttcctagcagtcccagctggagtggtccagctgccccttacaccccagaatagaaaaacacagcggagcccaggaggttactgggcaatgtagtccgccgggctccgctacgtctctgattggccggccgcgggtccctctgcggctccgcccccggcctccatggcaacgcggctggttctcgcccgtcagtcctagcccggccctgcccctccttgcattttttccgcgctggctgagattcaaagagaagtggaggtgggagggagcgacaatggaaaaatcacctgaaaactgggacagaggaaggaagctacagttacgaaggagagctgcaaaagttgcagcagaaaggttgggagtcccgacaggttccgtagcccacagaaaagaagcaagggacggcaggactgtttcacacttttctgcttctggaaggtgctggacaaaaacatggaactaatttccccaacagtgattataatcctgggttgccttgctctgttcttactccttcagcggaagaatttgcgtagacccccgtgcatcaagggctggattccttggattggagttggatttgagtttgggaaagcccctctagaatttatagagaaagcaagaatcaaggtatgtggtcgtggcagacggggtctccagaggagacaatgctttcttttttaaactttctttcattgactcttaagtgcagggctagaacacggggaacatacctgcttgcctcaactaaaggatctagtcatttctgaattcctctactaacaattaacaacaatatcctgtgcaaaattttgcgaaagaaatgaaatacaattgcagcgtgcatcgacatttttggaagtagagattaacttttcgtatttttacttcatcgaagttaagttccaaatgtgtatgtgttaagtaaatgttttcagtaattgggaaagataaagtgtaatccaatttaagtttgtgaaaatgagtaattcgtatccaaattggagttaacaccaaagtattgtacaaattgcttgcacagttggtccgtacacaataaacaggctctgtatttttagctgacgttgttatttgatgatgatgtactccattttcactacggcctgaagagactagtaatcctccttgtagtagatgtttttgtcttgaaagtatcttttaaatgtctgagcactttaaggaacagacctttattaatgtcttttaagttttattcaatttccagtcacaaatattttatggtatttgattgtctaataaatttgtatgatattataattattcttatgaattataatactttctgtggtgacccattttccatctggttagcccaatttgtagaatgaatttatacgtagtagcattattttaccactgatcatttgccttcaaaatctctgagattccaatttagtaaaaaacatatagaaaattaaagagaactaagatgaaaataaaaataacccagaatatcacaccagctgtactgtaaaaatttagtgtatttatattattttggtcattttcctatgtatttacaactatttaatgaacaacaatggaataatagtataatactcttttatgtgcttttgattttaacatataatgtgaatgactttcctgtaccatgaaatactttgaatcttccttttatggctatattttgtcataggaggatacaatagtttacttaaatctcaatagttgggtttataggttgctgccaaacttttttctttcagccagtgcttcagtgaacattcttgcgtgtttgtgtgcatgtattgattgtgtggttgtacattttgcaattatctgattgtttactcagaataaattcctaggagtagaattgctgagtcaaaggacatgcacacttaaattgtttatatgaatgtgttacttttggaaaaagaagtatgaatatgcaatttttattttccattgactgtatgcaattgcctaacttctcaaatcctgggccatactgaataccataattctttgcaatttttgctagtctgatagatgaaacattatatctcctaaagaaatactcctttgtctcccacagccttccttatgcatatgatc

SEQ ID NO: 585813 - DNA, 4001 bp, Homo sapiens
agttgttggacagtggagataggagagactgaggcaaaacagccaattggagaccattaatattagtctaggagatgttatcaagtcataaactcctacgaccacagtgaggatggctaggaggagcaggtggaaagttgtctttaaggaactccatcaaatgtctggctaacagcagcaagggtaaacgcatggtttccttattattttttttaagtaattttctttggaatttctccagctccattatgtctttcttgatttcatagaaatcctagtggctcattttcatgtactagcaggacacttcccaagaagatgcaatgaccagaaactcctactgttgagtaggccccacttagcaagacctactgaatcagaaactctgggggccatcagtctgttttaagaagctgtccagactgctgggcccccagagattctgattcagtaggtcttgctaggtagaaaaaaagcaaagaagctgtccaggtgattctgataaaaattaaagtatgactaccactataaatatagtggattatctttcatgagcctttcagtgctaaatttgggggccctgttaaaatacaagcacttttggcctagctctttcaccctccatagtacccttatccatccatccatccatccatccatccatccatccatccatccatttatctaattatttacattatctgtgttcagagtgctttaaaagtaaagaataggccagacatggctcagtggctcatgcctgtaatcccagcactttggaaggccaaggcggttggatcagctgaggtcaggagttcaagaccagcctggccaacatggtgaaaccccgtctctaataaaaatacaaaaattagccgagcatgatggcgtgcctgtagtcctggctactcaggagggtgaggcaggagaatcgcttgaacctaggaggcagaggttgcagtgaaccgagatcaaaccactgcattccagcctgggcgacagagcaagactctgtctcaaaaaaaaaaaaaaaaaaaaaagtcaagaataaaaagtttaaatacaatccaattttttagctattgacccaaataatatgaaatcttgaaagctagtttagttgcaggaatatcttccccctgatattgttaactttcttatgttttctataatcacggaaaggcaaaatttacttccgaattttcaaaataagcatttgtaattccatcagaaacaaccctacacctgttactacctaggtttttatggagaatgtattgggaatacagaaaaggtataagcaaagagcctggcctttagatcctttagtcactctggctagtggctagggatgactagtaagatgacagtccttaagcggatgaccattggacacataaacataggacaaccaccttccatgcaatgtggatagagtaacatggtgtgttggagagatgctcattattggggtgggggtgctggagaaggcttcacggggcccctgacacatcaacggcatttgacatgaaaagaaaggggcaaggaggtgggggtggggattcagtcacagggaacaaaattaacaaaagcagtggggtctgaaaggaagaggaacggccgggcagtcaggcctcaggaggaaatggatggggtaggcggtggggtgcaggtagcacgtcagttctggggcttttgacaatatagacaggagaatttgaaaggatgcagcttgcaaaacgcacacactgttgtctcttgtcattgccatccacacggcctttgaaagtagagacaatacctcagagataagctcccagggacgaccatcattcattcattccacagatactgactgagtgcccacggcgtgcctggctctgcggcatacctgggtacctgccggtgacggacgcagcccccgccctgggacctgcagcccccggcgcccaggcgtctcccagcagcggctcacctggctccttggcgggggcgggagtgcgggcgctgggatcccacacggctctcgcctggctggcggcgctgcggacgcggataccggcggcggttcccgagccgttgtggcctagcccgcgggcgttccgggcgggctgaggagatgagagtgggggaggggacgaggaagaggagcatgagcagctgggctagggagccaggaaagtggtacctgggtcgccctcctcatacctgagtcgtgggatccccttggtatttggtaaacctgtataccaaggctccttctctctccgaggttttgctattcttgatcgagggcctatttggtgccaggcctcgtgtcctgaacatacagcagtgcacatgtgtcacatgtgtactgcacagacggtaattcactaacgtctccggaagacttaagccttcctcaggtcagaagaggtaaaaagaaatggaggctaggagggtcacccaggtctccaaccataggctgtctgccccacaaacccggctctccccactgaatgacaccctcctgcccagatctgctctggatgcagacatgccatctgcactcactccctttaccctcctcccaccctatccctgtccctagcactgtctctcactccaccttgtattcctgcttggcccagttacagttttacacttgtttgtttgatgactgtgttaatgtctaccttataatgcactttatgtattcctttttgtaaatcatcttacccctatgagggcaaggacttttatccctttcattaactgttttattatcagtgcctacagcagtgtggtggacataggaagtattcaattaatttttgttgaatgattgccctcccattgattgtaagctccacaccggcagcaactgtagtttttaatcacttttaaactgcaagtgtttgacacctagtaggcatttaatacacattggttgaatgagtgtatgaatatactgcttactttatctttaccctttcattcaccctcacctcatcatcccaatttgtaggataaaaatgtgcatttctgaggattcctacttccaagcttcctcctcaccctttgtaaccattccctcattcccttgatccccccaaccccatccctcatgtcttcacaatcatgtttttgctcttacttccccttcaccctccattacttcttagaaagcttcctatcctccctagtttggaacattctcaagcaacatgtttttgtagataagagaattccagcctaagctacattggatccaaaacagctttccatgaatcacccatgactatctgttttttggttttatattgctttccttgaagaggactgaggatactgtaccacttgaaatcatggtcactgttcataattttttcaacaaatatttatgacacatgttttatgttctagacattgtgctagatgttgggacaagatatgcaaagtctgagccctccaaggtgtgtatgacacaaaatagaataatcacgggaaatgttgagaaatgtcctggcttggatctagttatttctaatacaagaaactaagagaatgagacaggatctgattcttctgctcattgtaacaagctttagcataggcataggttgataatggatgtaggcatggggttagaatgccttgcccattcacatttatcttgtttggtttttacaaatgactctgttagtcgggaatgcagggcaggaattctctcgtagaagctggaactgaggttcaggaaaggtcagttgacttgcctaaattcgatgagactcctgccctattctccttactcgaagaggcctgagttaaatgcttaaaatcctcttcactgatggctcttcaggataggagtcagtttcaaatcttcagtgtaacggttttttaaatgcttctcaaagggagatatcagagactttcctgaatcagaatcacctaagatgtattataaaaatgcatgctcttgatcaagacctcctctgacctacccaattagactc

SEQ ID NO: 585814 - DNA, 4001 bp, Homo sapiens
gaggatggctaggaggagcaggtggaaagttgtctttaaggaactccatcaaatgtctggctaacagcagcaagggtaaacgcatggtttccttattattttttttaagtaattttctttggaatttctccagctccattatgtctttcttgatttcatagaaatcctagtggctcattttcatgtactagcaggacacttcccaagaagatgcaatgaccagaaactcctactgttgagtaggccccacttagcaagacctactgaatcagaaactctgggggccatcagtctgttttaagaagctgtccagactgctgggcccccagagattctgattcagtaggtcttgctaggtagaaaaaaagcaaagaagctgtccaggtgattctgataaaaattaaagtatgactaccactataaatatagtggattatctttcatgagcctttcagtgctaaatttgggggccctgttaaaatacaagcacttttggcctagctctttcaccctccatagtacccttatccatccatccatccatccatccatccatccatccatccatccatttatctaattatttacattatctgtgttcagagtgctttaaaagtaaagaataggccagacatggctcagtggctcatgcctgtaatcccagcactttggaaggccaaggcggttggatcagctgaggtcaggagttcaagaccagcctggccaacatggtgaaaccccgtctctaataaaaatacaaaaattagccgagcatgatggcgtgcctgtagtcctggctactcaggagggtgaggcaggagaatcgcttgaacctaggaggcagaggttgcagtgaaccgagatcaaaccactgcattccagcctgggcgacagagcaagactctgtctcaaaaaaaaaaaaaaaaaaaaaagtcaagaataaaaagtttaaatacaatccaattttttagctattgacccaaataatatgaaatcttgaaagctagtttagttgcaggaatatcttccccctgatattgttaactttcttatgttttctataatcacggaaaggcaaaatttacttccgaattttcaaaataagcatttgtaattccatcagaaacaaccctacacctgttactacctaggtttttatggagaatgtattgggaatacagaaaaggtataagcaaagagcctggcctttagatcctttagtcactctggctagtggctagggatgactagtaagatgacagtccttaagcggatgaccattggacacataaacataggacaaccaccttccatgcaatgtggatagagtaacatggtgtgttggagagatgctcattattggggtgggggtgctggagaaggcttcacggggcccctgacacatcaacggcatttgacatgaaaagaaaggggcaaggaggtgggggtggggattcagtcacagggaacaaaattaacaaaagcagtggggtctgaaaggaagaggaacggccgggcagtcaggcctcaggaggaaatggatggggtaggcggtggggtgcaggtagcacgtcagttctggggcttttgacaatatagacaggagaatttgaaaggatgcagcttgcaaaacgcacacactgttgtctcttgtcattgccatccacacggcctttgaaagtagagacaatacctcagagataagctcccagggacgaccatcattcattcattccacagatactgactgagtgcccacggcgtgcctggctctgcggcatacctgggtacctgccggtgacggacgcagcccccgccctgggacctgcagcccccggcgcccaggcgtctcccagcagcggctcacctggctccttggcgggggcgggagtgcgggcgctgggatcccacacggctctcgcctggctggcggcgctgcggacgcggataccggcggcggttcccgagccgttgtggcctagcccgcgggcgttccgggcgggctgaggagatgagagtgggggaggggacgaggaagaggagcatgagcagctgggctagggagccaggaaagtggtacctgggtcgccctcctcatacctgagtcgtgggatccccttggtatttggtaaacctgtataccaaggctccttctctctccgaggttttgctattcttgatcgagggcctatttggtgccaggcctcgtgtcctgaacatacagcagtgcacatgtgtcacatgtgtactgcacagacggtaattcactaacgtctccggaagacttaagccttcctcaggtcagaagaggtaaaaagaaatggaggctaggagggtcacccaggtctccaaccataggctgtctgccccacaaacccggctctccccactgaatgacaccctcctgcccagatctgctctggatgcagacatgccatctgcactcactccctttaccctcctcccaccctatccctgtccctagcactgtctctcactccaccttgtattcctgcttggcccagttacagttttacacttgtttgtttgatgactgtgttaatgtctaccttataatgcactttatgtattcctttttgtaaatcatcttacccctatgagggcaaggacttttatccctttcattaactgttttattatcagtgcctacagcagtgtggtggacataggaagtattcaattaatttttgttgaatgattgccctcccattgattgtaagctccacaccggcagcaactgtagtttttaatcacttttaaactgcaagtgtttgacacctagtaggcatttaatacacattggttgaatgagtgtatgaatatactgcttactttatctttaccctttcattcaccctcacctcatcatcccaatttgtaggataaaaatgtgcatttctgaggattcctacttccaagcttcctcctcaccctttgtaaccattccctcattcccttgatccccccaaccccatccctcatgtcttcacaatcatgtttttgctcttacttccccttcaccctccattacttcttagaaagcttcctatcctccctagtttggaacattctcaagcaacatgtttttgtagataagagaattccagcctaagctacattggatccaaaacagctttccatgaatcacccatgactatctgttttttggttttatattgctttccttgaagaggactgaggatactgtaccacttgaaatcatggtcactgttcataattttttcaacaaatatttatgacacatgttttatgttctagacattgtgctagatgttgggacaagatatgcaaagtctgagccctccaaggtgtgtatgacacaaaatagaataatcacgggaaatgttgagaaatgtcctggcttggatctagttatttctaatacaagaaactaagagaatgagacaggatctgattcttctgctcattgtaacaagctttagcataggcataggttgataatggatgtaggcatggggttagaatgccttgcccattcacatttatcttgtttggtttttacaaatgactctgttagtcgggaatgcagggcaggaattctctcgtagaagctggaactgaggttcaggaaaggtcagttgacttgcctaaattcgatgagactcctgccctattctccttactcgaagaggcctgagttaaatgcttaaaatcctcttcactgatggctcttcaggataggagtcagtttcaaatcttcagtgtaacggttttttaaatgcttctcaaagggagatatcagagactttcctgaatcagaatcacctaagatgtattataaaaatgcatgctcttgatcaagacctcctctgacctacccaattagactccctgtgagttctgggaacttgcatcttaaactcccagggtgatttttctgcatgtaagtttaactgggagagttttaatgtaaagcttcggtttgtttttgtttttgt

SEQ ID NO: 585815 - DNA, 4001 bp, Homo sapiens
gatataaaaaatttccatcatcacaaaaagttgttggacagtggagataggagagactgaggcaaaacagccaattggagaccattaatattagtctaggagatgttatcaagtcataaactcctacgaccacagtgaggatggctaggaggagcaggtggaaagttgtctttaaggaactccatcaaatgtctggctaacagcagcaagggtaaacgcatggtttccttattattttttttaagtaattttctttggaatttctccagctccattatgtctttcttgatttcatagaaatcctagtggctcattttcatgtactagcaggacacttcccaagaagatgcaatgaccagaaactcctactgttgagtaggccccacttagcaagacctactgaatcagaaactctgggggccatcagtctgttttaagaagctgtccagactgctgggcccccagagattctgattcagtaggtcttgctaggtagaaaaaaagcaaagaagctgtccaggtgattctgataaaaattaaagtatgactaccactataaatatagtggattatctttcatgagcctttcagtgctaaatttgggggccctgttaaaatacaagcacttttggcctagctctttcaccctccatagtacccttatccatccatccatccatccatccatccatccatccatccatccatttatctaattatttacattatctgtgttcagagtgctttaaaagtaaagaataggccagacatggctcagtggctcatgcctgtaatcccagcactttggaaggccaaggcggttggatcagctgaggtcaggagttcaagaccagcctggccaacatggtgaaaccccgtctctaataaaaatacaaaaattagccgagcatgatggcgtgcctgtagtcctggctactcaggagggtgaggcaggagaatcgcttgaacctaggaggcagaggttgcagtgaaccgagatcaaaccactgcattccagcctgggcgacagagcaagactctgtctcaaaaaaaaaaaaaaaaaaaaaagtcaagaataaaaagtttaaatacaatccaattttttagctattgacccaaataatatgaaatcttgaaagctagtttagttgcaggaatatcttccccctgatattgttaactttcttatgttttctataatcacggaaaggcaaaatttacttccgaattttcaaaataagcatttgtaattccatcagaaacaaccctacacctgttactacctaggtttttatggagaatgtattgggaatacagaaaaggtataagcaaagagcctggcctttagatcctttagtcactctggctagtggctagggatgactagtaagatgacagtccttaagcggatgaccattggacacataaacataggacaaccaccttccatgcaatgtggatagagtaacatggtgtgttggagagatgctcattattggggtgggggtgctggagaaggcttcacggggcccctgacacatcaacggcatttgacatgaaaagaaaggggcaaggaggtgggggtggggattcagtcacagggaacaaaattaacaaaagcagtggggtctgaaaggaagaggaacggccgggcagtcaggcctcaggaggaaatggatggggtaggcggtggggtgcaggtagcacgtcagttctggggcttttgacaatatagacaggagaatttgaaaggatgcagcttgcaaaacgcacacactgttgtctcttgtcattgccatccacacggcctttgaaagtagagacaatacctcagagataagctcccagggacgaccatcattcattcattccacagatactgactgagtgcccacggcgtgcctggctctgcggcatacctgggtacctgccggtgacggacgcagcccccgccctgggacctgcagcccccggcgcccaggcgtctcccagcagcggctcacctggctccttggcgggggcgggagtgcgggcgctgggatcccacacggctctcgcctggctggcggcgctgcggacgcggataccggcggcggttcccgagccgttgtggcctagcccgcgggcgttccgggcgggctgaggagatgagagtgggggaggggacgaggaagaggagcatgagcagctgggctagggagccaggaaagtggtacctgggtcgccctcctcatacctgagtcgtgggatccccttggtatttggtaaacctgtataccaaggctccttctctctccgaggttttgctattcttgatcgagggcctatttggtgccaggcctcgtgtcctgaacatacagcagtgcacatgtgtcacatgtgtactgcacagacggtaattcactaacgtctccggaagacttaagccttcctcaggtcagaagaggtaaaaagaaatggaggctaggagggtcacccaggtctccaaccataggctgtctgccccacaaacccggctctccccactgaatgacaccctcctgcccagatctgctctggatgcagacatgccatctgcactcactccctttaccctcctcccaccctatccctgtccctagcactgtctctcactccaccttgtattcctgcttggcccagttacagttttacacttgtttgtttgatgactgtgttaatgtctaccttataatgcactttatgtattcctttttgtaaatcatcttacccctatgagggcaaggacttttatccctttcattaactgttttattatcagtgcctacagcagtgtggtggacataggaagtattcaattaatttttgttgaatgattgccctcccattgattgtaagctccacaccggcagcaactgtagtttttaatcacttttaaactgcaagtgtttgacacctagtaggcatttaatacacattggttgaatgagtgtatgaatatactgcttactttatctttaccctttcattcaccctcacctcatcatcccaatttgtaggataaaaatgtgcatttctgaggattcctacttccaagcttcctcctcaccctttgtaaccattccctcattcccttgatccccccaaccccatccctcatgtcttcacaatcatgtttttgctcttacttccccttcaccctccattacttcttagaaagcttcctatcctccctagtttggaacattctcaagcaacatgtttttgtagataagagaattccagcctaagctacattggatccaaaacagctttccatgaatcacccatgactatctgttttttggttttatattgctttccttgaagaggactgaggatactgtaccacttgaaatcatggtcactgttcataattttttcaacaaatatttatgacacatgttttatgttctagacattgtgctagatgttgggacaagatatgcaaagtctgagccctccaaggtgtgtatgacacaaaatagaataatcacgggaaatgttgagaaatgtcctggcttggatctagttatttctaatacaagaaactaagagaatgagacaggatctgattcttctgctcattgtaacaagctttagcataggcataggttgataatggatgtaggcatggggttagaatgccttgcccattcacatttatcttgtttggtttttacaaatgactctgttagtcgggaatgcagggcaggaattctctcgtagaagctggaactgaggttcaggaaaggtcagttgacttgcctaaattcgatgagactcctgccctattctccttactcgaagaggcctgagttaaatgcttaaaatcctcttcactgatggctcttcaggataggagtcagtttcaaatcttcagtgtaacggttttttaaatgcttctcaaagggagatatcagagactttcctgaatcagaatcacctaagatgtattataaaaatgcatgctcttgatcaag

SEQ ID NO: 585816 - DNA, 4001 bp, Homo sapiens
tggcttggcccagactccctccccaacttggcaggccccatgcatgcctcaccacctcacacacagtcctctctctccccaggcatgtgtcctctcagctgtcaccaacaagtcatgtgtgtttgctggaagtgtgtttgcttggcctgggggttggtaaccagcacatgtctcatgactgtctgtgttctcagttgtgtttgtgactgtatctccatggccttgtgacagggctgggactagggagaggccagtgaggcacttgccaggggtgtaaaatgtaagggggagccaaaaaactcatgaatcaagataaattttaggccaggagtggtggctcatgcctgaaatctcagcacttttggaggccgaggtgggaggatcacttgagcccaggaattcaagactagcctgggcaacacagtgagaccccatctctacaaaaaaaattaaaataaattagccaggcatggtggctcgagcctgtggttccaggtactccagaggctgaggccggaggttcactagagcccgggaggacaaggcttcagtgagccatcatcctgccattgcactccagcctgggcaacagagcaagaccttgtctgaaaacacaaacaaacaaacaaagatacattttaatgtaatcaaaataagtttgtttttttttttcttttctttaagatggagtctcactctgtcacccaggctggagtgcagtggcgtgatcttggctcactgcaacctccacctcctgggttcaagcgagtctcctgccttagcctcctgagtagctgggattacgggcacgtgccaccacgcccagctaatttttgtatttttttttttttttttagtagagacggggtttcaccacgttggtcaggctggtctcgaactcctgaccttgtgatccgcccgccttggcctcccaaagcactgggatgacaggcgtgagccaccacacccagcccttaccaaaataagttttaatgcaatgtctacaaatcaagactccatgatgccaagtgcagtggctcacatctgtcatcccagcactttgggaggccaaggtagaagaatcacttgagcttaggagttcaagaccagcctggtcaacacagggagactctgtctcttaaaaaaaaaaaaaaaaaaaaattagctgagcatgttgacgcatgcctgtggtcctggcattttgggaggctgaggtgggaggatggcttgagtccatgaggtcgaggctgcagtaggctgtgatcgcaccactgccctccagcctgaacaacagagcgagactcggtttttgtttttttttaaagactccatgatgaataaaacatcaagattttttaagtaaagacaggtgtgttcacagtgtgggtactggctcggggttcgagaagactaaattctttgttcagttaggtctgggctggtcttctaggctaattttccagacctcttccccctaccctatgttcctgggacatctgtaagtggctggggagtttggggaggcagtcatctaataatggccttcgaaggcccagaaaagtggccccgcatccagaaaccaaagattctgactcccctgagacactgtagcccagcgggtccccctactggccccctgtcccgcccggcagcgtgagaacggcgcagacctcgcccccaccccaccccgccccgccaggccccccggccccgccccgcgcacctgctgagactttggagtgagcatccggacttggtgggggacggaaattcccaggcctgcgggcccctagttctctccctcctcatctcggggctggggccatagccacagctggagagcgcagcccgcgccgggcctgaccggtgtgggccgccgggcggaagagaggctgcaacaggcgaccccagcgcccgcccagagctccgcagccagctgcgtccagtcctcgcggctcaggggcggggagaccagagccgactcagtgggaggggcccttcgggcctgggactggcggccggcgcctttgggcacccgaggctccggaaagggacggggttaggggcccaagggctcggacccccttctctctgcccctccccctgggtcgcctccctgagacctgggagcacgtgcactggctttgaagactcccgaaggaaaccgatggggtagtgagcagggacggcgtgtggcaggcagaaagccccgcagggctgggggtggggcggatagcttggggctcacttctttcccaaccaagccttctgacgggtgtggggaggggactggaatcccaattggatcctgtactcctcactgtcctcgtctgaacctagatagagcccaagagtcacccagagagagaggattattgcctgggaacaataagcaaattatccggaggctgggatgcaaatgtgtctaactctttttttttttttttttaagacggagtttcgctcttgttgtccaggctggagagcaatggcgcgatctcggctcactgcaacctccgcctcccggattcaagcgattctcctgcctcagcctccgtaggagctgggattacaggcatacgccaccacgcccggctaattttgtatttttagtagagacggggtttctccatgttggtcaggctggtctcccgacctcaggtgatcctcctgcctctgcctcccaaagtgctgagattacaggcgtgagccaccgcgccctgcccagactgcactttctaactgtgtttccttaagcatgttgactcttctgaggctcttatttgacccctgaggggcctcccactagggaggaggaaatgatgaagtcagttcttaaggcaactcacccaaccctagtctcttctagggtgggatgaccctcaaggggatgcatttctgcactgcctccctgggtggcctcccacccagtctcttagcaaacgtatcacccctcttcccaccaccactagctgagaagtcctcaaactcgctggaggatattttcctccctactgtgagctagccaggcaaacttcctcctagatggactcaagccatttctgggtcacagtgtgacatactgaccgaaacttagcagggggaaacaacttccaggctgtgaggactgaaaccacgatggaataggtagcaaaataaacccttgtacaattgtccatctctcctctcccccacccccaccaactgccaggccaggttaaactgttttgcagagcagcagtctgggtgattagactttcaaagccatggaaagaattcaaatcaaatatttattgagcacttgctgagtgctgggctttgcaggcaggtctgcctccataagcaactcagatattattttaaggtaggtcctgagtctggaagacagtctggattcaaatcttgcctctctgctaaattgtcacttgtccctcagttaagcactgggaaccttgatgttcccatttgcagggagggcaggggtgggtgggtgttagttcccctcccgcctgaggccagaggtgattaggagtggtctttgggaggaactgctggaggacagaggggcaataatcagttttgtgctagatgcaaggcattcttccagaaagacatttctgttgggagtggagaggcatgtctgtggcagatccctctcatgcacaaccctcactatatcttctgtccactgggcaggcttcggtcagtgctggtgccaggattatcctactccaaaagaaagcattttgtggatacagctgctgccaggacttgtggcctcacttttgggggcctaacctctccctcctctccaggcggtccactcttgaggcctccccagcgtctggcgagtgtcgctggctgagaatgaacagcagacagcccagcaaagcctctcgcatgtcctgggagcccaggcggcgggccaatcggcgcagcaggggcaggaggtattggcgggccaggcgggcagcaggcagcagcaggcaggacagcagcaa

SEQ ID NO: 585817 - DNA, 4001 bp, Homo sapiens
acggagtttttgctcctgttgcccaggctggagtgcaatggcatgatctcggctcactgcaaattctgcctcccaggttcaagtgattctcctgcctcagcctcccaagaagctgggaatacaggctcctgccaccacccccggctgatttctgtatttttagtagagacagggtttcaccatgttgaccaggctggtttcgaactcccgacctcaggtgacccacccaccttggcttcccaaagtgctgggattacaggcatgagccactgagccctgcctaggtctcaggttttctattaggtagtagggactcttcctctaggttcttacttcatacccgcataccccgtactccaccccacaggcaagattcctggcagttaagagcaggtgtagcttcaaagcagatgggggcctagggtggggagaatagctcctgttctcctgggtaaaactggcttaggcttagagaagaagtatttatttcttccctggccccctgctacacccctgctctctctgttctcaggagttcccataccagtcttgggcacaattcaactccagccctctcctcctgcccatatcctaacattcagctggccagccttcgtgttttgcttttgtctgcctttgcccagcggcaaacagggatctgataccagctcagagcatctggtgtccctccaactatgccttggcctgctgaggtgggcccctgaaagtagccaccaaattgagtacctccctgcctccagactcccaacacctctcctgcaattctccactcccaggatttcatatggggctagccactacctgcagatctcttgtcttttcttcacaaccacccataagctagtactagcactgaatagatggggccagctgaggttcagaggggttgagtcacttgcctgaagtcacagagctggtgagtggaggagctagaatccatattaaatgttcaagctccttttggaatggagagaggtataaaagctgcttctcagttagccctgtagactgggaggtggggggaactctgattcaactaaagggaaaaatgaggtggagaccaagatcattcccagcctgacttgagtgtcaggcagctcagccccgccccatcacacacatcctggcatggggagcttacacaagcaggaggaaagttggagggtctggaggccaccgagaggagtaggcaaagggactaccacagggctgcagagagacccctagaggtgtgagggcagggttggagccagccttgacctacgactgctctctcctggtaagcaaagccgaggactgtttgtcttcaccctctcatataccctcacagtaaatcagtaaatgaagacgtgcgcaggaaggagacgccagggatacgagtttagccagtaaaagaccggggttaaagagacagccccgcacctccgctcgcgagcctgcacctccgctcgcgagcctccatccccatccccatccccatacccctccgccagcgcagtcagcggcacggcccctccctgataccgaccagatcgatggggatcacccgtccactcgcctgccccttgcggaggtcaacgtgaccgcagcctgttttaggcccgggagccaggccgccccgcccagcttgggtcccggtccccgcagggtcctcaggctccctggcccgtgcgcgccacgtgctgcgcggctccgcacgctccgcactggggccccacccggcgtcccttctccgggctgcggagccgtcaggcccgccctccctgccctccgtggcaggcgggcagcggcgtcttccgccccggcagtccccagtccccagtccccggccccgggcagcacctgccgcagaagcactgctcccgcgctgagatccgcgcgctctcgctgcagcttccctctcccgccggggcacattcaaacccgccctccgctgagctcgccccgccctgcgcccactgccacctccccgacgcccgcggccccgcccccggcccacccctgccaccccgcggcgactccgcgcgctccgccgctcccaccccgagcccctgcgcccccagggccgcctggtcgtgttattgcggtagataggacctctttgggccctgccacaccaaggctgtctgtccatcgtgtggggtacatggggctggagggtacagccacacattaaggacctgcgcagactcccataaaattcatctcgggactgttccatttacacacccgctgctcagaccggccccgacgctccacggcccactccacctcagatattccgttatcccttcccaagccctgcccacgccgcgcttcctccacactgcacctttttcctcccagcgccctccctttcagcgcccccttctttctttcagtccccctcctcttcttttccttcaaaactgcttctgtccccaccgcgcattttctgtgaccagcatgatgggttttcccatccctgacacatccagtcccagccacagacgcgcaaacaccaccccactcacaactttgacttggagggggtatgtgcctctgcctgtgcttgcgtgtgcgcgcggaggggggtggggcaaagccctccagctccctcataattcaccctttctaaatccagcactttggaaaactgaggcacaggtgggaatgggaagagaaaaagctaggaacagccttatatcctcagtgaatcctattgtcccagccatcctgacaggcggaagccttgctgagtatgtctttcactagctaaggaggaaggtgtgggcgtgctgaggggtggtccagcaagtccctccaagggagggggagggaggccctctctttggtcgggcaataaatggggtggggtggggggcactccctgcccttccagcagtactcagtgctagaggatgatcctaaggctggaaaggtcctgaggagaaaatccaacccacgctgcccaccccatgcccactgacccgaagggcttgtcccctagagaagccacagacactgattaacaactggcagtacctcacatcatagggataaggtagtcctaccctgtccccagagaaacagacagggccctaaggagagaggtggcttttctaattagggtcagtggctctccccaagctactccagaatgggtgtccccagccttctgtttccatgccccacagagatgacacacatattccttcccaaccctcccccaccccacccccatcccccacatccccgccagccctaaccagagggcaggaagatgggtttaggtggtatttttccaggcacagccccatgacttgagagtggcttcatgtctgtccacaaccccctaattcctgccctcatgtttgtccagtctctctctcttcctctcctagccctcctctgccctctgccttggcccccttcctcgctccccaccctcctttcctggtctctgggtctgtgggggtggcagggctagtggtcagaagatctgccaggcatggcaaggctggtggccagtggctgcagttgtgtacagagggggctggaggtggaagaaaactggagggaagtggtgagggtctcaggccagactgggaaaggctggttcctctccccacccaaactggggccctgccagctcggtggatggcaacagccagggctgttattgttggagagaagtccgtctggcatccatcctgctgggcccctagccaacacccacacccctctgtagccacctcccaagcagaggttgctgggtgccagggccccctgctggacagcctgggagccccaacttacacaggccttgcctggagtttttctagccaggccttgccagctctcttcagtctctgcctggtcttctggcttctctccctccctgagctccctcaggtccctgtcgaaggggtggggtgggaagggttggtcctgctgcacctctactctacaccttattcaccaccctatatgggaccgtg

SEQ ID NO: 585818 - DNA, 4001 bp, Homo sapiens
cacgaggggtgaataatcatatttacattttctagagagatgaaggcaagagggcattactggagtgggggtgggggaaagcctcaggtctcagattttttctttttttttttttttttgagacggagtttttgctcctgttgcccaggctggagtgcaatggcatgatctcggctcactgcaaattctgcctcccaggttcaagtgattctcctgcctcagcctcccaagaagctgggaatacaggctcctgccaccacccccggctgatttctgtatttttagtagagacagggtttcaccatgttgaccaggctggtttcgaactcccgacctcaggtgacccacccaccttggcttcccaaagtgctgggattacaggcatgagccactgagccctgcctaggtctcaggttttctattaggtagtagggactcttcctctaggttcttacttcatacccgcataccccgtactccaccccacaggcaagattcctggcagttaagagcaggtgtagcttcaaagcagatgggggcctagggtggggagaatagctcctgttctcctgggtaaaactggcttaggcttagagaagaagtatttatttcttccctggccccctgctacacccctgctctctctgttctcaggagttcccataccagtcttgggcacaattcaactccagccctctcctcctgcccatatcctaacattcagctggccagccttcgtgttttgcttttgtctgcctttgcccagcggcaaacagggatctgataccagctcagagcatctggtgtccctccaactatgccttggcctgctgaggtgggcccctgaaagtagccaccaaattgagtacctccctgcctccagactcccaacacctctcctgcaattctccactcccaggatttcatatggggctagccactacctgcagatctcttgtcttttcttcacaaccacccataagctagtactagcactgaatagatggggccagctgaggttcagaggggttgagtcacttgcctgaagtcacagagctggtgagtggaggagctagaatccatattaaatgttcaagctccttttggaatggagagaggtataaaagctgcttctcagttagccctgtagactgggaggtggggggaactctgattcaactaaagggaaaaatgaggtggagaccaagatcattcccagcctgacttgagtgtcaggcagctcagccccgccccatcacacacatcctggcatggggagcttacacaagcaggaggaaagttggagggtctggaggccaccgagaggagtaggcaaagggactaccacagggctgcagagagacccctagaggtgtgagggcagggttggagccagccttgacctacgactgctctctcctggtaagcaaagccgaggactgtttgtcttcaccctctcatataccctcacagtaaatcagtaaatgaagacgtgcgcaggaaggagacgccagggatacgagtttagccagtaaaagaccggggttaaagagacagccccgcacctccgctcgcgagcctgcacctccgctcgcgagcctccatccccatccccatccccatacccctccgccagcgcagtcagcggcacggcccctccctgataccgaccagatcgatggggatcacccgtccactcgcctgccccttgcggaggtcaacgtgaccgcagcctgttttaggcccgggagccaggccgccccgcccagcttgggtcccggtccccgcagggtcctcaggctccctggcccgtgcgcgccacgtgctgcgcggctccgcacgctccgcactggggccccacccggcgtcccttctccgggctgcggagccgtcaggcccgccctccctgccctccgtggcaggcgggcagcggcgtcttccgccccggcagtccccagtccccagtccccggccccgggcagcacctgccgcagaagcactgctcccgcgctgagatccgcgcgctctcgctgcagcttccctctcccgccggggcacattcaaacccgccctccgctgagctcgccccgccctgcgcccactgccacctccccgacgcccgcggccccgcccccggcccacccctgccaccccgcggcgactccgcgcgctccgccgctcccaccccgagcccctgcgcccccagggccgcctggtcgtgttattgcggtagataggacctctttgggccctgccacaccaaggctgtctgtccatcgtgtggggtacatggggctggagggtacagccacacattaaggacctgcgcagactcccataaaattcatctcgggactgttccatttacacacccgctgctcagaccggccccgacgctccacggcccactccacctcagatattccgttatcccttcccaagccctgcccacgccgcgcttcctccacactgcacctttttcctcccagcgccctccctttcagcgcccccttctttctttcagtccccctcctcttcttttccttcaaaactgcttctgtccccaccgcgcattttctgtgaccagcatgatgggttttcccatccctgacacatccagtcccagccacagacgcgcaaacaccaccccactcacaactttgacttggagggggtatgtgcctctgcctgtgcttgcgtgtgcgcgcggaggggggtggggcaaagccctccagctccctcataattcaccctttctaaatccagcactttggaaaactgaggcacaggtgggaatgggaagagaaaaagctaggaacagccttatatcctcagtgaatcctattgtcccagccatcctgacaggcggaagccttgctgagtatgtctttcactagctaaggaggaaggtgtgggcgtgctgaggggtggtccagcaagtccctccaagggagggggagggaggccctctctttggtcgggcaataaatggggtggggtggggggcactccctgcccttccagcagtactcagtgctagaggatgatcctaaggctggaaaggtcctgaggagaaaatccaacccacgctgcccaccccatgcccactgacccgaagggcttgtcccctagagaagccacagacactgattaacaactggcagtacctcacatcatagggataaggtagtcctaccctgtccccagagaaacagacagggccctaaggagagaggtggcttttctaattagggtcagtggctctccccaagctactccagaatgggtgtccccagccttctgtttccatgccccacagagatgacacacatattccttcccaaccctcccccaccccacccccatcccccacatccccgccagccctaaccagagggcaggaagatgggtttaggtggtatttttccaggcacagccccatgacttgagagtggcttcatgtctgtccacaaccccctaattcctgccctcatgtttgtccagtctctctctcttcctctcctagccctcctctgccctctgccttggcccccttcctcgctccccaccctcctttcctggtctctgggtctgtgggggtggcagggctagtggtcagaagatctgccaggcatggcaaggctggtggccagtggctgcagttgtgtacagagggggctggaggtggaagaaaactggagggaagtggtgagggtctcaggccagactgggaaaggctggttcctctccccacccaaactggggccctgccagctcggtggatggcaacagccagggctgttattgttggagagaagtccgtctggcatccatcctgctgggcccctagccaacacccacacccctctgtagccacctcccaagcagaggttgctgggtgccagggccccctgctggacagcctgggagccccaacttacacaggccttgcctggagtttttctagccaggccttgccagctctcttcagtctctgcctg

SEQ ID NO: 585819 - DNA, 4001 bp, Homo sapiens
tcttctttgtgacattatcactgactgtatttagtgagcccttttgttaacatcaccacctcagcttgctctgcagtctagactgcagctcatgttcccaggaatttggagaaaagaactttgcaactctttccctttatctccaaatataagtttcccttgcctgctcttagggaacttgtgggccaatgagtagcaagcgcttagggaaaagggtacttctgcataggagaggacaggccatattgaaagatgaccccagatattcttttattattattattattattatgttagacagagtttcactctgtcacccaggctggagtgcagtgtcatgatctcagctcactgtaacctccaagtgattcttgtacctcagcctcctgagtagctgagattacaggcatgtgccactatgctcagctaatttttttatttttctgtatttttagtagagatagggtttccgctctgttggccaggcttgtcttgaactcctggcctcaagtgatctgcccaccttggcctcccaaagtgctgagattacaggcatgagccaccacgcccggcctcattcttgacgagaagtgtgaaagcaagagaagagatcaggacatggaagatggagggcttctccactcctgaagagggccgcttcatgcctcgatgttaggggtcacaggttcgattccccaagatcagacaaacccacaaggcaaacgtcagtattaggaccattcccaagagaaaggcagatgtcttttgtatcatttagtgtattggattttgcatgaaatttctatatgctgcttgggaatgtaatatctgattaagaatacacagctgaggaaagtagtaggaaagagaagattttttgtgtttgttgtcatttcatattacaattactttctattccttgcagcacaaactaaatgagcaggaagaggcagcaaaaagcgtacaatgtatttgtgggaattgtaaatgtggaagtgaagaccagcctctgatttatcaaagatcattaaatgaattaaaacttttccaaatttcaccttcagaaggtcatcatagcaaacaaacctcagtttgcaaggccagttttaaagaaggcagaacccagcaaagcaagcgtttcaggctctgaataacgctcaaattcatcacaaacgtgctgggaatttaaaaaggaagtttgtgttctcattgattacataactaataattttatgaagcctgtttaaaatactgatttttaaaacagtggttataatgtcaactggttacacagtgtccatttgtgacaataaatgaaaaagtgtaagcaagcgtgtgcttgtgtgtgtttacaaatgagactatctttgccagtggaccgttccaatatgaaaaacatccatacattgtattatgtaaacacaatcaaggggacccatcataccagtggtggatgtgtaacctgtattttcttggcacataaggttccaccaagacttcgatcttcacaacattacagctccgagctgtcccacgtcccaccagaccctgtccccttctctccactcatccagcgcgcccacatgcgcgcgcgcgcatacacacacacacacacacacacacacacacacacacacacacacacgggactcaagagacagtacactcgggagatgagtacagcttgcttctctgcggtcacccgagcactgcaggctcactttacctctcgcccagggaggatgccggctgccgctgccctccgtctccacggctgtccccttctggttcagcagactggggccctcggtgttttcaacaggtaccatggtcacgtagaagttacagccgcttccccgccaccaaaccgccccgaccacccccgctcccaggagtggtcactttccccataatagcatgctaaagaagagtgtggggaaaaacttcgggcaaagctaatgtgatttgtgaccaactttgtttctatttccgaaggctttgcccttttcggtgacacaggctgttgctattccaagcagcctatcacaggcagggggagggccgtgagtcagaggattgtttttgcctttagatgcagagttggaagcaaggggttaaaagaaagggaactcagacggagtgtttggccattagctaagggtagctcttgtattctagcacctttgaaaagaggcagagaaaggaaacatgcagatttaaatgcaagctgagagtggggatagaatactcacagatggtatcagttaatcttgcagaaagaggaacaatttatgcaaagacataccagaaggaaaagtgtgtcaatttttcagcaagactgttattccaaaagtcatggtatttaccagcttacacaaagcataaaatacctttattgtttcaacctgattttggtctaggtaaaggcctatatctttctctccaaggcctttcagataaatcacagcctgagaccaaaaatacacaaactcagaatgcacagattctttagactttttatatgctgaggttatagcaaagtaatccatttcttaatgcagaattgtctttaagagacaaattaacactgaatcctctgttaggtttcatgtttgcgtaggtaggaggaggatactcctcactcagagaggccagactaagtggcccattgtgtgcgtgtggtggacatgtaatctcaaacaaaatcaggtcatgagagaggatctttttctgatttgtgaacatatttataaaaaagtcttacagggttatgacattttaccttcagttattcattcaacaaatcatgtttattaaaaaaaaaagccttatagaggaaattgagatcatcttaaaaatcatttggaataaaaactaacatgtgtggagcacttatgtgccagaaattgtgctaagcgcaataacgcagatgatgactttgaggcaggtaccaacattatagaagaggaaatggaggttgggtaacttggctacagtctcacagctaatcagtggtagagctgagattatgaatccaggaggtctaaagctgtaactctcctatattctaacttcccagccttgtccttctctaattttcttggcttcctatggtttcagacctactcgactttaagaagatgccgtgaaatatggcttttagtcataggcatttctctggacagaaaaacaaatttgtgcttgtataagcagaagctaaatttttgttacttcttttcaacattttaactgaatcacttcaaagttctaaattcacttatttgtacatttcctttgcttgtcattaaataattctatatttttcttatctttcagggaaacaggtagcaaatggaaacaaacctataataattcaactagtctttattatgtacccgttgtatgtctgctgatagtgctagaaaatggaagtcctccaggcataatccaggccccttatgattaagagggtgagaagttcagaatcccacacatcagtgtccccactaaagaatgtgtaacgcaaccatggtttgaaacaactcattttatttgttcccagggtgcattataattatataggagtcccagtttctatctgtgagacacatatgtttcccataagttctctatattctcttggcttctaacttctttctgctcagaaccaatgacctcattagggggaaaatgttcttgcaatgggttagttgtatcattgctttgtttcgtgatcccacaacctgtgtttctagcagcttcttggccccatgggagtgttagagtgtttgctatagtgcttgactagacagaagacaaaactaattccagaatactttactatggttaaaagcagttcaacagttctcactctgttttgtgtagccaaaccatacaggagatccacaggcatagtaagccaaccaggagtcaaaaagaatgctcagcaatgcaactgacaacatcacctcctggtgctcctaattctgttctttattctg

SEQ ID NO: 585820 - DNA, 4001 bp, Homo sapiens
tgatagcctacaaacatattctgacttataatattgtcattaacttgaaaaaatacctttttgcatagtgagtatatgggaatatatattatattcttgaaaataactactgatctaagtggaagggtaatcaaataagtttaggtatgtgcaaaacagattgggctttgacatggaataccagtttttaaacgtatttcaacttttaaatactaaatgtttttaagtacgattttctctggcagtttaacatcagaccaaactatttcttgttcactccattcacaaattctccagtataaaacttcagttattagcaatttcaattatttcagggtaacagcaaaagtccatatgtaatcacttcaaattgggcaaataattcaaatcacacccaatgccagtaactataaagctagcccacaactcaactggcagccacatcttaaccctgcattgttccctgcttctcacgaaattctattagctcccatatagtgtttgtgtggaaatgtcccccaaaagaaacttacagtttaaaatgttttttttcggttatgttttactatagtttatggggacattatttgtaatacttaagaacttagaaattctgtaagtcccagataaatcctttgtggatattcggaaactatggaaactgtagttttgttaggattacaatcaaggctcaacaaatatgtattggcaataagcctaaacctttacattgttgcagctatttcaagtaatgatttgacttctgtaatttataagttttcgttcggatcaattttgctatccccattccattttagttatcaaaacaattctatttctttttcttttatttcctgtgttgctacaaaaaaaggcttttaagattggacttatttgaaatgaaacagaaagaagacataagagaagcatatgcaactaaagacaatgcccctgggcagggcctgatgagaaacatggaccccgcaacagggaaaataacttgaaacccacgcaagaagatattccttatgtattcgttcaatatttattcaagggtgaagccaagtgctctatggaggaagggtggagcaagaatccgggtgttgcccaacttctcctggttaatgcaccacagtcaaagaatccacctctggtcccaacttacacacactgctcagcaaaaagtggtgcggagtcaattagactcgccctccttaaatgtcaattagtcaacaaatacgccttcacccgaatgtgccatccctcaggaggagggaggtggatctcagcttccaccccaaatagcagcatacagcattctctataattacacacagcatacaggtgggaactgttaacgactgttatcttcctttcgttacgatttcagtgctgttttgacgccccagtgatgtctttagtggttgttgcatggcccagccgccgcatgggatctgcgcccggagcctgcctttaagcctctgagcatccacagggtaggaggcgcagaggagaccggagccgcggggccagggtgaagaactgtcctgcctcgctgggtaatgcggtccagccccggacccacgccctggcctctctccgggtccgccgcagccccggcctgtcagaattcggttcccacccactcccagctagtggaggtcagtgcggtctctgactccgacctgcccagcgcggagtcagccgcggagactgcagccgcagcggaaggcaggctgccctgactgccgggagcggctccacgcaaactcctgacgcctcagccaggccccagaggcactgggcaaccagggtgctccgctgcccgacaggggctgaccagcgcagatgctcgcccgccgccgccccccgcggactccccactcccagcagacccagttctcacctctcggggcagccatggttccccgacagccccccgcggaactgacgcccgccccctccgcgcccccgcgcaggacaccggggaccgccccttgtggtcatagagacgaagccgctcggcctagagcgcctcgccggcctcccggtcggccacgcactaaaactgggctcaggaatccaagctacaccccaaaatggggagaacgcggatcgaagggaggccttcccggccgcgtcctaggtgacaggtgtgtgaaattcggttggggaggtagttctgtaaactgcgtctccccgccagctaaggaagttgagtgaagggagcgttgccgtctgggaatcgtagtcctcacaaaggcgtgagtaggcggcaaataaggatttgggtttagccttggggattcactcctgtcaaagctgttagagaagctcccagaactcgtaaagtaacagaaactacttgcggcaacatttgtaacttccacctggctcattatcttccactgttaccttgtgttctagataagttataatttattctacatatcgttcagaagtcttgtgcctgttccatatcgtcagcagtcatcggttgtatttacccagccaggcattctaactaatgatcttcgcacaacaaaacggcctttaaaaaatcagatgtatcggccgggcgtggtggctcacgcctgtaatcccagcactttgggaagtcgaggcagatggatcacctaaggtcaggagttcgagaccagcctggccaatatggcgaaaccccgtctttactaaaaatacaaaaaattagccgggcgtggtggcgcgcaccggtaatcccagctactcaggaggccgaagcgggagaatcacttgaacccgggagattgcagtgagccgagattgcgcccctgcactccagcctgggcgacacagcgagacttcgtctcaaaaaacaaaaaaaattagatatatcaacaggcattttaaccactataatctccactttcactaggggatgttaattagctatcataattgatattagaaataattcattggtgaaataaatgatgttcaagatatgtggattggtttaaaataatatgaaaatacctcagcacttacaggaatagggatgcaagattctgagctgcccagcagcccacaccttctgcagcatgttctttccccaaaattgtccttttagagggttggttgtataccattgtcttgttaaatatacatatagatatatctggtctgttaacattgttggaacattttgcatgccttattagcatcatattaatattgggaggggctcccaggagaccagagttgactttgtagaggcagacatttgattaatctcattttgcaatagtgttggacttttcctctacctggtagtaagtgtgctcactggtgctaatcttcccttattgtaattgatacagtttccactagtagaattattcagttctctactgtgtatgtacttatgcatacatttaaacaatattcatatatgtacgtgaaattaattttaaaaattaaaaatattatatcatatagtccttcgttttacagctactgctttgtatggtttatcttgtcccattttggactatcattatagtgtcagcttacatcaattaagtataatttctaaatgctcaatttgttccaaaaggcacttgtaagcctgcctctgttttcaagtctgcaccagctgtttttactttttttttttttttgtctttttttcttcttgtagagattgtgggtgggggcgtctcactttgttgcccaggctagttctcgaactccccacctaaaacaatcctcccacctcagccccccaaagttctgggattacaggtgtgaaccaccacacctggcctgcactagctttttgaagcatgttttaatttctggcaacaagaggttttgttttttcctgtcctaggtggtagaatcaactaggaactatcattccttctggtgaggaagcgcattttacacacacacacatgcacacacacgcacacgcacacacacacacacacagagatcccaattaaagtggtgggtcaaat

SEQ ID NO: 585821 - DNA, 4001 bp, Homo sapiens
gtgatgtggctgtggccccatagctgcgggtcatcactctttcctgcagcacaccccaagtcagataagacacctgttggggaaggtagagacaaaggagacaataagcaagataatgaaaaggtagacaaaaattgacctctctctcttcaggattatgcctaagtgattcaaaggaaaatatacactttttggttcctctgtagaagtttcttctcccctcctaagtctggattcaccttgtagggaatcaactgtgtgtgaaaaacctattcagggaggcaagaactctcagaattgggtatctgtagttcaacatgatattcaaggtggaactagtacccactgcaaaatgccatggggtcagcatgttagcactctctcacatgcagtactgggggaaggctgaatggctcccccacaattttatcagtgggtttacagtatgtgagacaccagtgcaggaaggaagtataataacggcacagtagaaatcacagagaatagggcaagaggagtcctctcttctgcactagacatcttgaaataacagcatgaactttcagtaccagtgctggagaggagaaaaggaagaaacaaaagggcatttcccccaaacacctcaaagatggaggtgcagtgtgcccctgggaggaggacacgaaacacaccagccagcaaagctctgggactggtaaaatggaaaccttcacagaatccctgcccaccggcatccaacccaggaagagaggctgagcccacctacccacctggagccctgtggcacagaagagcagcttcagggcctgccacatcggggtggtctctgccgcctctgttcggggcgccaggggaacctcatcagaggccttgggctcattgccaaacacacaagctttcaccaggggaaagcagaggcccctacctgaagaaagcacacaaagtcaagccccaaatcttctccatagcacttcatcttccccagagcagccagcctgccctgctgtccggcctaccgacctcccgccctctccaagtcatatcccgtttggactgctggccaaataccctctttcccgacctagctcacttccccgccctttcttcacacaccggtctccaggtagttcttccgcctgaagtactgcaccaggaggtagccaggtaccataaagctggcatagccagcagcattcaccacaaatcggaagaaccatagctgggtccatgactccggaggggcttcgggagtctccccacctgcccctagggaggggaacgcagccagcaccaccactgcccaccatctgtaaggaaagcggacataaggattagggcgcagctcctcatcccctccgccctccagaggggaccacactggagtagtgcccggagtctcctccccgccccctccgctgcagctccggcccggacaaagagcctctctctctctctctctctcggggagggggtgcgccggcgctggccaggcagagcttcctccctccccgggggcggatccgcccctctggccacacaggtctcctctgttccctccaacgctagccggctgctcaggtcagaggaagcgccccttcccccacactcccctccacgatccgggacgtcagggtccccagcccctccgcccgaagctccccaaggagcacaaaaccaagccgcagctcccatccccgctggctccgggcagcgatatgctggccgacggccgagcagccgggaccccacccggcccccgtgctgaggcgcggcagtcacgtggcccgggggctcggtcacgtgagctcgctgctgccctagcccccacctggcgtccatggtccaggccgcgtggggtggagggggaaccggggaatgcgagtccccgggccgcgcgccccctgcgctcccgccgccgcctccaggagcggccagcgagccagcggccagcggaagtgccgcgctcttcccgcctccctccccgcggccccctccgcccctgccgcgaccacgcagcgccccgggccgccgccggaccacagcgcccccgcgcggcccggaggcagacgcggcttgggttccggggacctgggctgcccctgggcgcggggagccccagccctgaagaggcgcccgcccggcgtgtcccctgtgcttcgtcatcgcccttcataagcgtcccagaggtcatggtgaccattgccatcttgtggacaggacattgaggctctgcatcccaagccgctcctctgtgttagtttccccgttttctgacaggatgaaggtgtctccttgctttgttggctgggtagtaattctgtcccacttcccatgatcttcgaggctctacatggcctcgcccgcgttcctcgcccactcactcgcccgctgtgaagccccactggcttgctctcagttcctctaattcacaggctttccccctaatgctctgcccccatccctttactcatccttacatcccagttgagatgatactcctcaggcgagggttcccggaccacccaaagtatgaccctctaccgactccatccttttccttcccactattcttttcccttcatagcacccactgcaacttggaaaggcatctttatttggatgtttatgcttttaacggctgtctctctcactggatgagacgctccaagtggtcagagactgtgctggtttattgccccatgctcttcatgccagcataggggtgacctagcagggccctcgaaggtgaggaacggggggaaaaacgtggagtcagctccctcgtgcccagcctccctgggttacccttatccccaggctcctccagatggcaacccccagggcagtggtgagggctccagggcgtgtgtcctctcattcttcctcttgtccctccatccctcatcatttccacagcaaggacaagggtctgtgctggacacagagaaaggcctggaactactggcctctgaccccacccagcaaggccctaccgtgctcaggggacaatttccttctctctgcctctaccacaaagtcacagggcaggcctgtctaaaaagccccaatgcacacagacatgcatgcgcgcaaaacagctctagaagggaaaaactttttttaacgtctctgccattttagtgtcatgttactgaaacttcccttccccagtggctcagttcagagccttctgtgtgaagtctttaaacaacggtgtttcagggtcctcaacagcaataagatgggacacctctcagggttctgcttgctcctatttcagtctcttctcactcaggagagtccatgcttcctactggttggcagtttcaggctgacccaacatgggtaaaacaagagcacctgccattttcaagagaggcaaacaggcttcacccaggatacctggggctttgggggtcttccaagaagccctgtccacctggaaagctcttccttccagactggctctcttccacttgcagtccctcctcctcggctcaggactgtactggctggccccaggctctggccacagcagtccctagggcaccagaagagcacatagcctgggcccaaactgcagcagttatggctccggcttccagatggagaggtggagccctgaggatcccagaccctgcctggcttcagtcggtacacagcagcagtttccctgagatcttcaggtcatcaaagggcaaaaggacaagggactgagaaggagaatggagagaagcaagatcagaggacatgggaaaaggtgacttgggaaaggggacccagggaaacctgttgggccactccctccccaccaaatgacagttgaagaccatcagggaacaaatcttcacacgaatcctcaaaatagtggcccctctgggcttggcagagccctgaggacttagacaagccttccttttctaagataatgccagaatatccgagttaggagggacccttagaggtgatccagcccatggacctggagttgtttgttgttg

SEQ ID NO: 585822 - DNA, 4001 bp, Homo sapiens
aggccttggccagcacctgggtggggaagctgacgaacttaagagcttcgtattggcaccagctgctaagcacattggacaggctggcaaaggagtaccggtacatgggtgccccatgccggggctgcttgcagagaacacaggagaggccagccacaatcagtgccagcactcggttcattagcaccaggaactgcgagtccgtaaagcgctcacccggtgatgtggctgtggccccatagctgcgggtcatcactctttcctgcagcacaccccaagtcagataagacacctgttggggaaggtagagacaaaggagacaataagcaagataatgaaaaggtagacaaaaattgacctctctctcttcaggattatgcctaagtgattcaaaggaaaatatacactttttggttcctctgtagaagtttcttctcccctcctaagtctggattcaccttgtagggaatcaactgtgtgtgaaaaacctattcagggaggcaagaactctcagaattgggtatctgtagttcaacatgatattcaaggtggaactagtacccactgcaaaatgccatggggtcagcatgttagcactctctcacatgcagtactgggggaaggctgaatggctcccccacaattttatcagtgggtttacagtatgtgagacaccagtgcaggaaggaagtataataacggcacagtagaaatcacagagaatagggcaagaggagtcctctcttctgcactagacatcttgaaataacagcatgaactttcagtaccagtgctggagaggagaaaaggaagaaacaaaagggcatttcccccaaacacctcaaagatggaggtgcagtgtgcccctgggaggaggacacgaaacacaccagccagcaaagctctgggactggtaaaatggaaaccttcacagaatccctgcccaccggcatccaacccaggaagagaggctgagcccacctacccacctggagccctgtggcacagaagagcagcttcagggcctgccacatcggggtggtctctgccgcctctgttcggggcgccaggggaacctcatcagaggccttgggctcattgccaaacacacaagctttcaccaggggaaagcagaggcccctacctgaagaaagcacacaaagtcaagccccaaatcttctccatagcacttcatcttccccagagcagccagcctgccctgctgtccggcctaccgacctcccgccctctccaagtcatatcccgtttggactgctggccaaataccctctttcccgacctagctcacttccccgccctttcttcacacaccggtctccaggtagttcttccgcctgaagtactgcaccaggaggtagccaggtaccataaagctggcatagccagcagcattcaccacaaatcggaagaaccatagctgggtccatgactccggaggggcttcgggagtctccccacctgcccctagggaggggaacgcagccagcaccaccactgcccaccatctgtaaggaaagcggacataaggattagggcgcagctcctcatcccctccgccctccagaggggaccacactggagtagtgcccggagtctcctccccgccccctccgctgcagctccggcccggacaaagagcctctctctctctctctctctcggggagggggtgcgccggcgctggccaggcagagcttcctccctccccgggggcggatccgcccctctggccacacaggtctcctctgttccctccaacgctagccggctgctcaggtcagaggaagcgccccttcccccacactcccctccacgatccgggacgtcagggtccccagcccctccgcccgaagctccccaaggagcacaaaaccaagccgcagctcccatccccgctggctccgggcagcgatatgctggccgacggccgagcagccgggaccccacccggcccccgtgctgaggcgcggcagtcacgtggcccgggggctcggtcacgtgagctcgctgctgccctagcccccacctggcgtccatggtccaggccgcgtggggtggagggggaaccggggaatgcgagtccccgggccgcgcgccccctgcgctcccgccgccgcctccaggagcggccagcgagccagcggccagcggaagtgccgcgctcttcccgcctccctccccgcggccccctccgcccctgccgcgaccacgcagcgccccgggccgccgccggaccacagcgcccccgcgcggcccggaggcagacgcggcttgggttccggggacctgggctgcccctgggcgcggggagccccagccctgaagaggcgcccgcccggcgtgtcccctgtgcttcgtcatcgcccttcataagcgtcccagaggtcatggtgaccattgccatcttgtggacaggacattgaggctctgcatcccaagccgctcctctgtgttagtttccccgttttctgacaggatgaaggtgtctccttgctttgttggctgggtagtaattctgtcccacttcccatgatcttcgaggctctacatggcctcgcccgcgttcctcgcccactcactcgcccgctgtgaagccccactggcttgctctcagttcctctaattcacaggctttccccctaatgctctgcccccatccctttactcatccttacatcccagttgagatgatactcctcaggcgagggttcccggaccacccaaagtatgaccctctaccgactccatccttttccttcccactattcttttcccttcatagcacccactgcaacttggaaaggcatctttatttggatgtttatgcttttaacggctgtctctctcactggatgagacgctccaagtggtcagagactgtgctggtttattgccccatgctcttcatgccagcataggggtgacctagcagggccctcgaaggtgaggaacggggggaaaaacgtggagtcagctccctcgtgcccagcctccctgggttacccttatccccaggctcctccagatggcaacccccagggcagtggtgagggctccagggcgtgtgtcctctcattcttcctcttgtccctccatccctcatcatttccacagcaaggacaagggtctgtgctggacacagagaaaggcctggaactactggcctctgaccccacccagcaaggccctaccgtgctcaggggacaatttccttctctctgcctctaccacaaagtcacagggcaggcctgtctaaaaagccccaatgcacacagacatgcatgcgcgcaaaacagctctagaagggaaaaactttttttaacgtctctgccattttagtgtcatgttactgaaacttcccttccccagtggctcagttcagagccttctgtgtgaagtctttaaacaacggtgtttcagggtcctcaacagcaataagatgggacacctctcagggttctgcttgctcctatttcagtctcttctcactcaggagagtccatgcttcctactggttggcagtttcaggctgacccaacatgggtaaaacaagagcacctgccattttcaagagaggcaaacaggcttcacccaggatacctggggctttgggggtcttccaagaagccctgtccacctggaaagctcttccttccagactggctctcttccacttgcagtccctcctcctcggctcaggactgtactggctggccccaggctctggccacagcagtccctagggcaccagaagagcacatagcctgggcccaaactgcagcagttatggctccggcttccagatggagaggtggagccctgaggatcccagaccctgcctggcttcagtcggtacacagcagcagtttccctgagatcttcaggtcatcaaagggcaaaaggacaagggactgagaaggagaatggagagaagcaagatcagaggacatgggaaaaggtgacttgggaaaggggaccca

SEQ ID NO: 585823 - DNA, 4001 bp, Homo sapiens
gatattcaaggtggaactagtacccactgcaaaatgccatggggtcagcatgttagcactctctcacatgcagtactgggggaaggctgaatggctcccccacaattttatcagtgggtttacagtatgtgagacaccagtgcaggaaggaagtataataacggcacagtagaaatcacagagaatagggcaagaggagtcctctcttctgcactagacatcttgaaataacagcatgaactttcagtaccagtgctggagaggagaaaaggaagaaacaaaagggcatttcccccaaacacctcaaagatggaggtgcagtgtgcccctgggaggaggacacgaaacacaccagccagcaaagctctgggactggtaaaatggaaaccttcacagaatccctgcccaccggcatccaacccaggaagagaggctgagcccacctacccacctggagccctgtggcacagaagagcagcttcagggcctgccacatcggggtggtctctgccgcctctgttcggggcgccaggggaacctcatcagaggccttgggctcattgccaaacacacaagctttcaccaggggaaagcagaggcccctacctgaagaaagcacacaaagtcaagccccaaatcttctccatagcacttcatcttccccagagcagccagcctgccctgctgtccggcctaccgacctcccgccctctccaagtcatatcccgtttggactgctggccaaataccctctttcccgacctagctcacttccccgccctttcttcacacaccggtctccaggtagttcttccgcctgaagtactgcaccaggaggtagccaggtaccataaagctggcatagccagcagcattcaccacaaatcggaagaaccatagctgggtccatgactccggaggggcttcgggagtctccccacctgcccctagggaggggaacgcagccagcaccaccactgcccaccatctgtaaggaaagcggacataaggattagggcgcagctcctcatcccctccgccctccagaggggaccacactggagtagtgcccggagtctcctccccgccccctccgctgcagctccggcccggacaaagagcctctctctctctctctctctcggggagggggtgcgccggcgctggccaggcagagcttcctccctccccgggggcggatccgcccctctggccacacaggtctcctctgttccctccaacgctagccggctgctcaggtcagaggaagcgccccttcccccacactcccctccacgatccgggacgtcagggtccccagcccctccgcccgaagctccccaaggagcacaaaaccaagccgcagctcccatccccgctggctccgggcagcgatatgctggccgacggccgagcagccgggaccccacccggcccccgtgctgaggcgcggcagtcacgtggcccgggggctcggtcacgtgagctcgctgctgccctagcccccacctggcgtccatggtccaggccgcgtggggtggagggggaaccggggaatgcgagtccccgggccgcgcgccccctgcgctcccgccgccgcctccaggagcggccagcgagccagcggccagcggaagtgccgcgctcttcccgcctccctccccgcggccccctccgcccctgccgcgaccacgcagcgccccgggccgccgccggaccacagcgcccccgcgcggcccggaggcagacgcggcttgggttccggggacctgggctgcccctgggcgcggggagccccagccctgaagaggcgcccgcccggcgtgtcccctgtgcttcgtcatcgcccttcataagcgtcccagaggtcatggtgaccattgccatcttgtggacaggacattgaggctctgcatcccaagccgctcctctgtgttagtttccccgttttctgacaggatgaaggtgtctccttgctttgttggctgggtagtaattctgtcccacttcccatgatcttcgaggctctacatggcctcgcccgcgttcctcgcccactcactcgcccgctgtgaagccccactggcttgctctcagttcctctaattcacaggctttccccctaatgctctgcccccatccctttactcatccttacatcccagttgagatgatactcctcaggcgagggttcccggaccacccaaagtatgaccctctaccgactccatccttttccttcccactattcttttcccttcatagcacccactgcaacttggaaaggcatctttatttggatgtttatgcttttaacggctgtctctctcactggatgagacgctccaagtggtcagagactgtgctggtttattgccccatgctcttcatgccagcataggggtgacctagcagggccctcgaaggtgaggaacggggggaaaaacgtggagtcagctccctcgtgcccagcctccctgggttacccttatccccaggctcctccagatggcaacccccagggcagtggtgagggctccagggcgtgtgtcctctcattcttcctcttgtccctccatccctcatcatttccacagcaaggacaagggtctgtgctggacacagagaaaggcctggaactactggcctctgaccccacccagcaaggccctaccgtgctcaggggacaatttccttctctctgcctctaccacaaagtcacagggcaggcctgtctaaaaagccccaatgcacacagacatgcatgcgcgcaaaacagctctagaagggaaaaactttttttaacgtctctgccattttagtgtcatgttactgaaacttcccttccccagtggctcagttcagagccttctgtgtgaagtctttaaacaacggtgtttcagggtcctcaacagcaataagatgggacacctctcagggttctgcttgctcctatttcagtctcttctcactcaggagagtccatgcttcctactggttggcagtttcaggctgacccaacatgggtaaaacaagagcacctgccattttcaagagaggcaaacaggcttcacccaggatacctggggctttgggggtcttccaagaagccctgtccacctggaaagctcttccttccagactggctctcttccacttgcagtccctcctcctcggctcaggactgtactggctggccccaggctctggccacagcagtccctagggcaccagaagagcacatagcctgggcccaaactgcagcagttatggctccggcttccagatggagaggtggagccctgaggatcccagaccctgcctggcttcagtcggtacacagcagcagtttccctgagatcttcaggtcatcaaagggcaaaaggacaagggactgagaaggagaatggagagaagcaagatcagaggacatgggaaaaggtgacttgggaaaggggacccagggaaacctgttgggccactccctccccaccaaatgacagttgaagaccatcagggaacaaatcttcacacgaatcctcaaaatagtggcccctctgggcttggcagagccctgaggacttagacaagccttccttttctaagataatgccagaatatccgagttaggagggacccttagaggtgatccagcccatggacctggagttgtttgttgttgttgggggatggggtgggggggctgctgggtactcgcagaacatttaggtttcttttttacactgaacatttaaaaataggaaagactgtacagaaaatctgagtttcacctctcaagaaagtccaagaccaggaaaaactgggcctacactcctgctttgtaagcctttgctgaagctgagtacagagaccctcagggatggctctctgggttcttataggcctcaccacaccatggtctcatatctggccaacttcactgattcactttaactgcagggtccctgtaagagtccaaatttggctccttggaccaacta

SEQ ID NO: 585824 - DNA, 4001 bp, Homo sapiens
gtgctgcagatctaggccatatgtgcagaatgaaatctctctagcactgtcttttctacatgtatgccaaaataccgacattgctactgaaactccccacaaaacatttgaaatgaacatgaaaataaatttgtttcctctgcctgaggcatcagtctcataaaacttgcccaccaaagccttgcatttagaatgctgttttattaataagaacatcactggtgagaaagtgtgactgataaagacctctgatacctaataactgtgatcattggggaatgtctgccatatcccttccacttcaaacattaatgactgatactaaccatcatctaaaaaaaaaaatgggccaaactccttgtgatgcaaggagcaaaaatgaagcatggaattaaaattagttttcagactaaatgatcaacattgtgctttgcttttgaagctcacagtaatcagtgaaactaaaatatatatatatatattttaaaaatcacaggtgtgtataattgcctgaggcctcttcctaaattcaacacagatattcaacttcaactgctaaaatggaataaaaaggtagcatttccggcatacaatgtatatttaaaaattaaaattagtgataatgttgagttacaatgacctattgaagtcacaattatttcagtttatttttgagttttccgacctgaaggacaaaagtcccacaccaaaaaaaggtagaatatgaaaaaaaagtcattacggtgtcattaacctgaaaaaacgtgattttaactatactttgccacactcaacgttacaaataaaagaatcttaccatgccattatgccttgattaactgcgctccggaatcaatcatggcctatggtgtacgattataaaacagaaaaaacaaagttccatctcatttctttgtacacacatcattacacaaaggtggagaaaccctgtgctaatgtttgaagactattcttttttttttccaagagaaaaagttaacactaggactttatatattaagtaattaagtaaaaataacgctgtctaaattattttgaaatgctgcctctcttccaagttccaaactatctcaattcacttagaaaaacgtttaatcaaaaaacaattctaggcttctgatatcctaatgtagaaaaaatgcagatactcaacacttaagattttgttagcgcaccaaatcattccatcttttactttcaatattccttaaataataaaaagacgggagagataattcagttgcaaagactggaggaaacttgcagaacttctagtggaagtttatgccataaacttaatagcccagccagaacaatcacattctactgcaagccaaatggagaaaagagtaccttggagtgcccctatttaataaacacggaacgaggaaacagttaactgtaaatacagtctagaggtatccaggtgactgacagttctccagagaccccgagaacagcgtaaaagaccccttgaggtcacctcacccctgcgagtccacggattgggacctgagggagttctcgccagcccgagggcgaaaaacgggcgaggaggaacagatgctcctccctggaaaccgcccggccggtttccgctctttcaaaaaagggaatcacccgtttcttccatcccgacctcatccattcctcgaacgctccttctggatgaggaagatgggcagtgtcaaggttttctggaggagaggagatctgggtcccaaacacaggaaaggccccgaaggcacgcgtaccccaaggccggtatgtcacccggaagggtgacggcagcctgcgtggcgtctgagctagacggagcatctccccctcccctggtccgtcgccatcacctcctcttcctcctcctcctcgcccactcctgcactttccaccgcggcggtcgcctccccggaaagcactctcaactccggcgcccgcaggccacttccgcctatgtgtccctgcgcgcgtgcgcagacgcgtggccccgcctcccgacaggcctgtgtggccggtggcgggcgggccgttacctcccgcgcatgctctatggggtagagacgctaggccggcactgcctaggtgggccgggcggtgcgagggtcgcctttcagcctttacctctacccactgaaatggagtaggtcggtgagcgccgatctgctggagaatctcattatcccatcggcgctctgcctgctcctggcctccaagcctctgaagcccctcgggtttcagctgccggctaccctcgagcccgtggtgcccacgagagaggcgactttacgtcagcggccctgggctgagatttgagaacgcgaccaagtggagaatgttggagccagattttaaaatccttgtcttccttctgcgtgctacttgatctaaatgagatacggcaaagtcacagaacctgtttttatgtttttgcctgattcatacgggcttctccggtgaagatgggcctgaagtaacgcttgggttgcttctgacgttataactcatcctgtagctgcagcaaccgtggtccttgcaacctcataaaaatgttgccagcattgtttcgatagtgctgcttaattcttggaaggtaaatctcaaagcttgaggaccagccatcaaaacttttgtaaaaggttttccccgcgtttagggcctcatccatcaccactgagatgtaataacgtaaaaaccaagacggtttggggatgagctgttttcagagaataattaaggaaaatattactgtaacgaagatggacaatttttgaaagcatgccttgaataccagaaagggatgaattggattaatatgtatgttagaatccagtcagttatggacaacttttaaaattttacaggcactcttcagaaagggtagcatttgtgtcttgtattgggatcgagggtttgtaagaaagcaaggcacctactttggtggtgagaaaaaaaggtctgggtagacattttcgtttaatacttgccaacgttgttaggctggtgttagcaacacttaggaatgttggaattaaggcttagagaacttaaatttcctaaagagatagtaaatgacaaaacctttcagtgatgccatatcgtcactgtataatgtgaatttagtactactgttagccatttatatggtggttatttatcaagtatttattaaatgggcatatgtatagctcatatcgtaaactatgcgtatgagctccctgtcctgaagaaattaggggtttccatgagaaagtaaatggcagtataaaacaacttaaggtacaagaggtgttacaaggtaccatctgctcatgcctggacaattgcagtagccgtgagcatagctttctgcattccctttatttctctacatagttgcattcagcagctggagtgatcccattagaacctgaatatgccactcctctgtgcagaaccttttagcggtttaccattttactcagattaaagttcaaaattcttaccctgacttttaagactgaacttattcttgatggatcacatccaagctacacttcagagcttttctaattgcccccaagcacagcaagcatcagtgctttgtagctgttgttccttctgcatggaacactgccctctcagatgtccacagagcttgcttcctcatttttttccagtcactgctcaaatgtcacctggctcttctctgactaccatgtcagtgaaatatttttacatgtcaaatgtgaaatgtaggagagactatctggagtagtacttattatagagtaggtgtttaataaatatcgactctcttacaatacttcccatttactcctgtgataaccacgtggtaaacaaaattaaagacttgcagctatgaattgttttttattgactgattgactgattgaggcagaggctcactctgtcgctcaggctggagtgcagtggcacatctcagctcactgcaacctctgcctcctgggttcaagccattc

SEQ ID NO: 585825 - DNA, 4001 bp, Homo sapiens
tggcgatgctcttcaccacacccacgaagctggtggtcacggccgaattgatgtaggtgcagtgcagcgtggtgaagttcatggcgcagccgatcaggatgcaggccacgaagatgcagaccatggccgggtccttccagcccgggaaggtccaggcgtggatggagtcggtgctggcgaaggagcagatgaccagcagcggggtggcagagacggcgatgacgtactgcgcggtgagcggcccgtgctcggtgtctgcgctggccttctggatgagcaccaggtaggcagcgtgcaccagcaccgccagcactcccgtgacgtacccgatggggtcgcccgtcaggtcgccggctcctgcggcgcacgaggaggacggccgagcccgggcgggaaggaaaaagagagaagacagcaggttggcgtgggcggggacccacggggaaaacgcgtcgggtaggaaaggagactgggttcgcgccccagctctgcccaccggattcctgagtgacagacgcccgccgtccctcggccacccgtgtcaaatgcgacagccaaactcagtgctcagagcgccttcccgccatatccccgggtcactccatcttcctctgtccaagacaaaggccccggagagcgcagatgccctcggggcaggtgctgtggcttccccgagctggcaccgaggtcacttgggcgcgtggtacctgcaccccggagcccctgccccgtggggcaccaaagggagagggagccccagccagtggcctgcaacccggagcgggccaggcgcgggggagaacgcctgttctggcccccagtgaagcttccccctgcccaggctctcgtctcgctcagcacctgggtcgtctgccccagggccgcagccccctgcgcagcacgagacaccccgcagtagccccgggaaccctcagcttcgcccccatcccccacctccattccagcccctcgtgacccaaggaagttcacggccccctccttccggcttggtccaggcttggaggactccagctcccaggctcaggcggccctcccacctctcccggagaatggggtgacaggggaagaccaggagagggggcgacaggaagggcgatgccgggtgaagcatgggcgagggtcggaagccaggacattagggggcagggggacttggtggggcgctggggagctctctgggtctcggaagtcccttttgcgagctgagcgaccactctcaaagctctccggctctctctgcctcagtctccccatctggaagtgaggtcgttgaactcagtgatccccgcggtctctgcccgacggagcggggtgggtggggtcggctgggggtcggcgcgggggcccgctcacctgccagggcggcgccgcaggtggtgatgagcaccgccgccagcacccctggcgagggcgcgccgttcttgagcaccaggacgccgatgagcatggtgaccaggggcaggcagcgcttgaagaccacgtacatgggcaggctgaggccgcgcagggaccagagcgtgaggctggactgcagcgtggagagcaccgcgacccccgcgaaggagcgcgccaggctcagaccgaaggggggcacggcgatgagcccgaggcgccgcagcagctccaggctcagcgccgcggtggagctggtcaggcactgcaccagggtcaggaaggagaactggtagcggctgatgaggaacttgagcaagatgttgagggagcccgagaagaccccgtgcgcgatggccaccgagatgcccagcacgcggccccggcacagctgccgcatcgcgccggcctcgccgcacccagcggtggcggagctccgcgacctgcgcgcgaggagccgggagcagcggagtgagggcggcgggggcgcccgcccagcgcggcggcgaagggcagggggcgccggctcggctgcagagggcagctccggccaggcgttcttgcggttaggcagctctgcgtccgactgccccgcagctccggggaggcagtgacgagggcgggggactccgaaaagtggcagaggtggcgggggggccggtctgagaggagtggcgggaatcctagcgacagctatttgtaagtgggtgatgagccgcggtgggttgtgtcccgcgcggtttcaccgtcagggaagacgctctgcggagggaagcgggcggctgggcgccccggggcggctgccgcagggcgggacgggggctcttggggcgcggcgcccctctccccccacagagccagcggctctcgcttgccccttcctcctggccgaggggcttgggttggagggatcgggacacagctaaagattttagaaacagcgcatcaggatcgagcgccgtttattggtcgcaacaagtgacggcgcccccagccccctcgccccggcgctgcagcggctttttccacccactgtccctcccggtgcagcggcgggacctcgtccagctgcccgccagggaagcgaaaaccgtcggtgccggcgggcccccgaagctcccgatcccggcgacgacgcccgggcatcggaggaggaacccgcggcccggggcgctgtccagggggtgcctcggagcccggaagctggctccttccggtgccaggccacgcgcaccgctctccgcacgccttccagagagggtcccgggattatgcgcgcggctccggggaagctttcagggggttcagtggtctcgcccagcagcggggcctggtggcggggacacattcgaactgaggcaaagatgaaaataagcaaacgcgcagaaacgaagtcactaacacgagtagccaccaccaggaaccgaggagctcgggggcgacgcttcccgaagcgtgggaggggaggctggctgcgctcgcagaatgggagagtagagggggagggggcgggaacccggggcccctcaccctgcagggagactccgcgtggcgttctccggatcccagggaactgatcccagggaaccctcaccctgcgggaccgtcgtgggttgctttcggaagcaggacaaccggcaggcggagggcggggagagtcaccacctccctgggccagggttcacacctttgcaccacaggacttgtgaactgtgtgtttcctatatgactaagagaaaaagggaattctaattttggagagggagtaaggcttcggtaactctttgttctgaattcagttccctggaaagtaactcgcgcggacctgtagttaaatcagcagcagccaagggtttcgctcagccgaggtaaccgttaagcgccagacagtttggttttcaggcgatttgaaatttgtggccttggccagggtttggctataagggaaaggttcgagatcgctgcgctccagcacccctttcgttcaccaccagcagtttatttctcttagccccgggaatcgtaacctcctaaccttttagcgctgcatcacgttgccttaatagacaggatccatttctctcgtggttcttctgttttctgcctcttacttccacctctgtgctgaacgcgacacttcagccaaagtgctgaagtcgtgatttaccgcaacagaggaagaaaaaaaaattacagcagggatcagcagcatcacagcagcccttcatttgggccagcatttggggctctggatgctcactttggtgagctctagagagctcggggtcaaccagtccaccagcttatgtgcccggtgcctaggagggccacgtccctgctcccgacaggtgggcactcaaaaaaagtttgtgaatggcccagggtgccaactttccaggaatagctggaaagcattatactgaaacacgtgcttccggttctctggggagcccttggtttttgttgctaaaacttgtggttacacactattggctgtttaagtgactctgtttttgtagagttaatgttatttaggaaataatgaagtctgaagcaccagttcaaattatgtgtatgtgtgtggtata

SEQ ID NO: 585826 - DNA, 4001 bp, Homo sapiens
aacatacccctcactcctacctcagtgatcttgtttttctgggctctatgattcattacatatcaagaaataacctacatggaatcagtaataacttataattgagcaaaaagaaactgagcaaaatattacatcaatattttctagtttgatgagaaataataataattaaaatatattgtgattaaaaatttaaacagccaatgacaaggtaattgcaattgaaaaaaaaactcacaggtattcataaaaaatacaaaacccacataatatgtactgagccagcgtcttcttgctttattctactttatcttttggaaggtggtattctcagctacaaatcaaagacttagttctattaccaactcctgtctcccgtcagagtgaatttctttctgtttgataataaatggaaagctacagaagtacccgcaaataaactaacgcacgcattaattccccaccagggattcttgaatggttcgggatttgatataactaaattaaactatactcccaaaataaggatatttctcaagattctatttctgtacatagtttgtactcccaccagagctttgagccccagacagttccgtgtgaattcgttgggaatctctgctacccaacacaatgccacacagaaacctgtatgaacagagcgactggaacagttacccctacagatgcatcgaaaggcacccacgcatccaaacaaaaaagaacacaaaacccattccctatacaattttttaaggtgtcagctcgtcaaccatttcaagttacttaagtagaaaaagtccctttcacatcacagttgagtcagaggtgccagaggtacccccattttcacgtcaacccaggtcctcatcctaaaacgtcaacgtcctgaatccactacgcagattccagcactggaggcgccggcgatcggcacccgccccctccggcatgggcgcttcggaataactgggcgccgccggctcacaccctgcccgcaatgttttgcactttgctgggtctgttccaggcctctagccctctcttcgctgctcccagccaggaagagtccgagaggcgactggagcgtcaggctggagaagtgggttccctccgcctgctaggctgtcgctgcgaccccattcccccggcaaggggtcgaagcccccgggcggggcggggcggaggacagcacgaggcccaggacttccacgccatctctgcagccccgcgcctccctcctcagccctggccgggtccccgcgtccccccgacccccgatcgcaaagccggggtgcgagagggaaagggaagtgaggcggcacgcgtatggagggtgtgagtgcggacacacatacagggtggctaggtacgaaaaaccccgcctctccccgaactcccgcctcggaccagctgcagctccaccactccagggctccctgcgccgggacaaagctgccgcggcctctctgcgcccgcggagcgcgtcgtcgcccgatctcctcagtctcctccggccgcaaccccgtcccaaaggacccgtgggccgccccagggacggaggggacccggagccgggcgcccgcagcccccgccccccgcgccctcgcccggcgccgccgctcacctgttcagcactttgcggatcctctggcgcacgccagcccgggaggaggcggacaggctcccgccgccgccgctgccctcggccggcaggttctcgatggtggtcaccacatggttcggcggggctggcgacggcggctgcagctgctgctgcggctgctcaggggggatcatcgcggcagaggctgaggcgcggcggcgatcagaacgcagccgggtgcatcgtgtgccggttccgggcccgggaacgcgcagaggacccggccgggcggccgcggcccgggaggcggtgctgcctgcgaagcggtgaggcggggaggcacccgcggctacggccgccgccgcccagcccgccactcactcctctccagtcccagtgcgcgcaccctcgcgcccgtgccgccgccgccgccgcccgccccggctcttcccgagccgcgtccccaagtcctggcccgccccgcgaagtggctgcgaagggtgtcgcgcgggggcgcggagctgccggtcggttccggggaaggagtcctgatttctccttgtttcctcgtgcccgggtctcctcggggcgcgcggcggcagttgtgctggcgccgcctcagcctgtgccccgctcggtcggaaagctaccgtctgtgtctcacggagtgagagaccgagggtgaacccggagagccgggcgggggcgccggcggcggcggcggcggcggcggcggcggcggcagagcggggcgcgggcgggggacctgcgcgctctcctctcgccagagggcgctgccgaggtgccttgttgcccccgaccctctactgccccgtccgcagaggcccacggtctaggttgtggtgattgttttggtttgggtgttttttagggggataagggggctgggaatagatcctccctgtggagttggcggggattcctcgtttctgcccaagcgccgcggaatccagcaccaccggcctgggacagcggcaggacgccgagacaggtgccggccccggattagaaacccaaacggagaatcctagatgttgctcctactacattcgccataattggcctggtggaaatgggagaaaaaactacttctcacaaagaatcaattctgggaactggaaaaagcatatcagaccaactcaaaacgtctccatttgaggcaatgtagtgctgtgaaaggaacgtaggcagatttgagtttcagtggcacatctgaaacttatccgcagagactctaagcaattaaattctgagacattcttctctgtgcagcgagactactcatgtctttctcccaggggagttgtaagacttaaatgaggtaaaccacgcagcaggggagcctaacagctcctttaatagtcccccaactccaaaagggaaagtcctgtgtatctgccacagaaatcttggaccatatttctaccaatggaaactgactctctgtcccgggcattcttataccaattgatccggatcccaattaataatcgattcttgaaagagagatatttttcaaattttcctttatttagactgtttagatagggatcttgccttgaaaaatgatatgcattttaaaaaactcttcgcttcagtgcagggaattgagtaagtttaacaggtaagtttgttcacacaaaggcatgctgataccactactgaatccaaatgctctgaaaccagcaaattaaaaataccagtgataggatttgccactgagagagggaattggggagaaaataacactcaaaaaaggaatggactatgtcctttcaacagaggagaaaaggaatatggaaggatataaataagatgggattctttgttcagttaacaaggtccaattcctttaacaaaattcggagtctttttttaatcatcaaaaatatgagaaaacgggtatttgcaaaatctcttcaatctatatttcaattctgtaaaacctacttgctacctgaaatatccctgaggtttctttctacagaaattaaccccaattggaacattttcccttttataattaaaatgtcgtcctgttctttctcaacaacctttcattctctgatttttccacctcagatttgcacaggacactctgaagaattattacaaacaggaccaaggcttgtagcctcttgggcattaaaattccaatagtggcaataaatttacccttagtggacccaccgaatgtagcagacatgaataaaatgcacttcagctgaacctggcagcaaatcgtggtagaagtctctctattaaaacaacatttatggtaatttcaggtgtctgccttgaataactggttgcttcagtgccctcttccttcacatttggcttgcctccctttgaatgtttttggcacatcacg

SEQ ID NO: 585827 - DNA, 4001 bp, Homo sapiens
ctcagagaccactttacacccagtcctttagtgtttctcagatacctgccattacccacagcacatattccatgtgatttgtgatgatgtcccttgcccaaatttatcaccaactctggcccttacctaagcctcttttttcttcttcagcgttctgaggtctcactggcccatctttgggtactgtgctccctcctcgcctcttctgaacccctcttgtttccttttcttcttcctctgagctctgcttctccttggtagaacgctctgagggaagaaaagagttggtcagagtggagaacagatcttccaacatgtcctctccctcctgagggccataagatgaggagattctgaggcaggcaagtcagctttcaggaaagttgttcctgggctcaccttgtcttccatgtccatgacttccacgtgtatgactgtgagcgtgtccatgtccatgactgtgaccatgtcctcctttcacatgtctcacaaatttctccacgacaagaaaggcaacaattccactgagaacccacagtcccacagacagaatggggccctggcctgggaatggaggcattgagacattaagggagatgtgcattccagactcctcctcctcaagtgcgggaggtgaggaatagggagagacggaccttccccagcaccccaactcccatccccatctgtctcttcctcaccactgtgggagtgtccatgtccgggttgctccagagtgtggtgagaatgaggttctggaagaaggggggaaaaccagatgagggaatatctgacacaatgagtgtgtatttgggggaatatcgaaaggtcagggatcataaaggagaaagaacccttttcctccaaagaacgaaataggttagatttgaggtagaagtcagaggttacttaccaagagcatgaggaatgaggtgcaggaaagcatctcccaggagcccaccggaagcaaaactgagcaagatctgaagtagagagcgatgccggggagagttcgactccacggggataaggaagaggacaaaaaatggagctgctgagatcagcactgtggcccccagtgcctggtgagggagagtcaaggtcaagtactgtggagtttcccaacaatccagaaccagcccttctctctcccatcccctggagactcacataagcccagagagtgacagcatccaggtcctgcttgatgcctggagccccagactccccatagcctccatggctatgctcatggtcatgtccatgtcctctgtggtagaggctctcatgggagtagccatggctatggccatggtgtaaatcctcatgtgaatgtccatggtcgtgatcgtgggtatgtccatgccagatgctctcgtgagtgtggccatggccatgggcatggctgtggccatggtggaaatcttcatgtgagtgcctgtggctgtggccatggaagtcctcttgcagatcgtcgtgcaggtcgtcatgacccccgagtccagccaccagaagccccaaggtcgcccaggtcagcagtcccacggccacccagtggggggcccccaggcctctggccatcacgctgaccagagggacagaggcagtgactccacttgactcaactctatacctacacagggtccgctttactccaatcgcgccctccgtccacctctatgggccgctctcccattcccttaagttcccacctacattgttcccaagactagttctctttatcccgaaccacctcccggatgtagggccctgggacactaatctttcaccagccactttacagactctctgggccctcgtctctacgactcattaggtgaggaaaaggcctggaaaggatggtagagaaaaaacagagaattctcaccggctccgggatcctctcctttcccggtttgcttggacgtggcagtcccgcctttagatcccgcgagaacaggaagttccgttccaccttcgccctaatgcctttaccaatatggcggcactccggtagcgacgaatccatcctgcactgacacgcatgcgcgagtgtggaggtgatttgaggggagggtgggcgaggcgggctaacaggccggaggagaccgcctcctcggtttccaactagacgagggggcgggaactcgcgccgagacttcccgtctgtacaaagatggctgccacattggcgctgtcattttggtactgagcagagcgacgggcttaattcgacccaatccaggccagagtctttctctcaggggcttcctcgtgctcagctaatcctccgatcaatccttgggaatccctgggacctcttcggtatccctactctcagccagggatcatgtcttgggccgctcgcccgcccttcctccctcagcggcatgccgcagggcagtgtgggccggtgggggtgcgaaaagaaatgcattgtggggtcgcgtcccggtggcggcggcgacggccctggctggatcccgcagcggcggcggcggcggcggtggcaggcggagaacaacaaaccccggagccggagccaggggaggctggacgggacgggatgggcgacagcgggcggggtgagtgccccagcagaagggcaggcgagccagtgaccgctttatctgcgacccctcccccacaccctcccccggtgctcttttccttgcgctcccgcccccttgtttgtaaacacgcgtcccctccctcccgagggccttagcaccctcccccccggggcggggcggggaaggggagcttccgccctcctagctgtgaccgcttgaggccttgggcaccggaggtcgcgggcctgggaagggcacgattcctcttaaacctcaggactttgggcgtttacaggcagatcctgcgtcttaggaggggtctctcctgcctgtctctttcccttgcacgctctggctacctggctttacgctgggaatagaggggctcgatggtctaccccacgtgctgccccacccacgagacaggtgtggctttgggatgacctggtattcattcaaatggattggttggaaaattttcctcacctgaactatcctcctctccttgtcaactccctcctctcaccacaatgaggagttacgctgtttttgggtttttttagccagtcaaatatagcagtgggaggttgtataccaattttagtgacacaaatgttaataagttctgataacccactaccatcggaccagccggagttacactgttgtttgacagcagggtgtctctgaacttggggatgggtggagtgggctgggtccggcacggtggggtattagagaattaaagtctctagttggatgtttgaagactcattttctttttttgtctcttctgtctcttgtgtgtctgtgtgcctgtacatacccctccctcagactcccgaagcccagacagctcctccccaaatccccttccccagggagtccctcccccttctcctcctgggccacccctacccccttcaacagctccatcccttggaggctctggggccccacccccacccccgatgccaccacccccactgggctctccctttccagtcatcagttcttccatggggtcccctggtctgccccctccagctcccccaggattctccgggcctgtcagcagcccccaggtgagaggttgtgaccaacttactgcctggccactttcattttcttgttttccttgtaaccccagatccttgtgtgaacttccccatggcccattgaccttccaatcctctaaccttgtcaggcctgtggtctttatgagaccccttgcctttcctgaggtgactgatctttcagtgcatgcttcctcccctaaaagaactctaatattctttgtttttgtgtgtgtgtgtgtgtttttttttttttttttttttgagatggagtcttgctctgttgcccaggctggagtgcagtggcacaatctcagctcactgcaacctctgcctcctgggttcaagcaat

SEQ ID NO: 585828 - DNA, 4001 bp, Homo sapiens
ggcctcgaaaggaggggtcgtatttgactggcttccctgagggacatgagaagaggtgtggaggatgagtctctctctgcatatcttgtcctgctgagtcctcctagccccaggatcctacccaggcctcaggtgtttggagggagatgggctagggcaggactggcaggaggggaaaactggggagcaggaaaggtaggatccaggcctggtcagcagctcagcagctccctgggagctccacccaggctgccatggggaggggaaggaaggcctttatagtttccggctcacatctcaaggcagtcagtctgggaaatggccttggtcccctgccctaccctggcacggttctcctgagtctccctttagctgggatgtgggactcccagtggctctcactccctcattctcatccctgcctcctccctaatccctccccagggaccacacagacccacagcccctcagggaggtcatggcctcttcccctatctgccccaggccctaccttaccctctggttcaaggctatggggaaagaaactggagacaaaggtgtcaaccccagcagggcctggggagggaagcggccctgtacatcctcactctggtgggacctcagtcccctggccacagtgtgctccgggctctgggccagcagtcagagtgacacctgagcccagccatagagattgcaggcacgttgagttcctggtcctccctgagtacacacacagggaggaggagggctgggcagtcagggttccttgtgggcactgaggagggagagccgagggctgggcaggagtctgggaaggagcgggtggggtccactttccccaggtgcgctggactctgtccctccatggctcatggacaatgattgacctgaagccgctccaggaagtctactcgggagtcctcactgcctgctcccctatggccctaagggactcaagcctctcctcgagaaggtccctcataggggttccttccccttcagaccagaagaccaggggggcctccgcaggtgagtccccagccttcactgctcgtggggatctggaggccagtccccagctccctctctcctcagaaccccagccccttttccttgcagattctggaaacaggctccctgctgtttctcccctcaggcttcacccttcacaggaaccccaggggccctgtccctattcctcagagtaccccaagaccagctcctgctcctagctcctcacagagacccctaggcaggaccccagccccctttccacaaagaccctcagccccaactcctcacagggacccccagcagaacccactccctctgccacttctcccagagaccctggcaggcagaggccagcccactcagggtcccctcactcctcaagggagccggcagaccacaagcagctttcgccctcagagacccagactccaggctgaacctcctcctccttacagggaccctggcctcactggttgcaggctctgcagcacaggacactcccagcatccagccctattctgctcagggccccaacctgccaccttccatctcggctttgtttcctagggccctgcccttagggacccagagtccaggcctgaaatacccccctcctcccaaggacctcagccccaactcttcagaggcacccagcttcactccccatgggctccccagcaacagccccagcccccgggccccatcctcctcccaggaccctgactccctccctccatggctcccggttcccgggccctcccctcagggacacagtactctccttagttcctctccctggagccagccccagacaccattcccaaagtacccgtcctcccctccctccacagggtcccgggcctcgccccagtctcaccgtaggcctcgtcatcctcgtcccgctgctttccccccatggctcagtctccggagtgattggagccctggagacctggcgtctcacctgctgcccgccccgccctcccacacgtcacagccccacccccgcctgtggtccccgacacactctagttccttcttctcaactttgtgcccagcgggctggggagctggagcctgggacgggggctcagggctatttcctgggggcactacggaccacagtgaacgacctggcatgctctgataagaaaacgctttataatctcgccaactaccttaactgccgtacactcccaacacgctcccgccaaagattaaagtgtggaaattggacctgttttttcctttttgagatggagtttcgctcttgttgcccaggctggtgtgcagtgactcaatcttggctcactgcaacctccgcctcctggcttcaagcggttctcctgcctcagtctctggagtagccaggattacaggtgcctgccaccacgcccagcaaattttttctattttgaaagatggggtttcaccaagttggccaggctggtcttgaactcctgatctcaggtgattcgcctgccttggcctcccaaagtgctgggattataggtgtcagccaccgtgcctgtgaaactggatcttcatagtggccccccacctccctgccccgcactgggcggccatcacaccagccacacctgtccagcctgcttcccatcctattctggcccttggacccacattccctctagccaagtatgctttctccccaccccaacacaaaaatcgcagtttattaccaaacccaacatttattgagaacaaaaggaaccagttggcatagaggcccgacttcaattcatcaaacttcaactgaggatggggaacacggggggtggccagccctgaagttgccctcccagggaggaaccagctctgggagggaggggctgtcagacctccagggcctggctgggatctctggtcaggaatgtgtgaaagggtggtggggagagaagatggcagcacccccaggcatgggctgcgagcagctggtggcagaggaggcggctgagctgtggccatccatgctggggagagagggtgtggtccgttctcatgtgttgacagggggcagggagccgagctcgggcagcagctcagggtgtgggtccaggcgggccagacggctctgctccagggcaatggcttcggctgagtgcttgcacttctcagagccacattggcaggtgaaatatttgcttttgatgtcccagaagcggtcgccatagtcaaacctgtcagaggaaaacaggagcttgtgggacctggacccagccaccaagagcccaccccgaagaccctgtggatcctgctccctgagagggacccgacacccaacctatcttctccagatgggatctgagccccttgtatgttctatggactttcagcatcagcattgcctggggactttttagaaatgcagaatcctgggccccatcccaagcctactgattcaaaatctctctgggaggcacaggactgtttccccaagtcctccaggaaatacttatgtacactgaaatctgagaagctctgcactactccatgcctggacaccaggtacatgccagccttcaggtcccaggtttgctgcatctcccaccccctggcagagcccctagagacccctagagtctcaccctagctcctccccagtccggatgtctcgggaactgaagaaggcgatgcgtggaaatcgcaggtcttggtgcagcatgaagacccggacgggaatgatgttggggtcacacaggtggttgatgaagcggctgatgttgccatagtaacgggcatctatgcagtacacctctccatcctggggcagggggatggcactcttcacatctcccccgaccctgcttgccctccccacccactgactccccagtccctcctccccaggtttccatttgctgacttcccagaggctcctgaaagccagccctggggagcagcagggtaaggagggtctcctgctcaccttgttgtctaagtcgaagaggtaagaatcatcc

SEQ ID NO: 585829 - DNA, 4001 bp, Homo sapiens
cagcaatggttcttaacgtggcctggagttgtcagattcagggaggctgaggtggggtggggacagcagggaaaggctgtggaagagcacggacaggtctggagcctgagttgggggggtgtctcctgcccaccctacctcgcctcgctcctgcactcctcttctcgcctttgtactcacttgttctcccccatgccacagtaggccccagtagagttcctggggtagaggacttgccgggggtctccatacaaccaggctgcagacagaggcacagatgagtcattggagggcagggacttagtggggcagttatgggaatggtccctccctgggttcctgtccctcacccactgccctggctctgagcagctggaaactcacccacaatccccaccacgatgtaacctagaatgaagagcaggaagaggacgcagcagatgacatctgtgcagcttctgagagagaaacgaaacgggaggctgagctaaggagacttggggaggtagggcttatggtctggaggggttaagggttagagagttgggtgatgctgcagcatgggcatcagtaggctttatttttatttttttattgcttttacttttttattttgagacagggtctcactctgtcacacagactggagtgcagtggtgcaatcttggctcactgcagcctctgcctcctgggttcaagcaattctcctgccttagcctcccgagtagctgggattacaggcgcgtgccactactgcccggctaattttttttaaatattttatttagaaaacctagccaggcacagtggctcacgactgtaatactagctacttgggaggctgaggcagggcaatcccttgaggccaggagtttgagaccagcctgggcaacatagtgagatcccatctcaaagaaattagcctggtgtgatggtgcatgcctgtagtcccagctactcggaaggctagggcaggaggatcacttgagcacaggagttcgagcctgcagtgaacccccatctccaaaacacaaaaagaaagaaaacctttttctgggtgggtaaactttcttctgaagtaaaagacagaaaagcacacaactcgcaagggctcagctgggtgagttctctcgcttgtgaagccggcacttaagtcaagaaacagaacatccccccagaactgggaagccctcgatgcctgctccagacacaacaatccccccagggcaccacccatctggggcaggagtttctctttttcacaagtttcctactaatattttagcaaatacaaagcaaatactggattccacactgcacccaccacccccgccagcccccggagcagtgcccagagctcacctgttcttgatggggcctcgaaaggaggggtcgtatttgactggcttccctgagggacatgagaagaggtgtggaggatgagtctctctctgcatatcttgtcctgctgagtcctcctagccccaggatcctacccaggcctcaggtgtttggagggagatgggctagggcaggactggcaggaggggaaaactggggagcaggaaaggtaggatccaggcctggtcagcagctcagcagctccctgggagctccacccaggctgccatggggaggggaaggaaggcctttatagtttccggctcacatctcaaggcagtcagtctgggaaatggccttggtcccctgccctaccctggcacggttctcctgagtctccctttagctgggatgtgggactcccagtggctctcactccctcattctcatccctgcctcctccctaatccctccccagggaccacacagacccacagcccctcagggaggtcatggcctcttcccctatctgccccaggccctaccttaccctctggttcaaggctatggggaaagaaactggagacaaaggtgtcaaccccagcagggcctggggagggaagcggccctgtacatcctcactctggtgggacctcagtcccctggccacagtgtgctccgggctctgggccagcagtcagagtgacacctgagcccagccatagagattgcaggcacgttgagttcctggtcctccctgagtacacacacagggaggaggagggctgggcagtcagggttccttgtgggcactgaggagggagagccgagggctgggcaggagtctgggaaggagcgggtggggtccactttccccaggtgcgctggactctgtccctccatggctcatggacaatgattgacctgaagccgctccaggaagtctactcgggagtcctcactgcctgctcccctatggccctaagggactcaagcctctcctcgagaaggtccctcataggggttccttccccttcagaccagaagaccaggggggcctccgcaggtgagtccccagccttcactgctcgtggggatctggaggccagtccccagctccctctctcctcagaaccccagccccttttccttgcagattctggaaacaggctccctgctgtttctcccctcaggcttcacccttcacaggaaccccaggggccctgtccctattcctcagagtaccccaagaccagctcctgctcctagctcctcacagagacccctaggcaggaccccagccccctttccacaaagaccctcagccccaactcctcacagggacccccagcagaacccactccctctgccacttctcccagagaccctggcaggcagaggccagcccactcagggtcccctcactcctcaagggagccggcagaccacaagcagctttcgccctcagagacccagactccaggctgaacctcctcctccttacagggaccctggcctcactggttgcaggctctgcagcacaggacactcccagcatccagccctattctgctcagggccccaacctgccaccttccatctcggctttgtttcctagggccctgcccttagggacccagagtccaggcctgaaatacccccctcctcccaaggacctcagccccaactcttcagaggcacccagcttcactccccatgggctccccagcaacagccccagcccccgggccccatcctcctcccaggaccctgactccctccctccatggctcccggttcccgggccctcccctcagggacacagtactctccttagttcctctccctggagccagccccagacaccattcccaaagtacccgtcctcccctccctccacagggtcccgggcctcgccccagtctcaccgtaggcctcgtcatcctcgtcccgctgctttccccccatggctcagtctccggagtgattggagccctggagacctggcgtctcacctgctgcccgccccgccctcccacacgtcacagccccacccccgcctgtggtccccgacacactctagttccttcttctcaactttgtgcccagcgggctggggagctggagcctgggacgggggctcagggctatttcctgggggcactacggaccacagtgaacgacctggcatgctctgataagaaaacgctttataatctcgccaactaccttaactgccgtacactcccaacacgctcccgccaaagattaaagtgtggaaattggacctgttttttcctttttgagatggagtttcgctcttgttgcccaggctggtgtgcagtgactcaatcttggctcactgcaacctccgcctcctggcttcaagcggttctcctgcctcagtctctggagtagccaggattacaggtgcctgccaccacgcccagcaaattttttctattttgaaagatggggtttcaccaagttggccaggctggtcttgaactcctgatctcaggtgattcgcctgccttggcctcccaaagtgctgggattataggtgtcagccaccgtgcctgtgaaactggatcttcatagtggccccccacctccctgccccgcactgggcggccatcacaccagccacacctgtccag

SEQ ID NO: 585830 - DNA, 4001 bp, Homo sapiens
acagatttaatatttaccagcatctctacttaaccatgttattactcaaaatgacaaaatgtgtactatttagcttcagcttctttcttcttcttggccttttaaaggaccatttttcagtgttttgctagtgcagtcaatgagcaagcaactgagcctaaacacagtgcagaactcccaaataaccacacacaatcaagttactaggaaaacaagtattacaagaaccaggcacggactttgtaaaaactcatcacctgaaaaggttacataggataaatataatcttgactcaatcaagttactatattgaaaagtgcttcataaaaataatctagttacagtattcccgcatgattcttctagtaattcagtacctgttacgacagtgaagtaacctgctgatgctgtgtggctcagtctagtcaaatattatcagcctactgaaatgtgactcatttatatagtattgagatagaacagtaaagcttcaggaaaagtctaagtcaaataacacagaaatcttaaaggacattccccaaagagactgtctcctgctttagagaactaccctatttctcacccaataacgaaataaaccaattaaaaatatacacgatcttttcttaactacacaagacatttctttaaaaaaaaaagaaatatttcccttgagattacttacaagacattaaacataaatcagatctccaaacacaaaacatagcagctaaaaatagtatatctgtttcaaaggctgaggcagaagccctccaaccgaaaaaactaaaattaggttttttccatctctagatctttaaaatgaaccttcagcatttatgaggtacacaaatcagtgtccacatattctcccaaactagctggtcagagaaaacctaattactaaaatcttcagaaatacaaacccaccgtcctccaagagactcatgtaatgaaattcctcttcattctggctaataaccagactaaaaaacaatactactactaataaagacctttctccaattaatttattccgtaaaactcaaacccaccgaaaaagaccaccatactctttttcaggaagcagagataaaagccttgtacaaaagctgtcaggtgggcaggcaggtagggctccatctaggagaccaagaatccgagcccggagtgggaggacgtggtcacaccggagggtagaggaggggatccagacctaagcgcggccccacccacagagatagctatgagcagagctaggagggcaactctctaaccctaagctctgcccagacccgtgcccggttccgcgctcccagcctcgctcctacccccagccctgtggagggtccgagcatcgctaccctggcacctgctcaaacccgtgtctgggaggaggggaggctggggccactgacagggcctgcgggcctgacctcgccgccgcctctggcggacttgagggtcgacaggagccccgcgcccgcccgctcagccacccgccctccagtcagggcaggagccggccagcgaagccgaggcgtccgctcgggccccgagcgccgcagcggcgggaaggtcaccggtcgcaagaggccccgaccgtgggcagcgacgacgtccaagctacctttggcctcgcagtcggcgcagtacttgttgtcctcctccctcagaagcttggataggatgagctggtgctgctcgttcagcttctgagccttctcccgacaggagcgcgtcgccatctcggcagcggggcggggagcctggggcagctacggcggcggcggacgctggctggagccgggcagagtgaacgcacctggcgccgccgggaccgcgggcggactcagcccaggaagcggcagcggcagctggaacgggaggaggggcggcggcggcggtggcggtggtagcgccgacgtgtcccgcctccttgaccggcctgccggcacgcaccaccctagccggcgaggggagggggagggggactgggtcgcgccgaggcttccgggtggcgcggaggaaggaacccgggcgccgagcgcgctgcgcatgcgccgaacctacggggcccgggctgccgagtctttttgcaaaaaggccttctgcccaaggtgattcccgaaaggtagctggcactgcctcatacgagctttccccccttttgagatgtgatggtccgcaagggcctctagtaaaacccagtaatggaagaccttttacaagaagcctactttgacttgcccatttgcctttgctcttgctggcacaacattggaaatgcagaaataactagcgactgggtgggttcatttactcattcgaggtttattcgcctgcagtttagaagctggagacacggatggaagaaaagaggaaaaacggtctcttacattttaagggcgagaaataatctagtagtgacatgtattaggggataacatttcattgagtgattactctgttaaacgaactgttagctcatttaaccctttccccaaccttatgatattgttatcctcattacacaggggaggaaagtgaggcatagaggagttaagtaacctgaccagattacagaactactagtggaggagttgagatttaaatccaaagcagtctggctccagagtctgaaagacctggcagtaagcccttccataagggggaaagtgtgaccaggaacccaagtactaggcggtgatactttaacaagaagctgtgtaaatagtgatccttaatgcaagagaaagagaactaaagaaaacacttttcattggaacccagaccctaatccaggctcatgaagtttgaactccgggtgacgcagtttcgatgatttggcatgttgtatattatgaggaagttctaatatggggcttatgcaagccaaataaacacagtccttgcctgcgatgaagcagatgctaagaaaggcaatgagcaagagtcggtcttacacttcttagtaaggccaatttctagcccctgtccctgcataaaagtgaccctcattgctacctagccctgttcttggcacaggggctcaaaaatgtttctggaattaaattgaatggatatggcaatgaagatgctcagtaattaaacaaattagagcttatactacatagctctgacaaataactactagggagatattggtgagttccaatgaacagaaaaaaacattatgtgggaggtagaacttacgagccttgtcctgaagatacgctggatttagatggggactggggagggagatattaagaaagagcagcttgcacaaaagcatgaagacctgaagtaccttggaaaacagactggaacaaaaggtactacttttgagataaggctgcataagtaaactatgatagggttatggaagacttgggaagccagacaaagtagtctggccttgatgcaaattgacagtagaaaacctgtagatttttgccaggcacagtggctcacgcctgtaatcccagcactttgggaggccgaggcaggcggatcacctgaggtggggagttcgagaccatcctgaccaacatggagaaaccctgtctctactgataatacaaaattagccgggtgtagtggcgcatgcctgtttaatcccagctactcaggagactgaggcaggagaatcgcttgaacccgggaggcagaggttgcagtgagcggagatcaggccattgcactccagcctgggcaacaagagcaaaactccttccccacccaccccccccccaaaaaaagaaaaagaaaacctgtagattcttcaagtaggataatagcataataaaaaggatcttttgggaaagttagtcctgcagtaaccagtaaacaaacaccattttttgagtacctctcctccctacaaaaattctgttcagcactgtgaggactcagaaaaacagaatacaggtttaccaccaaaaaacaaccttcaggatggattgaagggtcacagcaatgtccagtacaaatacttg

SEQ ID NO: 585831 - DNA, 4001 bp, Homo sapiens
aaatcatgtaacaagccaagaattctactaaaaaagcctccataatgtacttcaaccttaccaaatactcaaaaactgtgaaaatatatttacatcaattgctctatcatgtcgaatttttcaattattacaaccatgaaatcaagtctaattaaatcaataagtggccttacctgtgattttttgcctgaaagatcaagataaaacaatgaaattatttacaagatcattttaatattcttctagatttagtagcaacaagaaaaaaataatccttgtaaattatactgtggagttcatgcccttcaagctgcacccttgtactcttgataccattctcttctctcccacttccttcacttctcaaaacaagtaaaccaacaaaaggccagacaaaaccaaaatacaaaagacattcattcaatatatatctactgatttccgtggcaatacaaacactgagcaaaacgaatacttcctattcttcaggtccaaagaagtaaaacttttgatcctaatttaagaagtacatgattctcttctccccacctcaaaagagtaaataaaaaaaaaaaaagttaacatggttaataatggcttttaaaaatctgtattattttagaaagcattagtgaaaatctgattttataaagtacttttttggagacagaaatttgaacaaaaattaaattatttttaataaagtctgtagatgaaggaaggttaattctgaaactgttactattcgacttttaatgaacagatttaatatttaccagcatctctacttaaccatgttattactcaaaatgacaaaatgtgtactatttagcttcagcttctttcttcttcttggccttttaaaggaccatttttcagtgttttgctagtgcagtcaatgagcaagcaactgagcctaaacacagtgcagaactcccaaataaccacacacaatcaagttactaggaaaacaagtattacaagaaccaggcacggactttgtaaaaactcatcacctgaaaaggttacataggataaatataatcttgactcaatcaagttactatattgaaaagtgcttcataaaaataatctagttacagtattcccgcatgattcttctagtaattcagtacctgttacgacagtgaagtaacctgctgatgctgtgtggctcagtctagtcaaatattatcagcctactgaaatgtgactcatttatatagtattgagatagaacagtaaagcttcaggaaaagtctaagtcaaataacacagaaatcttaaaggacattccccaaagagactgtctcctgctttagagaactaccctatttctcacccaataacgaaataaaccaattaaaaatatacacgatcttttcttaactacacaagacatttctttaaaaaaaaaagaaatatttcccttgagattacttacaagacattaaacataaatcagatctccaaacacaaaacatagcagctaaaaatagtatatctgtttcaaaggctgaggcagaagccctccaaccgaaaaaactaaaattaggttttttccatctctagatctttaaaatgaaccttcagcatttatgaggtacacaaatcagtgtccacatattctcccaaactagctggtcagagaaaacctaattactaaaatcttcagaaatacaaacccaccgtcctccaagagactcatgtaatgaaattcctcttcattctggctaataaccagactaaaaaacaatactactactaataaagacctttctccaattaatttattccgtaaaactcaaacccaccgaaaaagaccaccatactctttttcaggaagcagagataaaagccttgtacaaaagctgtcaggtgggcaggcaggtagggctccatctaggagaccaagaatccgagcccggagtgggaggacgtggtcacaccggagggtagaggaggggatccagacctaagcgcggccccacccacagagatagctatgagcagagctaggagggcaactctctaaccctaagctctgcccagacccgtgcccggttccgcgctcccagcctcgctcctacccccagccctgtggagggtccgagcatcgctaccctggcacctgctcaaacccgtgtctgggaggaggggaggctggggccactgacagggcctgcgggcctgacctcgccgccgcctctggcggacttgagggtcgacaggagccccgcgcccgcccgctcagccacccgccctccagtcagggcaggagccggccagcgaagccgaggcgtccgctcgggccccgagcgccgcagcggcgggaaggtcaccggtcgcaagaggccccgaccgtgggcagcgacgacgtccaagctacctttggcctcgcagtcggcgcagtacttgttgtcctcctccctcagaagcttggataggatgagctggtgctgctcgttcagcttctgagccttctcccgacaggagcgcgtcgccatctcggcagcggggcggggagcctggggcagctacggcggcggcggacgctggctggagccgggcagagtgaacgcacctggcgccgccgggaccgcgggcggactcagcccaggaagcggcagcggcagctggaacgggaggaggggcggcggcggcggtggcggtggtagcgccgacgtgtcccgcctccttgaccggcctgccggcacgcaccaccctagccggcgaggggagggggagggggactgggtcgcgccgaggcttccgggtggcgcggaggaaggaacccgggcgccgagcgcgctgcgcatgcgccgaacctacggggcccgggctgccgagtctttttgcaaaaaggccttctgcccaaggtgattcccgaaaggtagctggcactgcctcatacgagctttccccccttttgagatgtgatggtccgcaagggcctctagtaaaacccagtaatggaagaccttttacaagaagcctactttgacttgcccatttgcctttgctcttgctggcacaacattggaaatgcagaaataactagcgactgggtgggttcatttactcattcgaggtttattcgcctgcagtttagaagctggagacacggatggaagaaaagaggaaaaacggtctcttacattttaagggcgagaaataatctagtagtgacatgtattaggggataacatttcattgagtgattactctgttaaacgaactgttagctcatttaaccctttccccaaccttatgatattgttatcctcattacacaggggaggaaagtgaggcatagaggagttaagtaacctgaccagattacagaactactagtggaggagttgagatttaaatccaaagcagtctggctccagagtctgaaagacctggcagtaagcccttccataagggggaaagtgtgaccaggaacccaagtactaggcggtgatactttaacaagaagctgtgtaaatagtgatccttaatgcaagagaaagagaactaaagaaaacacttttcattggaacccagaccctaatccaggctcatgaagtttgaactccgggtgacgcagtttcgatgatttggcatgttgtatattatgaggaagttctaatatggggcttatgcaagccaaataaacacagtccttgcctgcgatgaagcagatgctaagaaaggcaatgagcaagagtcggtcttacacttcttagtaaggccaatttctagcccctgtccctgcataaaagtgaccctcattgctacctagccctgttcttggcacaggggctcaaaaatgtttctggaattaaattgaatggatatggcaatgaagatgctcagtaattaaacaaattagagcttatactacatagctctgacaaataactactagggagatattggtgagttccaatgaacagaaaaaaacattatgtgggaggtagaacttacgagccttgtcctgaagatacgctgga

SEQ ID NO: 585832 - DNA, 4001 bp, Homo sapiens
agagatgagagagcaatttggatttctgaagccataaaggtaaatttggcaaatatcctagtgaaggtatggtagggtctacgtgtcacattcattcccatgtccaggtagctcgcattttcaaactagaaagggtaataaatgctttccctccttccccacatccaaacatatcacaaggattttgttttccttacttcaagaaccttaaacatctacaattagttcaatattctaatattcttctgcttgttgatatcacaagcagaaaattgagaaaggttattcaattgctttatctcatcagaaaagaaaggctgtaaattagaagctttaacctggtgttacagaaaagcacaacaaattttaaacatacatacaaggccggatgcagtgactcatgcctgtaatcccagcactttgggaggccaaggcgggtagatcacatgaggtcaggagttcaagaccagcctgaccaacacggttaaaccccatctctactaaaaatacaaaaattagctgggcatggtggcgggcacctgtaatcccggctacagctactcgagagtctgaggcaggagaatcacttaaacccaggaggcagaggttgcagtgggccaagatcaggccactgcattgcactcctgcctgggcaacaagagcgagactccatctcaaaaaataaaataaacatataagtttataaatacatacacatgcatatgcacaagtgcacacatatattccacagcgtcactaagtattaatttgtacatttatcgtgtaatgaacaagccctatagtatctgtatgaattctgacccattattacatcaacctgaacccatacttcagtcttataaatatgtgtaaactcactgacacgtgttctacgtactttttagattttcacaattgcttagccactttgctaagagacctgtggttatcagctactatacatgtacaaagaaatcaaaaagatctaaaattgggctaccattatttgaagaaaaaagttgaacgtcctctcattccaagaaggaaaatacgcacagcattcgaaatagcaccattattatagaactgagagttaggttacccgaccctgcaagtttaatatagccggtgtttctaagctctgcctggtctccacatctctgcttggaattgagtttaaggctgaactctaagtaaacaatttcacgcgtgctgaaaacccaactctaccccactcgctgatgaaacgaaggtgacacctctcattattaaggtcagaatctgtgcaaatgaaaaaggaccaatcaatcacttcaccttcgaatgcaggccaaggttacaatctgggcagcctgtggtgagaatgaaagagcagacgctgccggtgaagcaaggctgagtttcactcagaggcaggaagccctggagcctgtcctttccctccccaggatgcccgagggccggccatgagtaaagggcccacctctgcgctcagccctagaggctaagggacaacagttgattttaagacaattgtccgtccacgcccttttgtttttttcaaaaaaacaaacaacaaaaaaaaccccagcagatcagcgacccggcgtgtggaactgcctcgcggctaccgcccccactcaccgcacaccatcagcagcaggacgatcagcagcgtggccacgaacacaagcagagtcagcccgacgctgtgccacatcttgggggcagaagggcagtcggctcggggcggctggcgcggacggcggtgagcgcgggcggcggcgcgtcctgcgcttcagcggcgggcgccaggcgcggctgggcgccggggcggcatgggcggctggcgccccctcggcagcgcccccagggggtggggcggcgcaaaggcgggcactgtgggaccgcccgcccgcccgatccttttcccgccggggtggccagagcgcgggaggcaggcgggcctcagggcgcctctagtccctcatcgccccggagagccgaggccgcggcacccagagaccccagcggtcggatgcgcttccatggcggacgccgcgcgcctgtagggaggacagagggtaagcacgggtacacacggcggccacaaggccctcgtcgctgtccacccgtgtctctgagaccccagggatgccagatgtcagcgtcgcccggccgcggctgtagcggcttctccgccccaggccccctaccgctggggcagctcatcaccaagctcgcctcctccgcggcgcggggtcggctgggagatggagtgcagagcctggtggagtcgggacggcgttgtctcgcagggactacaactcccagaatgcaccgccactcgggcttcgctgctttcattctcgggcggctctgcctttggtcttgctcaagtcgcctcagtcggacgaccgtgggctggccttctccaaagccgcggatctggctgcccgtcctgctgaggcgccagtgagatttcaaccattactccgtatacaaagtcgttttgtttctagccgtaatcgatgaagtacggcgagagaggaaagaggaggcggctgcctgaaaaactggttgctcgtgcacctagccctgttgccgggggcgaaggttggctatttgggacttggaggaagaactcaggtccctgccgcagacgcgggtcaggacacgaaatctcattttccccctgcaacagatgttatgttctatcttttcgtaagtaaagcatttcagaaatggcccgcgggtgacttaaggacagctgcactgccctcaaatcacctgcctgagttgtaagttagacccagctgcctccttgagaccaagcttggagattttgccgcactggcttacacctctacgaaacaagacactgtagtaatctcaactactgtatctccacccaaaattgaaactccccacttccgccagattacattcatttgttaaagaggtgcccccagaagaatagagggtaaatgtgtccctcttttagaaggaatcagagccttcgagttttcctgtgattcttttgctccctgagatacctttttactcttctaaaaattacagtttcctgtcttctgtctccaaaaacaaacacaaaagttctaagcagcaatcccttgatttaataaatgtatcctgccatacccagctgccctactatgtgaactgtattccctaagaagcaacattaggaacaaataccatgtataaaaatacattaaaggataattacttgctttgcaacagatttaatatagattcctgtgaagagaatgaacccagtgcaattaagatatatttacaaaaaatcagtgtgtgcttttttcatgggtggttcaattatgttgcataattaaaacacattttattaaaagccagttgaaaatacgcgtcagggctaggcgaggtggctcacgcctgtaatcccagcactttgggaggctaaggcgagcagatcacctgaagtcaggagttcgagaccagcctggccaacatggtgaaaccctgtctctactaaaaatacaaaaattagccgggggtagtggtgggcgcctgtaattccagctactcaggaggctgaggcaggagaatcgcttgaacccaggaggccaaggttgcagtgtgccgagatcacaccactgcactccagcttgggcaacagagagactcttatcaaaaaaaaaaaaaaaaagaaaagaaaagaaaacagccatcggaagaactaaaataatttattttaaaggacctttttctctttgattcacatatattggaatacctataggggccaggcactgttctaagtgctggggatacagcagtgaataagacaaagtgcctttactcaagatgcttatatgacagttggaaaaaaacagacaataagcataaatagagaaatctcaggaactgctattaatagcaagacagtgtgataaatgtaggtgtgttattttagcttgttgggggatcagggaaggtct

SEQ ID NO: 585833 - DNA, 4001 bp, Homo sapiens
cacatatctacaactatctgatctttgacaaacctgagaaaaacaagcaatggggaaaggattccctatttaataaatggtgctgggaaaactggctagccatatgtagaaagctgaaactggatcccttccttacaccttatacaaaaatcaattcaagatggattaaagacttaaacgttagacctaaaaccataaaaaccctagaagaaaacctaagcattaccattcaggacataggcatgggcaaggacttcatgtctaaaacaccaaaagcaatagcaaccaaagccaaaattgacaaataggatctaattaaagagcttctgcacagcaaaagaaactaccatcagagtgaacaggcaacctacaaaatgggagaaaattttcacaacctattcatctgacaaagggctaatatccagaatctacaatcaactcaagcaaatttacaagacaaaaacaaagaaccccatcaaaaagtgggcgaaggacatgaacagacacttctcaaaagaagacatttatgcagccaaaacacacatgaaaaaatgctcaccatcactggccatcagagaaatgcaaatcaaaaccacaatgagataccatctcacagcagttagaatggcaatcattaaaaagtcaggaaacaacaggtgctggagaggctgtggagaaacaggaacacttttacactgttggtggcctgtaaaccagtacaaccattgtggaagtcagtgtggcgattcctcagggatctagaactagaaataccatttgacccagccatcccattactgggtatatacccaaaggactataaatcatgctgctgtaaagacacaagcacacgtatgtttattgcggcattattcacaatagcaaagacctggaaccaacccaaatgtccaacaatgatagactggattaagaaaatgtggcacatatacaccatgtaatactatgcagccataaaaaatgatgagttcatgtcctttgtagggacatggatgaaattggaaatcatcattctcagtaaactatcgcaagaacaaaaaagcaaacatcacatattctcactcataggtgggaattgaacaatgggaacacatggacacaggaaggggaacatcacactctgaggtctgttgtggggtggggggaggggggagggatagcattgggagatatacctaatgttagatgtccagttggtgggtgcatcgcaccagcatggcacatgtatacatatgtaactaacctgcacattgtgcacatgtaccctaaaacttataataataacaaataaataaataaacaaaacaaaacaaaagtatctttccacctcttggatgtagtactgtctctgaaaaaaggggaaaggctttgctggcgacagcctgagtactgacaatctgagtctcatctggcttcccccaatgtcatggactactgttcggtgccgaaggcttactcaaagacagacgcattggaagcctccaaaagaaaacttcattccgttaagttctacacattgtgttgcagggctgaaaaagcacgagtgtccgcactatgacaaaagaaaagcggcgtctcctcaaaacaccaccatgttcccctatgagtctggtgagccaagacactaagaaactgcaggaaacgagagagttctcggggtgggggtgtccatggatgaagcaccgaacaaactggagcccgcaaggtgagtacgggaaatgggctctgtggggccagagagcttcaccgacttggggtgcgggtacagggagtccacggagaggcaaagatttgggctatccgagaggacgctccctccctgggagggagaccggcagggcagctgggaagggcagagacgggagcgtgatggtgcggccgccctggcccctccaggccggcgcccagccactcaacaccaccgaagccgccgcttacctttcgcggggtcacctcctctcctcgcccgagacgccccgccccgcttcgccgccccgcctgctagagagagcggcggagggcgccccgcccggcgccacagcgtcccctgtcttccggaggctgcggcgcagcggcgcggggctgcggggacccatccagtgctagcctttccggttctgaggacctcgcgcccctccttggggtctgcgggctgaagtgtgcaagggacgtttttgctttcttccctttttgacctttagttttccacctcccaacttcaaattacgttccagttcggtgtgtatgtttgtataaataaaaggagacatctcctagaagtatgtttatttcatgaaagtggaaagcattctgatttgggaaagaaagctagatctgatttcttcctacccctactttaggggaacagtcatttaagtgtagagttaatactctgccattacgttagggccttgagagtccaagatgcaggatgtatgcaggtgcagttgagacaagaatagatatagggatgctggtttgcacatactttgctgatgtttaagtttgttgggatacacgtgaaaactgatgtggtttggctctgtgtccccacccaaatctcatatggaataatagcccccttgtgttgaaggaggggcctggtgagaggtcactgaatcatggggccgacttcccccttgccattcccatgatggagttctcagaagatgtttgtttataagagtgtagcacttcccccttcacactctctctctttctctctctctcctgcaccacggtaagacgtgcttgtttcctcttccaccatgattgtaagtttcctgaggcctctggagccatacctcctgtacagcctgtggaactgtgagctaatgaaacctcttttctttataagttacccagcctcaggtggttctttctagcagtgtgagaagagactaatacaaaaaccaaaaataaaattctaagcaccaccatcaccaacccacccctgaaaggaatggacctctgtcttggccaaggtaatctcaaaaaaaccctgaaaaatgagttcaggccctgatgggaaggggtgggcggttggatatgcctcattataccttcctcccgttggaggttagacacaactgaccagcattaacattaaaacggagatcgtaagactggtaaaatatactgtagcaataagaaaattccaacctgactctggaataacatcacgtgacacatagtgggacctgaaagaaataaaaatatgttaccccaaaatatatttatttgactattttgaaatggcctcgcaaagctgtctcttgttggggaaaacttacattctatagaaaatctctttcccttactagatcttttttttttttttttttgagatggagtgtcggagtgtcactctgtcacccaggctggagtgcagtggcatgatctcggctcactgcaacctccacctcctgggttcaagcaattctcctgcctcatcctcccgagtagctgggactacaggtgtatgccaccaagcctagctaatttttgcatttttaatagagacagagtttcaccatattggtcaggctggtctcgaactcctgacctcaggcaatccacccacctcggcctcccaaagtgctgggattacaggcgtgagccactgtgcctggccccttactaggtcttttccagagagtctgacatcttttaaggtctgataagagacattcacatctattctttgaagccagctacccggaggctttatctacataaggagaaccttggctgccacaacacccccgcttaccttaactccagctggcttcacatcttcaggcagagcttaactctttcaactaattgaaaatgtgaaaaatctttgaattcatctttgacctggaagcccacccccacgctgctttgagatgggccaaaccaatgtataccttacatgtattgatacatgtctttgcctgtaacttccatttctctaaaatgtataaaatcaagctgtagcc

SEQ ID NO: 585834 - DNA, 4001 bp, Homo sapiens
atacatttatacctcagaattatctaaataaaataccatagacccatttacatgttacatattacagatgtttttccaggaatgagtaaaactataaaacagattcaccctctttttgcagagtctatcccaaataccagatgtcccactgaattaactggcctgtaatagctgtgaagtagaggccaataagggatcttgatatccatgaggctatctagacctgtacttgctgcagtttttgaaatactgaaaatttcatccagccagagatgaaacttggaaactacaggaagtctccaagtccccgatgatgacatcagcatcgttttattgtccctgggacgttcaatgtcaatgggaggctgagatgcagtgagtgttacggatgggaatctttgcaacaactctgaaaaacatttcgacttggaagacactgaagggaagccatggttatgatcttggggatttcttattttctcttcctttttggaggctacttccggggttcagtggtaatgaatggctgggtgacaagagcatccaacagactggtcttagggcagtggaggataaactgacttaacaaagaaaaggatttatcacatgaatattatagagtgaggcagaatatggcttgacccctcagcaaaagggctgttcataaaaatgagacacacgaaaaatgaaaggctaggggcatatttgagtaagttgtgatgaaaaacttgattccatgacatactgtctgtgtctcctaggatttctttatgttccaaatctcatcttaggaagaaatatccctcattgcacttctgttaggttatatattatagcattagtgatctaagattaccacaaaagcttggcaagtccaagaaatgccttcatgtatgttattacataaacagatgttcaaagaggagggtttttcaaatttgttttaatatgacactatccaaattaagaaatatgactggtctttgttgattttgctaaaatagttattaaccttgatgatattaatctcatgtgtacttggcacagtattaacacatagtctatctagttacagcccagtttcattaattttaattatagcagaataaacagtgtcaatccaagacccgaatgtccattccaaatcaccttaagcttcctgagttatttgtttggtttggtttttttccaccttaagactataatcccatggaacgtttacaccaaggtcaagtatttatctatcagggctttacatttacaaagactgtgacagcagaatgtttggaacattccctgaccagaagttcagtggatgagaaagttgtgtgtgtgcacacacgggcgcatacacacgcacggacatgcacacacatggccacataaacacatctgtcatgtaaagaaggcagaccatgaacaatgttttcacatatgtgactctattgccttgagagagagagacaagcaaccatatgtcaaaattgctgattcacagtatgtctgtgaggtgctacacgtgagggccccctacagcagaccttcacatctcagcacaagatccacacagtggaaaggatcaaacttggccaaattgatcaaggaacttgagagaacactgattgagaagtacctacaaaatatatatatatatgtttctcctggccagaaaacactgacagtgcatcggtatatttcaagatgtgctgtgggaaaggatgcccaagttcttccttgtgtggcctcacacttaccctcaatcagtttgatcctgaagtaggcgatgaggaggagcagcagcaaagtcacggggaggaagaccccaaagaacaggaaccagccagggagctccctcatgaaagctgacagcacagagctcattgccaaccacacagaccccacggggaccatgggagtcacactcaggaccagggcagctttcctctgagtctgtacttgttttcttctggggctccggcctttgctcagcatgtctcagtggaattttttgtggactttgctctatttaaatagtctgatgaatgctgataggattgctggcaggttactctgtaactcagctactaattgtagaggaattgaaaggtccatcttccaagctctttcagagataagtatgtatctggcagcgggggaatgaccttgggaagctgagtttttttgtgataagtttatttggaatgaaaattacccaaccaagcaaaacttgttgttatgtatattctttctatgtattctcagacacagaagagttttccctgtatttcctaaattttagagttaaaaatttcttaatagttatgccactgtacctaagtacttatgtctagaaaaaagtgaatgttcctttatacatagttgatacaattaataccaaggaaagagaaacaaggcttttcccacaagtagaaattcttcctcatatatcctactcagaatacttctctgagaagtgcattggtttattcatttattcaacaaacatttaattctactagaacccaacttctgaactagatgctgggtatacaaagaagagtaagtcatggcccctggcctttaagagtggagatagacaaacagagaatggccacagtgtccgtggcggagtggcccatgatgtagccccatctccttcttcctgaggtacattcgtccttgctggctgcatgaggtcatatactctcctctgctctactgggcctttcctgtggtccaccattcgcagttagaaggtggcctctcattgatagtggtatgggttgtgtggtaactccagagtttctgggaaaagaaagggcaatcaatggaccaatgtcaaagttgacattgacttgttgactatgttgagttgtcattgactgctttagtgaaaaatttccaaaaatattggtctaaaaatgaaaactgactaaaagagtcatattcaaaagatgccctggagaatttggaagaatgtggggaagagaaactggcagccaccttcttgggctcattccttctgtcacactctaaccctgtccctggcgccctttagtggtggctggaggagtctatcaagggcaagccgctgtcagtgcctcccacattcttgcatcagggactttgcatggtcatgcagtcttagccccagctgtaaagtttgcaccctaatttacaaaataataagactggagagggtctcagggtacatgcctgcattcctgatcaatgaagagttagcaacttctctttcagaagagagacatcttaatttcaggaggaacccttcagaatacctgagtttaagtcagcattcatttactcacgtatttctcttctcccactctgcaaacctgtgaatggtgttactgctattatacttgcatgccttccattgagatgtttctctggtgctctttcagtttgaacaggatgctaatttgtaaagtgtcaatcttcaaagaacctctgtgagcaagtgacattaccagggagatgtcaggcagctgttaggcagactgtttgtcatattctttcttcctgtttcatttccattcagcaagccttcattgaatgcctaaacaaaggtaagttaggggaacaggaaaataaatgacaataatgttagcttccagatcaacatataaacaaagtatagtggaagcactgaagagagactgattaattccagccatggaattgggctgggcacagtggctcatgcctgtaatctcagcactttgggaggctgaggtgggtggattgcttgagctcaggagtttgagaccagcctgggaaacatggtgaaatcctgtctctacaaaagataaaacattagccaagtgccgtggcatacacctgtagtcctagctactcgggaggctgaggtgggaggattgcttgagcctggggaggtcaaggctgcagtgagccatgatcgtgccactgcactccacagcctgggtgacagaatgagacctggctaagaaaaaaagaaa

SEQ ID NO: 585835 - DNA, 4001 bp, Homo sapiens
tgaaaatccgtggcaactgtaggtacctgctgctacagtcctggaagaaaatgctatgatctcctttggagaattggccttagtttctctgtctcctctagtgtgctttaagagtatgtggggggtctttttgtgagtgtatacgtgagtatatttatgtctagatgcatgtacagatgtgcatatacatgaatgcctccagtgagtatcctctgagggccccctctggggagataaaggatcttcagggaaagcctgagtgtgtgaaaacctccttggagccccagttagcagtttctaatctacaagtcatttgtgagacacaaggcagggaccccgggctgctgcagaagaatttgaggtatgagcaatgaactcacaaaccatccttcacactgctaaaacgcaaaagaaagaagacgaagaaaaagaaaaagaaaaagaaaagatgcccacatgactgttttaaatttgctgaaaggcagaaccgaccacagcttatttcaaccatctttattttcaatacaataaacacctttaggacaagtccccggccacttaaaaaagacggctgtccaccagaggcgttctcactaccttcgtgttttctcaaacacttgttcaaaaacacatttaagtggaatgttttcgtttctggcgattgcattaatgatgggtttgcaaaccctgcaagcccaggaggacggctggagctgggggctgcagacacccggccttggcccagcggccgccgcgggttggcttggccggcgggggcttggctcagccccctctacatagctcctcgtttgacaccgcgtgcgttggccgggccaaggctgtcgcatagaagttacagctcagaaagaaaaacacacagcggtcaaccgcggtgaccctcgcgctcaggagcgcagcatccctgccacgaggaagaacccagaggccccgcagagcggggagccgccgcctgcctccagttctgtcctgagaagggaagaaagcgcttctctaataacactcaggcccgtgaagaatcatctgtaacctcatctgcttcttcctcggctcacttacgagggtctctgggagagtcagacccacgagtggggcccacgactggcagccccttcagccggcgagaggcccgggatccgcgcggcgcacgagcccaaagcggtcgggagaacacgctccaggccgggtccccgtgggcgaggtgggcgcccagtcccggcgggtctgtcttggccttgggacagtccgcggggcggcgccggcgctcccagacctggttccccacaggctcaggcccagcagtgagtgcgggacacccgagcgcacccgcagctcccacttgtccggggtctgcaggaccccaggatcctctcacagccgggtcagagcccccgaggcaggtggggtcccagccgggtggaacccgaggagcccgtcgcagccgcagcaggaccccggcgggcagggtccccagaagcccatcccagccgggtcccaggcgcgcacgctgcgtcctacctgctccagcctcgccggcaggcgaaggctccacggcccccggggccacctgctccccgtgcccaggcgcctgggcctggagcggggcgcggggacccgaacccggccggctgcaagaggcggcaccacttgagctccaggtcccgcgggcccgggcttaccgtgagcgccgagaacttctgagcgggcaccggcgggagcagcccagcgagcagcggcagccagcagagctgggggagcagcatggtggcggaggtggcgggagcgggagatcggccgcgtcctgcgccctggcactgcagccgggagagcccagtgggcgagcgcggctgggcgggcgcgtggaggggcggctccgcgatgctctccccaccgctcccggcggcccggctggagcagctcccctgcaggcacccagaggtcctccgcgttctttgcgtccgccctcgctcctgtcaaataccccggagcttcccggatcctcccctcccgcccgcctctctccctccccctctcctcccccagccccacctcccagcgcccgctgccgcgcccgctccgctccggtgcccgctgcggcccagaggcctccctggcgcgggtctgcggagcgagaggtggagcgggggccaccagggctgcgcagtggcctgtccgggctgtctctgtgcctccttccccgcgcgcactctcacacacacacgtgcacacttacacacacgcacacccaggcacacgcacgcactcatacccacgcgcgcgcaccctcggggggcttccaagcacaaccacgggacgcaccgcgccctcctcacgccccagggtccaggcccggtccgcgcaggatcagcccagcgggacttttcatccacaaaggttaacgccaagccttggccggtccccagactccggggttctccttgacctctgccctctaaggccccctggtccagcccagaacattgcctctcagaggtgctgaaggatcagcggcgctccagcaaaggcagctgggaacacatgtccaggaaaggctgcgccgggggcagcccgcctttggcatctttacacggggttatccactgcagggatgggggaatttaggtcctaaagatccggggtctgacctgggctgtagccttgatcctctcaagtcgggggagcatgtggttgggcatcattcacagacacatgtggctgtttttaaacagctctgtcaaagcatttcaggtgtttgtgcggggagcacagggcttgtggaggttgtaaactcacccacgaagactacgttggaaaccaggaaatttttgcacacccagactctggataatatccactgcagacaacattgctgacatagtttagccttggcttataactttacaggaaaaagccctaattctgtctcacacagaaagccagaagagtgaagatttgttcaagaacaatgaatcaattgacttgtcaggggcattgggaaaagcacaaaacacagaaaatccaaatctgaggtttcatccgatgtctagcccactgctttggctatgaactttgggggagggggctgtatcagcaagttctgggactggctgctgaggcaaaggcaatgctattgcaacctttcccacacaattttatcaggaaagtgatgtccgtcgggccacggaaagacgggaaagaaatgcaccttttcctgaaggagggctactctcagaattctccttaaaattccaaagcccagggaatctattaagcacttaaacacattcctcctggtttaaggacttagaaggaaattataataaaactcttgagggactgctcctgggtccagaaaaacaggtgagcagagcagctgcaaatgattaagtaaataggaatcactgttagggaactgcagtgaaaattaaagtaaaaagaaaataaacactacataccactaattctaagattatccaaagaataaaatttacactcgaagctgacatacttcctttaagaagtatttgctactaaagaacctgtttttcactttccactttgttgagagtactgctcgtcagaactcaaaagtttgaaagcatgttcatttatccaccatcgtccgctgcaagaatggcagacaagaagcagacttaattattcccattctacagatgaggaacaaaagtcaaaggggccaaatgtcttagccagatctcctaagcaacaaaatcataaacagaatgcagatgttaaaacctgcaatactggcaaatccatgtcacttcctctggcaatatggagaacagaagaaaatccttggccctccgtgccttgtattcaagaatcccaacacgtctttcatgtagcaactccagaatcctctgggaactctaggaagataaatgaaatgcatttgtccaaaactctgacagatgaggcaggtttggagcctttgaaacccctttcaaatctggaggagc

SEQ ID NO: 585836 - DNA, 4001 bp, Homo sapiens
cgggagttcttccatcaccagctcttccccatgactggggccttgttcaccctcagcccctgggtcccatcccacttcccatttcaagcccaggctcacacactggatgaactgggccaattcccaagcttgggccacacgatgtgctaggtagatgtccttctgtcgattgtattcggcatggagctgagcaagatagatgagatcacagcagataagactgagggtcccaggggtatgtctgaatcaagcctgtgtctgtcacttggcatggtgtttggtatacaatggataagccttgcccattgcttccttataagatcttgcccccacacctcatccccaggtatgagagctagagaagtaccatctctctgtcccaggactgggctgcatgtcccagccctaggcactgccagcttcactcacatgggtcacataggcgttgagcaccatgccacttagatggagcaccagcagccccacagccttcccactgaaccagtcaccatgatggatctgcaggcaggaggagatagaaactcagggcaccgccaccatctttctgcccatcccctgcagctctcagagggctgcctcctctaccttgtattactggaggtggggaagggaggtggaagaggtcaaaggtctgccttaccatgtaggggtagccattgagagtgtagatgtgctgggtaagctcctggattggatgtttggagaagacacagaggccactgccaatgattccgctgaaagccaagccctgcttaataaccagaaaaacagggagagacacccagccttcttcccctcccttgtcttccagctctgatcagctatttttttctttttctactgctgggactagccctagaaccaaggcgacagcctttggaggagtatagggcagccagaaaacaaagctgaaatgggctgaagtcataggaccttcttggttcacccttctccttctctcacatccagagggagaggaggctggaggagactggagagtgcaggcaggatagggaagggctggcagggccaagagcctcctgggatgacaacaggcttcaggccagtgggcttctcacctccggaagtggtgtgcagctgggtaggtaggtgacagcttctgtctcaggtactggaagtcctgctcactccacacctgagggaagcggtgaggatgcctgcttggtctttccccagtgggacggtctgtccctcctcccagcctgggttccgcaccgtgctgcacaatctcacctcctccagcaaagccaggtcgaagctctcctggttcagaaagtctcccaggcgcctcatgcggtcggcccggtgcttgctcaagtacggaatgcccctaaggaagggaagagcggggcaggggaggcgactgctgggaccaccggcgctggggccagatgtggactttggaggttcgggttttccctacaccctgagatcgtggggcgggatagggggaggaaggctgcatgggtgcgaacggaaggtggcccccagaccgcactccgcagacgcactcaccagcagttgaggttgaagatccgcagtcgcagggagaagttgggcttcatggttggggagctccaggggcgctaggcggctcgaactctccagcgacggccgcggtggggacgggggcggccggcggcgccttctccccagaccgttccttcttcgcaggcggcgcgcacaggtgggcaccaagcccgcgtggctcaggtcgggcccgactcccgcgttcccccggcaaccggccggctgttcccaatcaggcgggccgccaacccggaaaggcgatccgctgccgaaatccgggcgcccaggctcggtaagggccgcgcgctaggaccctgggggtccggagagcgcccccgggtgggcggctcccggttccttttcctccaagctcgtccccggcggtcgcggccgcccgcgcgccggcggcccagcaacaggcgcaaagttgaggaaaggcccagccgccacgggccgccctcgacccgcccctgggccccgcctcctgcgagcggcggaggcggggccgcgcggttgccggagcgacgcgcagtgtttggggtcaccgggcgtccccgggcgcggccatggcaaggccgcagccgtgcgggcccccgcacgctaggtgcggctcgccgtcgctgccggagcggccgctgcaggtgaaggtggtggggctcttcagctgccccaactttcagattgcgaagagcgccgctgaggtaaccacagagaaacctccgtcgtgggcggccctccccgctacccgctctcggccgcgtggactgcaggcgccgcgcctcctcgaggcggcgggggtcgaggccccaccggccgaggaaggggctggcgtgtcctggccgggcgggctccgtctggaggaccgggaggagagtataggggggcaagtgcgggtccgggggcgggcgttccacttggcgacttttaaagggagaactgagcgaaggaagggttcagaaccgcgctgggagataaggtaatcccctccgagacacacacacacacacccgcagattttgttctacgtcaattttttctttaattagagatatttaaatttatggaaaaatgattactatataactagctaatttttacaaccccgccacctcggcccaagcgatttttgttaactattcatgcggggagattcttttctttgaattttatagagccgtcactgcgttccaatcgaactagatgcttcacaagtgctttggaaaatcatttctttgtaaacactcagaacgatactaaaggaaaagcacttgaggaaactggaagaatttggccagatcagtcatgctgcagcacacttacaacctgaaatgcaggagaaatgtatgaaatgtcggcatgtagaattcagcccttcttacagggtttgctccagaaatgctgtccatggcaaacttctcgccgaagctcacttgactccaggaccatgccttaattaatgtttttaactcccgaagtacccagctggatacttgacaacaaaatgttcccaaatagaagatatcttggcgcggtgactcacgcctataatctcagcactttgggaggcagaggcggagttctagaccagcctggccaacatggtgaaaccccgtttctactaaaaatacaaaaaattagccgggcgtggtggcggtctctgtaatcccagctactcaggaggctgaggcacaagaatcgcttgaacccgggaggcggagtttgcagagagctgagatcgcgccattgccctccagcctgggcgacagagccagaccccgtctcaaaataaataaataataaaaagaaaacaagtgatcagaagtctgtgaaaataatacatgaatcatcaaaagtagaaattgtggtctgtgttgcttgggcagacgggatcagcaaccttttattaccaaagttaatggccatgaagttaattacaaagttaatgtattaatgagtttcagagattttttttctcttttttttcgctctttttctgaaggcacatattttctgtgccgactccacattgtaaagaaagtgttgacaagtttttttctgtaaagtccagatagtaaatatgttaggccttcttggcaatagggtctcagtcacacctgtttagctttttcctgtgttgcaaaagcagacacagagatggaaatgaatgacagtattccagtaaaaccatattatggacacgaaatttgacttgcgtataattttcacataacgtgaaatacaattcttttgattttttagaattgtttacaggccgagcgcggtggctcttgcctataatcccagcactttgggaggctgaggcgggcagatcacgaaatcgggagttcaagaccagcctggccaacatggtgaaaccccatctctactaaaaatacaaaaattatccaggcatggtggcgggcgcctgt

SEQ ID NO: 585837 - DNA, 4001 bp, Homo sapiens
acaaggagaattgtgaaactgctgagtgaacacttcagacctttgaactccagtaacacttcagactttcgaactccagtgactccagtaacacttcagaccactgaactccagtaacccctcttccttcccctttagtaggaggggattcaaccttgcagtttcccaaacaggaggtgtgaagactcacagagtccccagaaagcgctcattcaggcctctttaaaacacaggtgaatttgccattgtgtggcctcaagcaacgtgagacattttatttcaaaaccctaaccggtcacataattaaaggaacacaagctaagccgtaataaaagcagaaaccagtatacataaacattttggggaaatttcttgtaatgactgacatttgccacagttcggaaaccagatttacagtttttgcttcagacctgacagctgagtcgtgaggacttggccttcaaagagaagatatttgccctagagcgctcccaagtcctgagaaagcacagagggagcgaaagaggtttcagcactaggtgctgctaccgagtctcagggacaactctcccctaaaagaaaacagaaccccacttctctaattttgtttttcctcttaacagtgcaattatttttaaagggagttgaggaggtgagggcaccttgatttttggaactggaggctcggatggcattgtacaatctcccaccaaaatgtatctattctggaccagtgagtctcaaacttagccgaaaggaatcatgcggagggtgggttaaacagcatactgtggaagcccaacgccggcgtttcagattcagtaggtctgggatgggctggaaatttgcaatgctaacaattttaagtgcggcggctgctgccaccggtccagggcacacttaagagaatcactactgtaacgggcactgtgttaagtgctgggagtgaataaaatgggtcccgcccgcaggaaacctagtggacatccaggtgaaatgaagtccccgtgagttccacggtagactaaggggtgagtctacccgagggtgctttcgcgctctggctgggtgagtggcagaaaaagccactgatctcggtcgagcaagacagaagatagtgtgagtcacgctgaaatttacttccctgagctggtggggaaactgcagtccccctccattcaggaccgattaggggcctcttgctgtgctggacatcggactcccagcttcctcttcccttgagtcccgcagcttttccttccttccccaaggaacaaaacaactgagatgcaggatgtaaacaaaagccaggctggcgaaatccggccgacgcgcccttggagcgcccccaccggcgagggcatttcccccgcccagccccggcctcccggctggacgccctaacgctgtagtcccttggtcgccctccccgcgcccaccagccgtggtcaacgccggacgcgtcaggggccccgctagcccgagcctctgccgggggcagctgcccccacgcactttctcctgctgtgcgcaggcgccgccgctccgcgctctttgccggctgggaagagaagggtcgcggacaactcacctatcgccggaggaggattcctgccgcctgcgggcgccacgggcagcccgaggccggagcggcagtgccaggcagtcagcaggcagcagacgagtgcgcgcaccagcgccatggagggccgcggggctgacctggaggttcgggctgtcccgcagctccactcggaccgtcaggcctgagggtgaggcggagacagaagacggctgcgggtgtagacgtccgactgatcacgtgcaaaggcagattccgcagcgagtcagttcgcctgaccttcagctgctgtttagcgatgatctgttctcgtatttcttagcgtcagtgtttggcctaggaaggaatgtacttgtagaagctcaaattccgactcgtgtatcagtggtgcagttgatgtcaaacactgacatactggtgcttggggatagagaaagacattcaatttagtaaaagccagaaggagggagaacaagatctctcaaatccgtgtgtaaaaaggaaaaagcagggagtttttattctgctagagaataagagagggggattttcaaagaatccaggggaaaagtctgtttcttcagtctcagataacacctttgagcaattagacgtccaggcatccgcagctggttgcaaagcccttggaggtattcatcccttctgcaaacatttttgtgaccctgaagttaacctctttgttcttgacgaggaagcagtacctcagcagtttataattatattgtggaaacaaggagaatattgggcaaaaagcgagtggttaaaatgtgcaagcaagcaggagcctgatcagaattttcattatttcagtcactaaaaaatgctggggtgctgaaatctcaacgatcccggttccattcttgggccaacctaccccagctttaatgggtagggctcctcagtagaggtgatgcagagagccctgaagtatcatgatttgaaggaaatcagcaaaagttatggatactgcagtggatctcgaattgaagtctctgaactgggaacattagcaccacctgggaactctagttagaaatgcaaattcccaggcaccaccctagacctgttgagtcagaaacctgctggagcccagcagtttgtgttttcacaagcatttcaggtcatgttaaagtgattgtgatgtttgaaaaccaatgctcaaagatacgacgttttgttttttgttttttttaaactgccgggaagagaagggtcttagaattagaacatgttctgaaatcatgctttatgcattccagagatgcatggaaatcataagtagaggtggttgatttgatgcttccacggaacttttttgaatatacttctggcaaagaagtaagtctatacaaagaagtaagcaaagataagtctggcaaagaagtaagtctatacaaagaagtaagcaaagataagtctggcaaagaagccagaatcccgaaactgtgctggatcctgtattctgtgttccttctctcaccgtttatgaggatgctgatctcttggagatgacaagctaataatttaaatttatagggcgtggaattcctttgcagaagaaaatgctttccataattactaacctcaaaaaagatgttgtagagtgtatttctttcccagcatagaaagctttgttttgtatcccatgtaatttaatgggagtgtgtgtcatgaaacgggctttgaagtgggaagcaaggtgcttccattttctgttttgtaaaccaaaaataaaatttgaaggccccccacaaccatctgaatggacgaccatctgtatggactctttccccagtcagggcactctaaaatttaacctgaaagactggttcaggccatgaaaaaggggatgggggggttggacatgcgtaattaacatcaacatagaccataagtctgataagaaacatttaagatctgttttctctaaagcctgctacgtggaggcttcgtctgtgtgacaaaatctgggtctaacaaccccttatcataacccagacatcctttctattgataataactttttcaatcaaccaattgccaatcaggacatgtttaaatcttcctgtgatctggaaacacccaccccccgcccagcttcaagttgtcctgcccgtctagatcgaaccaatgtaaaaatcttacatgtattgattgctgtatcatgtctccctaaaatgtataaaagcaagctgtatcctgaccaccttgggcacatgtcaagacctcctgaggctgtgtcactggcccatccttaaccttggcaaaataaacttcctaaattgattgagacctgtctcaggtacttttgtgttacagtttcaagtcctgccagggcagccgaagtcctgcttcagcttttggatgattcaaaagcttgcaagaaccaaagtgcatt

SEQ ID NO: 585838 - DNA, 4001 bp, Homo sapiens
atctcacccagcattttctgagaatgggacaaagtgtgccaggatgtgtaaaatgaaattgccatagctatgaagtccaatttcctcattcagtaccttgaatttatttcagtttggtatggtaacatacctcacacacacacacacacacccatactcacaaaaacaatcctcaggagcaacacttaaaaagattatactaccttagaactatctgaaatgtatttaggaaagaactagggtgacaagtttgaccttccataaattcatcttttttttttttgactgtgcaacctctaatttcctctaatttggagaagggagggtgggtggagaaagaaaaaaaggtgaaaaacatctaattcagtgtgtacaatctctctcttgtgtgtgtgtatatacatatgcgtgtgtgtgtgtgtgtgtgtgtgtatttttccccctccaccaagaccttggaggtcaataagaggaaaaaatggctcacaagacaaggtttcatggctaacccaagggaacaccttcacagctgaagaatttcagctcaggggcaacctggctgggagtatcagaggccacagcattatggaccaagagcgcaggccgcaccaccagcatcccaggcgcctctgccgtgcgcatgtccctcttatataaagagatgcttacagtccaggtgctttttcttggggcccattacttcatgagtagtggctttgcagaccgctcttgctacagcagagcctgtaacgctgtactgagcggcggcgatccgatccgtgagcgtttggcccgacatcttctgtggtcgcgtctaccgcctcctcttctgcaggaaacaaggggagacggtccggctttaatccgcagaccctaccctccaagcacccaggccttgcctcctccagccgcgcggcggctctctcctcctccatccccaccctggcaccacctctcggagccagcaacgcgccaagccccgctcctgcgatgcggtccagggagtcttggccgtgagtagggccgtcacggaaccccagcgtgggctccagtcgcagcatcgtgacaccgtccccattctcccccggcccccacatagggccagactcaccccctggggacccccctgtcaatcagcactttccccgcaacctgacccgcgggtgctggactagccacaacgtgcgttggggttattccctgggcgccgcacccaccggtgcccatctcccacctcagcagactttcctcctagcagcccgcaggcttcggggaatgcatcggatacccaagccctggctgcctccctcctcctcctcgcgctgctgcagcaaagggctcgtcctccctcagtcgcgaaggagattatcctagcgttgcgccatgttatgccctcgcctccccttccttcctcgccgccggctccaaagcctcgccgaggcccatcgcccgggccccttccccccggttccaaatccctgccgcaggggccgcccgggagctctgcggaggcgccggagtcttggggcgcctcacccttcctggctttggagaggagccgggctgacagcgaagcccagtcccccgcccgccctggagcgctccgcggagctgtcactcggccgctgcccttctccgcaccctgggattatcctctgcggatccccgcgagaccctggcgcggggagggggccgagtacggccgcgggtactcaccccgcccctgagcggcgccgcccgccgcaggatgagcggagcccgggccgccgagggaagccgcgccggtggatgtgtgcgaccgcgcgtagccccggtgcccccgggcgcaaagtctccagccctggccgggccccgctcctcagctccgcggtcccggcgcccaccgcccctggcccctggccccagaagccagtacccgcccgccgccgcctcttctgccagcgccgccgcgtctctctagcgctccgagctgcgtccccatccccgcccccacctcagctgtggctcctccgacgagtcaggtgacggcggcggacaaacccggacgagccctcggcggagcgcctcgcggccccctcccagctactcacacacaccgccccccggggccgggagcttaaaggcgagggggcgcctcgcgcaagcatccccggcaagccggcggggagaagaaggaggcggggaggccgacacccacccagccagcggctctccgctgggcgccgggccgcccctccgctgctggcgccgcacccggcacgcactgggctcgcgcaccacgcacacctgcccgccgactgcggggggagccctgggcgttgggggcgttggccaagacgggcgagtgggcttctcgggttctactctgtgaaggccaaggcaagggcgtcgtcgcgcgctgcctggcggagcccagccccttccccacactgtcgctgacacgcccgcctgtcaaaggctccgaggcccagatgagcagggcgattttaaatgtcagatcctgccggccatccgcgaccgtcacctgtgcgtcttcagctcctcaggctcctccgcttgtctcagttacaactgggagcccgggtgggcaggtaattctagccactttagtcttaaacggatactgaggtctgctgaagggagaataattaacacagccgttaatcgagtcccagattaccttcgacagtaatcatttgcgtgcataaagaaaaccctttgtacccttaagaagtaatttctgccaattaaatatagtgttggaacgtccgtcaattgtatgtcaagtgtatattcgaatagtaagcaggaatttctaaacagggatgtggagttggttaatagcttcacgtgttgacattttcaaaggttgttatttatgttcacctttttttttaattctcacagtagcatgaagatcaaaactatatttgtgagctttcctggcattttttctccttgcttcgggtggcttctgctcggccttgaagccatatatcgatacctatcgatctcaacgttttgttatatattcctctctttcacctggtacagtgttcagtatgcagtcatgatttcctaactactgagactgattctaggactaattggaagcttaatgactaaagagagacagcttaagagcactattgtctcaagtactagtcttaccatatttacaagggaaataaaaacgcaattctattaaaaaaacttgtactccagttttatagcagcttaatataatggccccaaactggaggaaagccaaatgttattctactagtaaatgaataaacaaaatatggtatatccacataatggaatactacttagcaataacaagaaacaaactaataccattcatgaatctcaaattcattagacgaagggaaagaagctctatcaaaaattctacttattattttgatttcatttatgtaacattctggaaaagtcaaaactatagaaacagaaaacacatcaggtgccgagtcaggtgacggtggcattgggggaggggactgcaaaggggcagaaggaaactttttggagagatggaaatgttttatatcgtgacggtgatgatgattatacagctgcatgtatttctcaaaactcatcaatttgtacacttaaaattggcgaattttgttgtttgttaattatacctcaatataatctgatagagttgggagtggcaatattaatatcaaagtaggttttacaataaggaatattaatagcaataaacaggcacatttcataatgaaaaattcattaagagcatggaacaattctacttgtttgtatatctaagaacagagcttcaaagtaggacgaagcaaaacctaatagcattaaaaggagaaacaggcaaatccacaattatacttcaggatttcagcacttttctctatgtaataaataggacaagtagacaggaaacctgtaagggtatagatgacttgaaatagccctgtaggccggacgcggttggc

SEQ ID NO: 585839 - DNA, 4001 bp, Homo sapiens
tttgactgtgcaacctctaatttcctctaatttggagaagggagggtgggtggagaaagaaaaaaaggtgaaaaacatctaattcagtgtgtacaatctctctcttgtgtgtgtgtatatacatatgcgtgtgtgtgtgtgtgtgtgtgtgtatttttccccctccaccaagaccttggaggtcaataagaggaaaaaatggctcacaagacaaggtttcatggctaacccaagggaacaccttcacagctgaagaatttcagctcaggggcaacctggctgggagtatcagaggccacagcattatggaccaagagcgcaggccgcaccaccagcatcccaggcgcctctgccgtgcgcatgtccctcttatataaagagatgcttacagtccaggtgctttttcttggggcccattacttcatgagtagtggctttgcagaccgctcttgctacagcagagcctgtaacgctgtactgagcggcggcgatccgatccgtgagcgtttggcccgacatcttctgtggtcgcgtctaccgcctcctcttctgcaggaaacaaggggagacggtccggctttaatccgcagaccctaccctccaagcacccaggccttgcctcctccagccgcgcggcggctctctcctcctccatccccaccctggcaccacctctcggagccagcaacgcgccaagccccgctcctgcgatgcggtccagggagtcttggccgtgagtagggccgtcacggaaccccagcgtgggctccagtcgcagcatcgtgacaccgtccccattctcccccggcccccacatagggccagactcaccccctggggacccccctgtcaatcagcactttccccgcaacctgacccgcgggtgctggactagccacaacgtgcgttggggttattccctgggcgccgcacccaccggtgcccatctcccacctcagcagactttcctcctagcagcccgcaggcttcggggaatgcatcggatacccaagccctggctgcctccctcctcctcctcgcgctgctgcagcaaagggctcgtcctccctcagtcgcgaaggagattatcctagcgttgcgccatgttatgccctcgcctccccttccttcctcgccgccggctccaaagcctcgccgaggcccatcgcccgggccccttccccccggttccaaatccctgccgcaggggccgcccgggagctctgcggaggcgccggagtcttggggcgcctcacccttcctggctttggagaggagccgggctgacagcgaagcccagtcccccgcccgccctggagcgctccgcggagctgtcactcggccgctgcccttctccgcaccctgggattatcctctgcggatccccgcgagaccctggcgcggggagggggccgagtacggccgcgggtactcaccccgcccctgagcggcgccgcccgccgcaggatgagcggagcccgggccgccgagggaagccgcgccggtggatgtgtgcgaccgcgcgtagccccggtgcccccgggcgcaaagtctccagccctggccgggccccgctcctcagctccgcggtcccggcgcccaccgcccctggcccctggccccagaagccagtacccgcccgccgccgcctcttctgccagcgccgccgcgtctctctagcgctccgagctgcgtccccatccccgcccccacctcagctgtggctcctccgacgagtcaggtgacggcggcggacaaacccggacgagccctcggcggagcgcctcgcggccccctcccagctactcacacacaccgccccccggggccgggagcttaaaggcgagggggcgcctcgcgcaagcatccccggcaagccggcggggagaagaaggaggcggggaggccgacacccacccagccagcggctctccgctgggcgccgggccgcccctccgctgctggcgccgcacccggcacgcactgggctcgcgcaccacgcacacctgcccgccgactgcggggggagccctgggcgttgggggcgttggccaagacgggcgagtgggcttctcgggttctactctgtgaaggccaaggcaagggcgtcgtcgcgcgctgcctggcggagcccagccccttccccacactgtcgctgacacgcccgcctgtcaaaggctccgaggcccagatgagcagggcgattttaaatgtcagatcctgccggccatccgcgaccgtcacctgtgcgtcttcagctcctcaggctcctccgcttgtctcagttacaactgggagcccgggtgggcaggtaattctagccactttagtcttaaacggatactgaggtctgctgaagggagaataattaacacagccgttaatcgagtcccagattaccttcgacagtaatcatttgcgtgcataaagaaaaccctttgtacccttaagaagtaatttctgccaattaaatatagtgttggaacgtccgtcaattgtatgtcaagtgtatattcgaatagtaagcaggaatttctaaacagggatgtggagttggttaatagcttcacgtgttgacattttcaaaggttgttatttatgttcacctttttttttaattctcacagtagcatgaagatcaaaactatatttgtgagctttcctggcattttttctccttgcttcgggtggcttctgctcggccttgaagccatatatcgatacctatcgatctcaacgttttgttatatattcctctctttcacctggtacagtgttcagtatgcagtcatgatttcctaactactgagactgattctaggactaattggaagcttaatgactaaagagagacagcttaagagcactattgtctcaagtactagtcttaccatatttacaagggaaataaaaacgcaattctattaaaaaaacttgtactccagttttatagcagcttaatataatggccccaaactggaggaaagccaaatgttattctactagtaaatgaataaacaaaatatggtatatccacataatggaatactacttagcaataacaagaaacaaactaataccattcatgaatctcaaattcattagacgaagggaaagaagctctatcaaaaattctacttattattttgatttcatttatgtaacattctggaaaagtcaaaactatagaaacagaaaacacatcaggtgccgagtcaggtgacggtggcattgggggaggggactgcaaaggggcagaaggaaactttttggagagatggaaatgttttatatcgtgacggtgatgatgattatacagctgcatgtatttctcaaaactcatcaatttgtacacttaaaattggcgaattttgttgtttgttaattatacctcaatataatctgatagagttgggagtggcaatattaatatcaaagtaggttttacaataaggaatattaatagcaataaacaggcacatttcataatgaaaaattcattaagagcatggaacaattctacttgtttgtatatctaagaacagagcttcaaagtaggacgaagcaaaacctaatagcattaaaaggagaaacaggcaaatccacaattatacttcaggatttcagcacttttctctatgtaataaataggacaagtagacaggaaacctgtaagggtatagatgacttgaaatagccctgtaggccggacgcggttggctcatgcttgtaatcccagcactttgggaggccgagccaggcagatcatgaggttaggagatcaagaccatcctggctaacacggtgaaaccccgtctctactaaaaatacaaaaaaaaaaaaaaattagctgggcgtggtggtgggtgcctgtagccccagctactcaggaggctgaggcaggagaatggcgtgaacccgggaggcggagcttgcagtgagcggacatcgcgccactgcacttcagctggggtgacagagcaagactctgtctcacaaaa

SEQ ID NO: 585840 - DNA, 4001 bp, Homo sapiens
aatagaacagaagatcctaagcaggtcaagagaactaaatagcaactgctgaacatacactcatatagcctgacttatgagaaacctcaccacccaaagcaggtgaaagcctttttcttttctaagtgcctctgtttatccttcggtgacaaaagatttactgttaattaaggtatttcagaaatatatagattccagagtagaataaagccttttccatcaaataaccagttacaaaaataatattaagaattaaacggtttcatctaaaattgcaccatctcagatgctggggaagtacatccattttgtgaccatagcatagtcatctcacccagcattttctgagaatgggacaaagtgtgccaggatgtgtaaaatgaaattgccatagctatgaagtccaatttcctcattcagtaccttgaatttatttcagtttggtatggtaacatacctcacacacacacacacacacccatactcacaaaaacaatcctcaggagcaacacttaaaaagattatactaccttagaactatctgaaatgtatttaggaaagaactagggtgacaagtttgaccttccataaattcatcttttttttttttgactgtgcaacctctaatttcctctaatttggagaagggagggtgggtggagaaagaaaaaaaggtgaaaaacatctaattcagtgtgtacaatctctctcttgtgtgtgtgtatatacatatgcgtgtgtgtgtgtgtgtgtgtgtgtatttttccccctccaccaagaccttggaggtcaataagaggaaaaaatggctcacaagacaaggtttcatggctaacccaagggaacaccttcacagctgaagaatttcagctcaggggcaacctggctgggagtatcagaggccacagcattatggaccaagagcgcaggccgcaccaccagcatcccaggcgcctctgccgtgcgcatgtccctcttatataaagagatgcttacagtccaggtgctttttcttggggcccattacttcatgagtagtggctttgcagaccgctcttgctacagcagagcctgtaacgctgtactgagcggcggcgatccgatccgtgagcgtttggcccgacatcttctgtggtcgcgtctaccgcctcctcttctgcaggaaacaaggggagacggtccggctttaatccgcagaccctaccctccaagcacccaggccttgcctcctccagccgcgcggcggctctctcctcctccatccccaccctggcaccacctctcggagccagcaacgcgccaagccccgctcctgcgatgcggtccagggagtcttggccgtgagtagggccgtcacggaaccccagcgtgggctccagtcgcagcatcgtgacaccgtccccattctcccccggcccccacatagggccagactcaccccctggggacccccctgtcaatcagcactttccccgcaacctgacccgcgggtgctggactagccacaacgtgcgttggggttattccctgggcgccgcacccaccggtgcccatctcccacctcagcagactttcctcctagcagcccgcaggcttcggggaatgcatcggatacccaagccctggctgcctccctcctcctcctcgcgctgctgcagcaaagggctcgtcctccctcagtcgcgaaggagattatcctagcgttgcgccatgttatgccctcgcctccccttccttcctcgccgccggctccaaagcctcgccgaggcccatcgcccgggccccttccccccggttccaaatccctgccgcaggggccgcccgggagctctgcggaggcgccggagtcttggggcgcctcacccttcctggctttggagaggagccgggctgacagcgaagcccagtcccccgcccgccctggagcgctccgcggagctgtcactcggccgctgcccttctccgcaccctgggattatcctctgcggatccccgcgagaccctggcgcggggagggggccgagtacggccgcgggtactcaccccgcccctgagcggcgccgcccgccgcaggatgagcggagcccgggccgccgagggaagccgcgccggtggatgtgtgcgaccgcgcgtagccccggtgcccccgggcgcaaagtctccagccctggccgggccccgctcctcagctccgcggtcccggcgcccaccgcccctggcccctggccccagaagccagtacccgcccgccgccgcctcttctgccagcgccgccgcgtctctctagcgctccgagctgcgtccccatccccgcccccacctcagctgtggctcctccgacgagtcaggtgacggcggcggacaaacccggacgagccctcggcggagcgcctcgcggccccctcccagctactcacacacaccgccccccggggccgggagcttaaaggcgagggggcgcctcgcgcaagcatccccggcaagccggcggggagaagaaggaggcggggaggccgacacccacccagccagcggctctccgctgggcgccgggccgcccctccgctgctggcgccgcacccggcacgcactgggctcgcgcaccacgcacacctgcccgccgactgcggggggagccctgggcgttgggggcgttggccaagacgggcgagtgggcttctcgggttctactctgtgaaggccaaggcaagggcgtcgtcgcgcgctgcctggcggagcccagccccttccccacactgtcgctgacacgcccgcctgtcaaaggctccgaggcccagatgagcagggcgattttaaatgtcagatcctgccggccatccgcgaccgtcacctgtgcgtcttcagctcctcaggctcctccgcttgtctcagttacaactgggagcccgggtgggcaggtaattctagccactttagtcttaaacggatactgaggtctgctgaagggagaataattaacacagccgttaatcgagtcccagattaccttcgacagtaatcatttgcgtgcataaagaaaaccctttgtacccttaagaagtaatttctgccaattaaatatagtgttggaacgtccgtcaattgtatgtcaagtgtatattcgaatagtaagcaggaatttctaaacagggatgtggagttggttaatagcttcacgtgttgacattttcaaaggttgttatttatgttcacctttttttttaattctcacagtagcatgaagatcaaaactatatttgtgagctttcctggcattttttctccttgcttcgggtggcttctgctcggccttgaagccatatatcgatacctatcgatctcaacgttttgttatatattcctctctttcacctggtacagtgttcagtatgcagtcatgatttcctaactactgagactgattctaggactaattggaagcttaatgactaaagagagacagcttaagagcactattgtctcaagtactagtcttaccatatttacaagggaaataaaaacgcaattctattaaaaaaacttgtactccagttttatagcagcttaatataatggccccaaactggaggaaagccaaatgttattctactagtaaatgaataaacaaaatatggtatatccacataatggaatactacttagcaataacaagaaacaaactaataccattcatgaatctcaaattcattagacgaagggaaagaagctctatcaaaaattctacttattattttgatttcatttatgtaacattctggaaaagtcaaaactatagaaacagaaaacacatcaggtgccgagtcaggtgacggtggcattgggggaggggactgcaaaggggcagaaggaaactttttggagagatggaaatgttttatatcgtgacggtgatgatgattatacagctgcatgtatttctcaaaactcatcaatttgtacacttaaaattggcgaattttgttgtttgttaattatacctc

SEQ ID NO: 585841 - DNA, 4001 bp, Homo sapiens
ccgcacccgccaaccccctagccaattcaactcacttttatttatcagcttagaattcactttgtccaggaagcctttgctgaccaccactttgtccaccaccgcctacaataaactgtactatagcaattccaaccccacccatcacagacccatgataatataatggttcagttatccgtattacccctcatcaccaccagacaataagctctgtgaggactaggaactaggtgacaactaggactaggaactaggtgacaactaggactagctctgtgaggactaggaactaggtgacaactaggaacagatgacaactaggactgttgttcactaaatttcagtactaaaacaccggcggaaatcctaactgccatttactagcagtgtatccttcgacaaattatcacttctgtgttcctttcctcgtctataaaatgtggccaaagatacctacctcatagggttattttgagtattaaatgaagtaatgtaagtggcaaacaaagtgctatttaaacgttaatacaaggaatccaatgttaccgcaatgctgagtaaacaatgtatggaagggtctggtaagccccactcagtggaattcccagcttcaaatacccctctaaatgaatattaaagattttttaatttcctctgtgcttttaatacaataaacaatgaatggtatatacagaaatcaaatatattttaaatgcctctgaggaatcagtcatgtaacttaaacccaggagaaattatcacagcatggtaaacccagaagtaatagtaaagataatgaattaccccacattggagcacttcccttcctctcattccaccgaaaataccccacaaaaaaacaaaaatcacgaatgttcactctaaatacacttgcctacatttttaaaaaagcaattctaatgtccacaggagttgccagttaccacctcttggtgacaacctttaataatcctagaattggtgctgtcccagtcagaagtgtccaattttaaggcacagaaaggcgaactggcaaactcccagctctcctgacaccgaatctggtgcaactgcggaatccgtatgacagatgacaatgcaaaccgccaatccctctgcagcgctctgagacacgttcacttattttctaaataaataccaaatctgccattccctcctcactcaacacaccttcctggattttgtttgtttgttttttgagacagggtcttgctctgtcgcccaggctggaatgcagtggagcgatctcggctcactgcagcctcgacctcctgggctcaagctatccttccaccccagcctcccaaatagctggggccacaggctcacaccaccacacccggctaatttttgtacttttggtagagaagaggtttcaccatgttgcccaggctagtctggaactcctgggctcaagggatcctcccgccttggcctctcaaagtgctaggattacaggcgtgcgccaccgcgcccggcccccggttttctttaaactcgaagttgcgcgggaggagcgccgcactggaggtcgatgtggagccttcgggagttcctcgcgcgccccagcccggaacccagggacgtcagggttgctccagggcccccggcgcccctcgggtcccaggcgcccatcgcggctctgcacacggacgaggactcctcgcccttccctccgcggctgccagtgcggatctcccttcttccagagaagaccccgggccgatagtccccgaaagggccccgcggccgcgctcctcacctccgccgcctcctcttccccgggatccagactatctaggtcccagcccagggacgcggtcacctcctccaacgtccggcagccgctctccacgaactcgttcagctcctcctgcagccgccgccgctcctccacaggtggaggctcgccctccatagctgcagcccacccgccaagaggaagcggccgaactgcagaccgcacgcgcaggcctctgggagctgtgggcggggccacagtcgccacgtgacttgaacagcctatagggaagagtcccgggaagggcgggactgttattttgagaggcgttttccaatcttttctcagctcttgcgtgcatttgctctggcctttccagaaagatattcgccctcctcgacttcctcagaaaaaacggcttatagctacagaaaagttttaaaaatagtacaatgagctttcgtttagccgtccttcagctcattgttaacattttgccaggtttgatttctctccgtctcttctctccacattcacagccccacccaatgatttttgctgaattctttgaaagtaagttgcagatttttcacccccaaatatgttagcatgcatgttctaagaataagaacattttcctgtgtaaccgcaatacatgatcaaacctaagaaaattagtaagtccataaaatcatttattatacagttcatattcaaatttccccattgtccccaaaattatttctatagcagttttattttttcaactcataagctataattagttattgtctcttttaatccagatcagcctccttcaccctcctttttaaattattaaatcattacatgttgtgatgagcctaggccagttgtcttgtagaatctctctcattctggatttgtcagattttgtttccctcatgattagattcagtttgagcacttttgcaatactacctaagagatgttgccaactcacggggacgcataactcagttatattagtaatgctaaatttgatcacttggtaaaggtggtggctacatctcttcattctaatagtacattttcctcttaggaattggtaagcaatctgtggattataccttgagtccataagaataacctgttccccaactccttgatacagtccttcactgaatctgttgttacattaggagttataagtgattccgcaatagtatcatgccttttatgtttattaactggcattctttccacacctccattttagtgtttgcttcactatgggaatcaaggtgtttttaaagttattgatttaaggtttttttttaattcaatataatatactcctttaacatcataattcttgttgatgctcaaattgtcccaaatgtggccagtggaagccacattaagccatctgtgtctttcatgtatccctattagtccttgaatgctttcttgctttgataacacaagcttaactttgtacatttcctacccaacacctggaattagcccttgtagtttccccaaatggtttcaactcctagaatctaacccattttatattactttttaaaattttttcaagcccaagtgtcaaaccttggtttccttttgcactttgtttacccatgtgaaggaactgtgggggaattttttggtgaacaattatttctaaaggcaaatagcacggttctcacttaaaaaaatagtcataagactataaataggcagcaccataaaatacagaagtggctagaagctggtaagagaggagtatgaagttaatgtattcatactctgcctacagtatctttttttttttttttttgagacggagtctggctctgccacccaggctggagtgcagtggcgcaatctcagctcactgcaacctccatctcccgggttcaagcaattcttctgccacagcctcccgagtagctgggactacaggcacatgccaccacaccctgctaatttttctatttttaatagagatggggtttcaccatattggccaggctggtctcgaactcctgaccttgtgatctgctcgcctcagcctcccaaagtgctgggattacagacgtgagccaccgcgcccagcccggtatccttactttttatttgcatttccatagttagctggttggtctggaaaaatgtgagactatttctgatgtgacatgactcctgataaaaagttctagtgtatatttccctgtttgtatatgtgaac

SEQ ID NO: 585842 - DNA, 4001 bp, Homo sapiens
aggtggttctgattagattgtgacattaattaacgtgggttttcttttcttttttttttttttttttttttttttgagacggagtctcgctctgtcgcccaggctggagtgcagtggcgggatctcggctcactgcaagctccgcctccgaggttcacgccattctcctgcctcagcctcccgagtagctgggactatagagtcgcccgcccgccaccgcgcccagctaattttttgtatttttagtagagacggggtttcaccgtggtctcgatctcctgacctcgtgatccgcccgcctcggcctcccaagggttttcattacataatcaaatgtgtctacatttgaaccctggcactaactcaagtcaatcaacattttccaaataaccaatgcacattacaaaatcatgcatggtaaaagatccactcaagtgctcttaagatagaccactaaatttttttttaagagacggggttggctgggcatggtggctcacacctgtaatctcagcactttgggaggccgaggaggacagatcgcctgaggtcgggagttcgagaccagcctgaccaacatggagaaaccccatctctcctaaaaattcaaaattagccgggcgtggtggcccatgcctgtaatcccagctactcgggaggctgaggcaggagaatcgcttaaacccgggaggagcaggttgcagtgagccgagattgcaccactgcactccagccagggcaacaagagcgaaactccgtttcaaaaaaaaaaaagtactaacaaaacattctgctttaactgttgttattatttgacaagcagctttttttgttttgttgtccaggctggagtgcagtgcctgatcatgcctcactgcagcctggacctcaagcaattctctcacctcatcctcttgcgtatctgggactgcaggcacaccaccatgcctgacttgttaagcagtttttaatcaaagttactggaagggtgggaaaataacctccaattattttcttcaaggagtagaccttaaacctcagcaggtgggaaagcacaacttgcaacttaaaaaaaacacaaaactcatttaattattacacataaggctttttgaaactatgaatagatatgccacttacagagtcatgggtgaggtatgtatcgcagtagtcacaataaaacctgaaaagaggtgaaaggaagagaaaaagacgacaaccactgagatgcccatccacggaagcgctgttcatggaagataaaaacaaaacaaacaaacaaaacaaaaagccagaccgcctcacgactcaaaagcatcaaagcgtcgacacataaaccaggcttttttttgttgccttaagcgggatccatctgcactctaaaatggggtgtctagcgctctccatctccctgcctccgtccacccggcccagatactctcccatccctcgaggtttcagaaaccagaacccgctctccgctcctgcatgggggccacaactagtgactacgatcaccctcagatttcggggccccactcacttgggcatgttgctctgcaggccgttggccactccgttacgtgacgcccggaaatgacgcgcacagccagcgacgacaccgcggaaccccacgagactagcatgaagacttccgaagccctcgcctccagcagccgagcgaggggcggggcttttccttttcttcctttcatctataggatggcgggaaggaggagtactacgggccgctacgaggttcaatccaagctcatttaatcttgtttgtcggtgcttccggaagagcgtatttaatctttctataaatatttaatgattctctgctacgcgcctggagctgctataaatgctgaaaaaacagcagtgaacaaaacagataaaaattcttgtccttgtggggttgagattctagtggaacaagacagatactaaaaccaacaggagccggcgccgtggctcgcgcctggaatgtcaggtactcccgacgctgagacgggaggatcacgtgagcccaggagttggacaccagccctgggcaacatagcgaaactcttgtctctacaaaaaatttaaaaactagccagactttggcccggcgcggtgggtcacgcgtgtaatcccagcactttgggaggccgaggcgggcggatcgcctgaggtcaggagttcgagatacgcccggccaacctggtgaaacccggtctctactaaaaatacaaaagttagctgggcgtggtggcgggcccctgtaatcccagctactcgggaggctgaagcaggagaatggcttgaacccgggaggcggaggttgcggtgagccgagatcgcaccattgcactccaacctgggcgacagagcgagactccgtatcaaaaaaaaaaaaaaaaattggacgtgatagcgcccacctgtggtctcagctagctactcaggagactgagatgggaggatcgcttgaacccaggaggtcgtggctatagtgagtcgtgatcgcaccactgcactccaggctgggtgacagagtggtaccctgtctcaaaaaaatggtaaatatttatagtagtgggttaggtggagcaaagtgaagcagggaagaggggagtccaactttacagaggatagagaaaggttatctcgtcttttttaaatttatttttgtttttgttttgttttgttttttgagacggagtctcactctgtcgctcaggctggagtgcagtggcgctatctcggttcactgcaagctccacctcccgggttcacgccattctcctgcttcagcctcccgagtagctgggattacaggcgcatgccaccacgcccggctaatttttttgtatttttagtagagacggggtttcaccgtgttaaccaggatggtcttcaactcctgacctcaagtaatctgcccgcctcggcctcccgaagtgctgggattacaggcgtgacccaccgcgcccggcaggtaataattattgtaggattcaaggaagaattacatgtgaagatccttgtaagtgtttaatacaatatacacactaacccctccacaaaaggtaattattacataggagaaaattgatagaagtaacttgtccacagatatcacctgttctagcaataaggccaaacttccagcctggtctgtcagactccaaaatggccttcctccttttagaaaagggaaatattagcaagcgttgggacctgaggagagggagtttttgtttttgttcttctaccctatgttctctgatggtagaattgcaaccaaataataataataattgctagtttatttgaatgtttactatgtcataggttctttaaatgcattgatttacttaatccgttcaacaaccctatttattcacatttcagatgaggaaactgacctttagaaagagtaagtaccacaaagattacttcctggtcctaaggggtaagttaactgtgccccggctcttaccaccataacaccgtggtaaatcttaacataatggcagaacaaccagatattatgtgtctcctgctgggatgacaatattaagtagctaccatcaactatgacttttttttttttttttttgagagagggtctcgccctgttgcccaggctggaatgcagtggttctatcacagctcacttcagcctcaacctcccgggatcaagcaatcctccctcttcaccttccaagtagctgggactacaggcacctgacaccatacccttgttaatttttttaattttttgcagaaaaagggtctcaaactcctgacttcaagcaatttcccacctcagcctcccaaagttctgggattacatgtgttagttagcctctatacccaacaactatgacatattataaaaaatgtttagtagccacaaaaattaaaaataatttttaaaaaatgtttaacttagatctaatcaagttaacaggatagtctataggatcagctaaaggaaagcaaaaggc

SEQ ID NO: 585843 - DNA, 4001 bp, Homo sapiens
gttaaggatcccacttctcccacactcctacagttcaaacatctcaccatcacagagcacacttctcagtaaaacatcaactactatttaagctcaataatatttaaaccaagaatcaacaagaaagcaaggccacttttagggaagaaatctaacttcaacatagtcacaaataatggttacaccagagaaaaatgaagttaccaaattccttgcgcattcctccctgttgctatccttgggaatcaactaccttaagataaagagtaagaatggttgcctgttcaaaacatcagagaaaacagcttgcggatgctgtcaatgagaactatctcagatttctttccaccaaaagcaaatctggtgttaattttaatggaaaagtctcctctactacctattgcatcgcaacaatttcttgaaatagtaaaatgaagtaaaacaagtttatttcgggggcagaatcttctgatttcaaaatgtcaattgaatttatcaattttaacctttcggaatatttcaggtttttttggggagggtggcatcaagtcctcttaagaatattatagggatgtggccgggtgcggtggctcacgcctgtaatcccagcacttcgggaggccgaggcaggcggctcacgaggtcaggagatcgagaccatcctggctaaaacggtgaaaccccgtctctactaaaaaaaaaaaaaaaaaatacaaaaaaattagcgtggtagcgtggtggcgtggtggcgggcgcctgtagccccagctactcgggaggctgaggcaggagaatggcgtgaacccgggaggaggagcttgcggtgagccgagaccgcaccactgcactccagcctgggtgacagagcgagactccgtctcaaaaataaaaaattctaaggatgttgggacgggtaccactttgctttctgatttctgtccaacaaatctttatgatcgtctgttttattcaacaatactgcgggaaaagcttcagctgcaagctgagggggtgggaggtggggagatggaagaacgcgctgcaggtgtgcggattctgcctaaaattgcggctacgaactggaccttgaacactcctccgtcagctgacttgactgcctgtgtacagtctcaatttgagccgacacacggatttcacttttgaaaagcaacgaagatgaagaactcgttttgagaaatggatgagaaaaaggtagctcaggagacgaagcctcgggaaaggaggcaatcaaccccaccccaccggcctgtgcttccggcctcgacgctccgccgtgctccccgaggccgctcctctgcggagctcgctctccccactggtccccagtcccgcagctacgcggcctccgcacggttaagcagcacgggccgggcgtctgcaccttcggagaaaagccgccgcccaggctccgcgctgcggcgttacctgttaagaagcagggaggcggcgctgagacagagcagcaggaagcagaacagcgggtactggcggcagatctcgcgtcccacgtccagtcgcagccgctgcttcagcttctgccccatcgtccgcacccagggcaccatctccgtaacggcgaggccgagactgcgctactggctgaggcagaggtcaaggcgaccccccatccacacctcgcgtccccgccccaccgacttggcggcgcacacagacgcctaccggcagttagccgccgcaggctgaggtcgcgtccggctgggcccagccccacgccccccgccgcgcgtgcgcggccgcggtccccagccgaccagaggaacggccgtagaacgtgcccgaagtcgtcacccagcgcaaagcctctagcgtctcgccgctccgccctcctggccggagtagcgcgcagtcttccgtggaaactctgacaacactggcgaccggccatttccggaaatcaaaggacagccccagcacccagtaactgcctgtattgcggaggagagggaagaaggttgtagggagcccggaagaaactacagcacccccgtagccgccgggcgctgcctgaggggcaaccggagctcgtggagcccgctgggaactgtagtcttcgtgacacgaacccgcagagggatggagcgggtggtagcgcttccccgaccccgcaacgctccgcgcctcaccgtacactcggctccgggtgggagcaggtccgagctttgcgtgacgcctaagggagagggggataggaggacgcctttgagtcggtattttaaaaggggtgtgttgggggctgggggggtggcgagtaaaacagccctagaataaagactacaactcatcaggccgccaccccaccaacaaaatctcttttgcgcgctcacgggcaagggtagagctcaattcacgccggctccgggagcccaaccaaaatccgagtgcttggaagaggcaggttggcagattaggtaaaatccctcttatagagtctcatggggttttccctttactaattcatcacatttctaaatttttttttctgtattgtccgctacagtgagagatgcaggaagactattatcgcgaaaatttacttaggcggtacagacactaagcactttcatttgaccttcatgcattcaccccatggtgtaggtacagtactatagtttcaatcattatacaggcaaattactgagacagaaaggaacttaggatcataaaactaacaaagccggaatttgaacacgttctaaagacagagcctgtgcctgtcatctctctttcctaggatcttatccttcaaagtggggaaacaaatgttttttaatgatgtatgtagtttcatgaatattttcccgtattacaaaaacatggatctttaatgatgcattattatcctttatcagaatgtaccatcctgttccattattgctaaccactaaagtccattgatattaccatccttgatgataaacctatgcacatttctaattatttagaatcaactttaatacaattactgggtcaaagggtaaaaacaaacattcttgatacagtcaaactgctttgtagaatggtggtaccaactccacagtggtgtataaaagtaaacaatttcactgatcctcacgattagctattattgtctaaacatcacaaatacacttttctgtttgtgactaaaccatttaaaagactacagtgtaacatcattggaaagcttaccattttttaatatttctaggtacatatttaaacatttattaatttcactttggcagtttttaagtatctttatctgttaatactaaaataggtgtatgttgagtggatctacatgtatcaagtgcctcctatggacttgagtgctttacacttttgtaaattaccttttaaaaaactaatctcatgacaaataatgtaagttattaacctgcctggtaaattatgttgccttttgtttaaaacttttgcttccttttaaagccttattttgaaattactcttttcaccaagagccagtatattttaaagacaaaatgttttgagttctgttcaaaacagacatcactacaacatccaattaaaagacttctttcccatctgatttcttagaggcaattagaataagttaactggacaatagataatttaaatttccaaattgctcttatgattagaaaaggaaaaaaaatataataaacttcagccataaggaaattctttatggcagagaatttccacacctaaagcatgaaacataattcaatttctgtcactacggacctcatctaaggaaataacctttatttcattacatgtctttagcctatggtctagaacccacctttacacgcacagagctcgaaattttttccccaaccttgttaagttctgaactttggagaggttatatggaatatccacaatcaaccaaccctggttctgaaactagctctatctcctactagcaacatgttagcaagattaacttgatctatctcactcctacctca

SEQ ID NO: 585844 - DNA, 4001 bp, Homo sapiens
tttgctcttgttgcccaggctggagtgcaatggcccgatctaggctcacggcaacctctgcctccccagttcaagagattctccggcctcagcctcccgagtagctgggattacaggcatgcgccaccacacccggctaattttgtatttctagtagagatggggtttctccatgctggtcaggctggtgtcgaactcctgacctcggtgatccgcccagctcggcctcccaaagtgctgggattacaggcatgagccaccgcgcccggcctatgatccacattttacacatccataagaagacaacagtggcttgaaacattaaactattcgtttcatatcttaaagtttgattaactttttaaaatcaatgctaactacgtaagaatcattttttaaaaatacttaagtttcacaacaatgtgaatatactactgagctgtatgtacacttaaaaatggttaggatggtaaatttgatttttgtgtttttcacgacacaaagtgtgtaagttaatgagaattttttcacttaaatgttaatagtagcttgtcatataaattttgattaaaggaaaaatcgctttacacttaacttttaataatttgctgtcatctttaaattaatgtaattaatttttaaagatgcttccatacatgggcaaattctttaatcctgaattatagagtgaaagtgaagcactattttcaattaacatctttcaaatcatctaaattattgccaacaaatactagttatgaaattaggtatattttatttctgttgatttctttattcaattaagtgcaaatctcgaattaagagagcaagatccctagtcttttcttaaagcaactgtagttctggattatgaggtaggtgacaccacacctcagcctttggcagggcggtggcccaaaatgctgaagtcaaccatgtccaatcacccttctggtctggctcagccctatcaaaaattgtcaggcttctgtgaactttcattaagtcccgttcagaagactgcacaacccaggttactttagcagctcgggaagggcctggagcagccgggttggcttgctacctctgggaagtctccaggaagagaaaactgggaaaaggctttaactttgcgcaagccccttttctctgtcaacatctctttcccttcccagcgaagggatgtgttctcgaaagatctacccctttccaactcaaatgtcattccctgatcagctgctggaggggcaagcggcgctcaacccacgccctcctcttcgagcaccttctccaagtgccagcgcgccgggctcgctctgcagccccccacaccagccctacaggaagaggggccctggctcacgaccccggcccgcctctgcaagggggctcccggcctgggaggctgtggctgcccgcgggggtccactcccgggtcgagtgggggtgaccagagccagcgggaggggtttcttgggagaggggagagacggcctcaccttgaccctgatttcgtaagtggtgaagcggccccggccgacccccaccgtttgcgggttgctcacatcgatctcgaggaagttgctggggggtccgtaggcgtcattcaggttctgcggcttggtgatcagccgccgggtgtcagccacggtctccgccatttcgctgtagctgctgccgccgccgcgggctccctccgccccctccgcgttcagccgccgccgccgccgctgctgcccgccgtggggacacggggctcgcgcgcagcggtcgcgaagagaacgagcacgtagagcgggcgttcaccccgcacgcgaagctcctccccgcgcccctcaagcttccgcctccgagcccaggggagaaacggctcactagctggaacgccacgcccggctcccgggaggcccggccgaggctggggaggggcactgcggactggggtgtgaggagaagcggtgtcatgggactcggggtcgcaaacaggttccggccggactacagcgcccacaatgcaccgcgagcgcgccgccgcggggctgcggccgaggaggcgaggacccagacgcccagagctggcgcttcctgtctctctgcgccagcctcggcctgcggcggggtagagcgccggaaacggctttagcggctttgggaattgcgggcgaaagttaaacggagagatcttagagatttgcccgcaaatcgaaacaaaactgcccctactaactctgtgccaacctgtgcaccgtctcactgtgaacccctgaaaatgcctttctggagaaggttaagcaaatgcctgagatgattttgccataaacccgagcgttgcaccagacacgcgtctggattgataggttgaaaccagtaaagtgggggagtgaaataaaaactaaagccctagttaaatcctagcattatggtcaaatcgattttggagacaggtcggtccgctaaaacaaagtaacagtagaccggctgcaagctgctttgggtgtccactttcgtttctcacgaagtcctgataagttttttttttttttgaaaagtattaaacgtacctctacaggactggaaatgcaactcacatgagcctttttaagaaacggggaggaaggccgggcacggtggcttatgcctgtaatcccagcactttgggaggccgaggcgggcggatcacgaggtcaggagttcgatactagccttgcccacatggtgaaaccccatctctacttaaaaatgcaaaattagctgggcgtggtggtgcgcgcctgtaatcccagctactctggaggctgaggcaggagaatcgcttgaacccgggaggcagaggttgcagtgagctgagatctgccattgcactccagcctgggtaatagagtgagactttgtctcaaaaaaaagaaagaaagaaacggggagaaaacccaattaattaggtcctagttcatctcttatggtccaatgggaaatgcagattttaaatgttgagatacgatacatttctatctctgcccagagagttatccctcacaactatttctgcattttttaatatgtcaagtttaacactataattactttaaataacctgatcttccccgccccccttttctttagattttaaattattagtaattatttgtggagacgggatctcactgtgattcccaggctggtctccaactcccagcatcaaagtgatcctcccgccgtggcctcccatatgtgctgagatgacaggtatgaaccaccgtgcttggactgatctgtcccttgaactgcaaatttcttttctttcttgctttttttttttttttttttttttttttttttttgagacggagtctcgctgtgtcgttcaggctggagtgcagtggcgcatcttgtcttactgcaatctccacctttcggattcaagcgattctcctgcctcagcctcccgagtagctgggattacaggcgtgcgccatgacacccagctaatttttgtgtattttcagtagaaacggggttttgccttattggccgggctggtctcgaactcctaacctcagctgatccgctcgcctcagcctcccaaagtgctgggagtacagaagtgagccaccgtgcccggccaacagcaaccattcttaataacactaagaaacactggaataaaaagaaattacttggccgggtgcggtggcttgcgcctgtaatcccagtactctgggaggccgaggcgggcggatcacctcaggttgggagtttgagaccagcctgaccaacatggagaaaccccgtctgtactaaaaatacaaaattagccgagcgtgatggcgcatgcctgtaatcccagctactcgggaggctgaggcaggagaattgcttgaacctgggaggcggagattgtggtgagccgagatcgtgccattgcactccagcctgggcaacaagagcaaaactccatctcaaaaaaaaaaaaaaaaaaaaaggcattacttaaatacaatgta

SEQ ID NO: 585845 - DNA, 4001 bp, Homo sapiens
ggttcaagcgattctcctgcctcagcctccagagcagctggggctacaggcgcgcgccaccacgcccagctaatttctgtatttttagtagagacagggtttcaccatattggccaggcttgtctcgagctcccgacctcaggtgaaccacccaccgcggcctcccaaagtgctggaattacaggtgggagtgagccaccgcgcccggcctataaaccgcttttaaggttgcaagatgagcatgtactaggatgtgtaactggtaatttctggaatgtctggcaacaaacctcaaaatcaaatttccttagaaatccttggcctaagttttatttttaaaaaggtcaacacaaaattaatacgttaaaaaggtggcaagttctatcgcattaataaaaccaaagcacagcacaggcaataatatattaacaagaaggtaattatttcagtaacagcagcaacaggttccctggaggagaatccccatttctctacaaacgctgcacctagatggattcagagcacaaaatttaccacagcacaacatctagcagaccgaagtcaagcaatgctgatctttcaaagagatttcacatttcttaccattttctaccttaacactccacaaaaaaagcaaacacctatcgaaaaataaaaaataacgtttctagcaacccaaaagtagctcagagatctcaaaaacaaatagacaaaggggtgctgatgctaacaaagtgacattacaaaaactaagtgcaaaagtaaacccactcctcacagtgtatcacagatcagttaatggctcaggtatagagcctcctcccccaggtcctcccttccgtgaccgtgacttccccagtggctattctacatcaagtaactactgaaaacgcccaaggaaaaggagcgggggagggtggcttttgaaaattcaggtagccaagagtgactgctaatttcataaacaataacgtaaaacaagcaaaccaccgctcctagccaatgacgaagcaggagtcaaagttccaccacgtaattcgggcctgggccttttttcaggcaaacacgtaatcgaaagcacagtcatttccctcttgatattttattcatgccggcaatgccattcacaatgaaaaggtagcaaaacaaaagaaaaaaataacagcagcgaaggcaaaggggcgcggggcgtcccagcctcggtccctccccggccgcgagcccccgcaggccgggacgggaagcgccgcgtcctctccgccgaggtctcgacccccacccgccccgcgggggcgagggtcccccaggcggcagcgggaggggacgtgggggcggcggggacgccggacgccacagagcgccagtcgcctcgggggcctccccgggctgcgggaagtttccgtcccgcggcccctcccggcgagcccgccgcagcccacgctcaggtgcaaacttcccaaacctcgctgcgcccggggtcccaacccgcgcccagacccgacgccgtcccccggtgcgatcctggtggtctgtctgcactgcccgccgcacccatgcccagaagggactggctgggccgcggacccgcccggggactccaccgaggaagcggagtggcccctcgaccacccctggccccgaccctccccgcggccccggccccgaccctctccgcgccgccccgggcctgagcgaccggcccggcctgcgccgcgcgcccctcaccttggtggccatggcgggcgggtcccccggcccgggacggccggctcgtctcccgcgccgcggatggtgattctgagccgcgcaggcaaaggcaagggcgagggcggcggctccggctgggccccggcgcggcggccgctcctccgcctcggccccgagtctcgacgctcaggcccagccgctgggcgctcggctactcccgcgccgcacgctcctgcagttcctgaaagtccccggctgcgcggcccccgcccctgtcggccgagcctcccatttaccgcggcgcgcgcgacgcccgccggaagcgcgccctgggccctcggccgcggcccggcctcctcgcctcctggccgcccccgcgccgcgccgccgccccgggcagtcaccgccgccgccgccgccgccgcccccgggcgcccttggtcgaggctgggagcggcgtcccgcgcagcggcggggtccggacgggcgccccaggccatggcccgcaaccctgcgtggccgccccaggggaagcgatccgcggcccacagagccgctcggggtagccgaaccccgactccggttcacgctcggccggcgccgcacgccgtggctcggcgctttccgtgcatgaggcgggagggggcggcaggaactctcgacgccccgggcagacaggagccccgcaaccccgctgtctttgccccacgcctggggtgttgcggggtcgccgtgcccttggccgagtaccctgagtaccacataaacagctgggaaggagcggagcgatggcttcctgggcctcttcctcctgcccggaggctccctcaggccggggtcctggcttgaagcccctgggacgggacggtggggggtttcgttctgtgacgccccgttaacctcattctggaatcttgataagcttaaaaataccggagggcccgagaggtttgggggacaacaggctctctgaagtggaaacgaggtctctaaaattttccatctttctgtcagtgtttctttccagagttggagatatatatatgggtgttatgaataaacgaatgacttgaattgagcagcaagatttttcactcaaggacaaaacacgactggaagatgtgtcttaattggcatactagtggagtgcttttttattattatgagggatatatttgtaagaagagacaactatcaaatgtaaatctctggtgtttaatgtcaagtttgtgtcttcttaaatacattctatttgacctgagatttcactagttatattcaataatggggtttaaaatagatacggtattgcagaattttctgtgaatttttgtgtttgttgagctcatggttaagctatagtcatcataatatgcataaatagttgtctttctccgtaaaaaaaaatattgggaggccaacattcattgacggcctgcttgctgtatactaggcttccacatccccatctcatttaatccttataagaaacatttgagaaactcattattgtccactgtttacaaagaagagcgactcagggatcacttaaataacttgcccatttggtaatacttattcaaatcgaaaatgaccgtagccttggacccagcagccctcctgggaatttatcctgtcaaacacttgtacaagtgttcaaagatgttcatcaaagattgttctgtaataactccaaccagaaagcaacctatgtgtttgttaacaggactgtttcagtaaataagatacatccattcaaacaaaaatactaggaagcccgtaagaaaatgataatattctaagaggtgttaagaaagataaaaagaacattatgtatggtacatttatgtaaaaaaaaaaaaaaaaaggaaatatgtgacacattcctagaaaatttctgagaaagattcgccagatcctgttgtcagagtttttgaccatgtgtatatatgacttcatttaaaaacagcagttatattttaataaacaatggaagaaataacttggctaagagcacacactagtatgtggaaaagccaggatttgaactcaggcaatgtcataagtaatgagttttccatattcttttaaatgtgaaggctgggtacagctctctctgcagccgttcaacaatgcatcccttgataggaaggtgcaaagttaggggcacacctgtgaagacaggcctttccacatgctcatctggcaaatcctatgcaaatagtcatcctgggcacccagcaccatgaaagcaagaagactagagacttcaagcttttcccaccagaacaatt

SEQ ID NO: 585846 - DNA, 4001 bp, Homo sapiens
ccaaggcaaatctcccttaactctccgttggactcatgctgcacctcatgcttccaggtactaagttccttatccagtaataaaacccctaattctgatatttaggttgcttctgacatttctgagaagtaaagctaagcatatgcacctaggtacgcatacatatatgatatatatccatgcgtcccctgctaagcgtgagctatgatagaaaatgcttgttctaatgaagaaagcgtcaaagcgcaataaatttgacttacttgcacaccattttcatccagtttgttttttaaatacaaactgaaccaaaactggccaagtagtagtattaagccacctggtagtattaaggatttcatgcagaagatggggaacaccaagaagaccgcaaaatgcaaacctgctactttttgatggctcgcagaaaaataaataaattgttttatatcaatagagactcgtgaaatcaacacagaataaaaccctcgcccaggcaaaagccgcaacttcatggaaaataaggaggtggggggcaacgagggggtccagagctgagcggtgctcttgtgcaattgctctaacgcgaacagctggagcgccaggctgctgcgctctccacctctggtgcaccgctggcctggcggggagcccagcctcgccgagaggactccgggccggccttagcgaacaatggacaggcgccctgcaaaggccgcccctcagacagctgtcctccagcggggctggccggggtctgcttggctgggaagtgaggcaggcagaggcgagcgggaggcggaggctgccagtggtgaggtgcgggcgggggcgggcgaggagagcggtcaggaccgtgcccagacccgcgcctctcgggccgcagctcgccgggcactgacgggctcttcacgccgtcgcagctggttggttggggggaagcgggattgaggagcaggagggtgagctgggggagaggggtggaatagagctctctccggggtgccccggccaggaggctcctaactttggagggaccctgaggatgattctcaaaaaggggggagaaactgcaccgtccactgggaaagcctcttcccctgcccaacgccgctcgagtccccggtgccctcgccctgaaacgcgtccgtgccaacctgggattcgtaaggttaaatagtatgtggtcccccctcatcaaatctgaggttggcaacaatttcggggatgcagccctcgagttggcctctgctttacacctggaggaggagcggagccgttctgggcatcctacagaaactgacaagcgcgccccggtaccccccagatccataccacggcccacggggagcgggcgcaagaaagagctcagtctccctggcccccgagatcaaaaaataccttcatctcctcattgatctcccttttcactgggtgagccggcttcctgctccgtttattttcgggaggtctcccttctttctccatttctgccatgtttttgtgtctggtttctgtggagatgaaatggctgctgccgccgccggcggtggtggtggcggcggcggcggcggtggaggtggtgctgatggtggcgaggctggcggaggtagcggtgctggcggggccggaccgagccgcgagggggagggcaggcgccgagaagcggggtctcttctagcggcggaggacgtcagtggctgtcacgggtaaggatagtgcggagagtctcggggatgccgccgccgtcgctccggctcctgctgccgccgccgccgccgccgcagccaacgccgccgctgctgccgctgcccctgccgccctcgctgccgctgccgctcccgccgccgccgccgccgggccgcatcctcggggccccgtggagtcgtcagccatcttccgtcgctcggtccgtccgcatgggcgcggggagcaagggccggcgcggagagcggccccgggcgtgcgtgcgcggctgtgtgtgagcccgggagagcgcgccagccccggcgcccagcgcctcccgcgagccgagccgggggcgggccgggggccggcgcgggaggaggggagggagcgcggccgggagggggtcggagggaggggaaaggtggggggggcgaggacagccccccggctctcgagcgggcgtggcttccaccgtcactggatacgcggatgctgcgcggctccgggggctgctcgcagccgcctgttcatccgcggcgggcacgggcggctcgcggcgccccccgcggccgccacctccccgccacacgccaggggcgccggcgcccgctcggaacccagccctgcttctcagctccgcgaggtgggctgggttgcgtgtggagttggtttttgagcccgtcctaggagccgctgaggaaaaatgaatgggggtgaaaggagaaggttgggcggcgggaggtcgcgagacctgaggtcgcctggctagagggccgccgtcccccggggagggttgactgagcctgccgcctcgggggtgcaacgctggggtctcggggaaaggaaaccacagcccggacgagcttccccccactgagctgccagaatagtttccccctccgggggccaccgcagagtgcgcggaggctggagaccccttggagaggtccccgcgccccgcccggccggtcctccacgcggcgctgcctcggactgcaatggcaatgaagcttttgcctctcaaagaactacttagaagtaggacatctcggccttcagccccttcatttctttttccccttgttccttctctctttatctctctctcacttatgccctgcttcaaagtaacagctttacgcgtgaccccgcctgcacccttatctgggtgtcctgggtttcgcccaaaaggttgggctgagtgggagcttctgggagcgcacggtcccgcgtagggtcccgctcacccggaccccgaacgccctcgccacgccccggtgggatcctcccctccccgcctggttgcactttctcctcccgacttcccagctagcgcctgccctccatggagcggtgctcgctccctctgcgctcacaagtcccctctttggccctctcctgccacgcctggggccgaggtctgattgagtctgtccctgtccctgggttgaggcattgggggtgacgactggatgatgtttctgtgatacgcgcggctctgagcgctcccacacgttgcagaggacacattgacgttcccggcttctccttcccgcgcctcgacacttcataattacctgacacaatgcgatatgggggtgtccattgttccactgcatgttactgtggagtgttcgttatgacagtggtggaacttaaaattacacaatttttttaagttcctaaaagaatgaattccgtgtggggatatgagtaagctttccattaaatctcagtttggcctgtcaaacgaggctcattctgggtattacatcgcctaatttgcattttagcattgttttgtttcttaaatgtcacattagagatacatgggcgtgtacgcaggagagctgagtacctccacgttgcctattttgcattttagcatcattttgtttttaataaacgccaacttaaaaacatctgggagtgcacccaggagggctgagtacctcctccctcctgatttcttctcttccccgtcccggggaggcgaggggaagctgcaccctgctccccgtggctgcctagatcctgggcaagccaggaggccagagcgagccaggctttgcgcctgcaaggggtccgcgcgagaaacacttacgccgaggaaaagttaaaattcctgggacgcccaagagtcaagagaggaagactgatgaggttttaggggagctttgcagtacaggcgtcctgtatttgcgattttcccagtagcctctgagaacctatctaggtacactcaggtcgtgagccgcgagtcctgtggccgggtctcagagcccgcagcagcccacagcgcacctacgacg

SEQ ID NO: 585847 - DNA, 4001 bp, Homo sapiens
aaggttcgtctgtctcaagtaaatcttccagaatgtggtaacttcctcctcttttaatcatttacttcaaacacaatcaggctgaaatactgcatttttccactagatgcctccagtcaacaagatgtgactgtctaaaaattactcaacaaatttcataaccccgaaattcaaaacatttaaggaaaagtaaacattttttactacgtagcttaccaagcaatacagagagtctaaaaaacatgactatcgattatcttccttgtgcaaaccactaacgaataaattaaaaagacaatactattttgtaaaaaacgttaaaacataacattcccatacacacccccaaaaggcacagactcaaaaagtccacatacccctggttttatcaaccgagctcttgagaaaaaaaaaaaaagttaacaacatatattttaattgcattacaaatatgagtaaatagtaaataaaaacaagcctgtttcagtttcccactaaagggctattttccttgtgaactttgacccctaagggaaatcaagaaaagtatcaagtctaaagatcctgaactgttccacagttaggttactgcttttttggtaacgcacaccacaacggtgtgcctcctcctctcccacctgaagtcaagtgggctcagtgaagtttcacctgcagggtagctggggatgcagggagtctccaagtcctaggctggagtcccgaccccgtttgctctcaggaagatgacaaggaccatggttcctagcacggagtagtgtcctcctgtctcccaccttcagtgtgacctggcagtaagacaccactcccacttctatcaggaggtgaccctgacactcagagacacctgcggacccgatgatgtctggccaccagtggacaggcgctctcagccctcctgcaaacggctggcacacctacctgagagaccaaacatttccccaaagcacattatacaacaagaacaatttcaatttgcaaaaaaaacgagtgacacagtagagctttcttttcaggccctacaattcaccagtgctggcaatatgtgtaacggaatgtggctcacaacagtaaggcaagctccttcgcaggaccccaagttccctgagatgacagaagtgtgttcaaacccatcgaggcactccttctacaatgaggtagaccatgtgtttaaaagagagactatcgtgcctggaaaactcggaaccggtacaaatacgaagcgagttctcctccacggagaggcccgtccgtatggggcctggctccctggggtcgcctctgccggggactgcctcccgccgctcagcctggaacctacccttggccaacgcctcctggtacttctcctcggtgacgttcaggttgttcacgtaggccgcgtggtgcttgctgtggtgcagctgcatgatctgcgcgttgatgtgaggttccagggcgccgtagtcgtagggcaggtcggggaggctgtgcttctgcctggagcccagataccccaaaaccggagccagctgcctgctggtgctgaagacgagaaagcacagcccggtcagtcagcgccgcgggaccgtctacgcaggctgggctgccgaggaacggcagcgcgcggcgtcccccgagtccccgcgtcccctccctgcggatccccgctccagccgccgcgccgggcactcccgggagaaccgcctgcaggtgccccggtcccgccaggcccggtgcggccactgtcgccattgccgcggaggccctgcccgccgcgagccccttcgcccttggggccgtgaccgggtcccctttcttctcacccgcacactgcccggctcaacatgctgctagtgctggtgctaccgctgatgccgccgatctgctgaagccgctgccgaagccaccacagccacgagtgccgctcctgcgccgcccgcgggccttaagaaagcgcggggagcagggccgcgaccccagctgcgccgcaagggcaccgccgccccgccccccccccccgcgggccccgccccgcgcccgccgcgcccaaccccgggggtgccctgcgtgcctgtcccgcccgcccgcgcttgccgtacaccccgcgcccagggcacgggagaaaggaggctgcaggctagcctcggcctcggcaacctcgctgcctgtctgccgtacttgagtggcgcgcggccgaagggaggcggcccctgcccccgtggagttggtacggcccgaaggccctgcctccggctccgcccctgagggtgccggcggggatctggctgcactaggcggctgcggcgcctgcccctgagttttggttgcgctgccggggggccgcggggtccagaggcctcactgcaaaaagacattcataccctcccagggcccccgtggccgttcctagggaagacggggcctagctgctggtcagcgccgcccagccggcctatgagctgagggtagagccagcgcccttccaacccgtattcagtactcttgcgccgtacccttgctttgcaagtaagccgaccttgggacctattccaggacaggaggcacacagactttgtccccaccggctgcctaagaacagttcttggacacccacgacgtgcccgagactgcaggcaggatttgcacacatttatctttatttttacccctagggttggtattattgattctagtaatagtgaaatcctttgaggttaagcagcttctcctgggcacagttaactgagtcaggactagttcccaccttcctcactactaagccctggcagtcatgttttgtgtgtttacagtaactctgtgaaccaactgttcaggataacataaaaggacaacagaggattctttcctgcgctgtcttgtagcctagtaagctgttaagtatcaagtgctctctcaacagttaaacaacaatcctgaatggtgtgaatcttccatgtgtagaggttaggaaatctacactgccattggcgggagttgcccctttattgaaaagaatatgatggaaggtagcaggtgctgaaccgtttccgttgcttcttgcaacccccgtacagccctccgaaggatgactaggcttccggtaagtggaatgggaaaacagtcaggcgaagaggaaccacctgaacttggcttcacaacaggaagggctgggcttgtttacagacgtcagaagaatgtaactagggctacgtgttggggtgaaaaaggaaattcaggctgggaccaggttatagatactcttatttttttaatttattatttatttatttttgagacacagcctcgctctgtcgctcaggctggagtactgtgtcgcgatgtcggctcactggaacctctgcctcccgggttcaagcgattctcctgcctcagcctcccgagtagctggaattacaggcgtgcacctccacgccccactattttttttttttttgtatttttggtagagacggggtttcactatgttggtcaggatggtctcgaacgcctgacctcaagtgatctgcccgcctcggccttccaaagtgctgggattacaggtaggagccacggcgcccggcctatagatacccttaaaacgcagacaagagcaggggtttgatgtgattgttaattggaagctgagaaacatttctgctgaggtgagacacactgaaagtggtttttcaggcaaggtggtctggcactgacttggggggatgaagggagtgcaggctagttaggaagctggtacattcgtctcagcaggaggtactgcaggtcacttttagggcactagctatgagaactggaagaaaagggcattttgaaggatgaatccacaggattcagagacagatcagtcattgtaatggaaagacttgatctagtgataatgaaatattcctattgggaggctgagctcaggctacttacttgcacttcttgtttgtatagagagtgatactttgagagtttaaagcgactcctaggacatgccc

SEQ ID NO: 585848 - DNA, 4001 bp, Homo sapiens
caagaaaataatagcattaagaattgtctatatgggttagttattagcaacccaaaaacgtattttttcccttttgggaaataatttttaaaatacatttggaaaagttgtggtcagttctgcagtttcctaagtttctggtgatgaattttcctatgcttacccagttttgtagtcttatgaatcactttagttttaagtgtaattgctagatagaaaatattttcattcttagccatcttcttacatcgcatatcataggcaaaagttgtactttttaaagtgcccatttcctcctatatagcaattctgagacagaacccagaaggctggtgcatcttccctcatggtggtaagatcaatttccagtatgtgtatttccaagataaatccgtcactagcttctttaatctgaaaaatagcaagttactgcctcatgggttcctctccctagggatccaggcagctagtcaattagttgccttttccttaaaattatttctgtctaaagcactgaaaggggcatgactaggcataaatttctcctttaaaaatatttgttctatacagagagcagattactttactgccagttattttacttgcattattcttgttaacatctattgttagcatcacaacttagcatgcagtaattcctcattttataaagaaatattaccgaagggttcctaatccacctccctttctgtttctggcatctccttccaactcactttgaaatataaaggtgaacaaagaagacatcgggggaaaattgcccaccaacttgttttctacatcttctctcccagtcgcgatactactagaatgtctggcctagtttatcatcatgggtggcactaacatgggctatctaactaacttatattgccaatgcaaacttatttttgtttttaatcaggcagaataattccagagctgagaagccaatgtttaaactcagccctcagacagcattaacccaggcgaaagcttgtgttccagtaactgggctccacaatcaaaggtatccggctgctgtcacgtggttcccacaaagtgacaagatgctgcatctcttcaaggctttcccggtgaaaattatcacccaaccaacccctgcacggcttagaccaacacttttaatctcaagttttatccgcctgctaacccaccccatcattcatccccaaccctttagaaatccagaacttgctcacttctcagcagaggcgaggtttccaagtagctgaacaaatcaacagcactttccttctgatattccggggatctcagggtttattattgtgcctttctgcgccgaggaaagttcaacttcatattattgtatgcgactttccggctgagcatgactttgggctcgctcgccgcagttccacacccactcgatttctccaaacaatggcggtaacgtcaagattcagctgcccccagagcgggtgacttcccggcggtccgcggctgggctggagctgcagctctcagcaggctaacacgcgaggtaccaagctgggccagacgctccccaggaagtgcagagatgttcatgagctgacctcaccgaactgggcaggagagaaggcgggattgcaagggacgatagggtagaagtaaccaaagagaggttactttcaagaggaaagagaagaaggcggggagggggacgggggacgggggtggggagtggcgggataaagagacaaaaaggccagagccacgcccgagatggaagattggcagcagcgctcaaactccttgctctattctcttatcccgtacttggcagaggatcccaaaaccgctcgaacacggatgcactggtttcctgcaaagctttgtcctgggttcggtcattctccatcaattatttacttgagcttcttttccaaggaggcggactagaacagccttccgggcgtgactaacatctcctgatgcagctggctggcggctgctgggagttctctttgttcactcactttaattctcagtcgagctctacacgcggtgctccctccccacccccagcccgggcggagtcatcagatgtcgtttccacgaatagataatggttgccatgatgggacccaccgtcccacagacaaagggttcttgcgaagccacgactaatttagtgcaaaccgaaataaatatcggcccacagagatcctttacagaacggtttgccttcagtacgttttcctgttttctactgagtgccggtttctaccgtgaaaatgagtaattgctgggatccataatctttatagtagtgcatgcgaacaataacagaaaccaggaagaatacattatatcagcctaaaagggaattcatttaaaaagaggagttcagaatatacatgtctttacaatttacactaacccatactgtttcacagtaataatatttttaaaaattaagtggaattttctctttttcttttcagtttcttctttcagtggtgggcggggggcatgggagcctcccttctacctctaagaattcctttgtgagcttgagtatgagaataaaagtaagtactgcttttgaaagggcattttaaaatttaatttgtcttacatttatatggtgattttgtaagtaaaaggaagaagatatcttgaaataataatagctttttgtgccaacatgaattttggctcaagagattcaattttccaagtgttgatcttgcattaaaagtgaaataaaaacaatttaggagtagtttgcataaaagcaattattacagcaaaataaaaacatgctcaagctctggttattcttatctttagagacacataaaacaaatatgatatcacgataaaatcattcatgttccaaaataggtattaaaagccaattttgagcctggcactgtccaaggtactgggatgcaaagctgaatcaagaaattgtccctgtgctggggacactcaagcatactggtgaaaactgagataatttccttattttctttcaaatacctttgggaacaggaaaagtgacatctgtgacatttataataaaaagcccacacctcgactagcataccaaaaataaaggaaaaaaaaaaaagcaagtgaaaatgtaatcacaagttggtttgaatttatattaggcaatttcttattatgtacccaaacttgagctgtaatatcctcaagaaatatcaagatgcacatgtctcatccaatcaaaatggataaagtagatacaaatatttttcagctcaatctttaccaataaaatattgatactgtaaacacagtctaaagacacagaatatgcatagtcctgcttctctaagaatttttactctgctcaggcatctatgttttgattttttttccgaaagcggtatcatttatttcgtgcaaatagtaactttaaaaagtaaaataaatattaagaatggattattatgtatccttaaatcaaacaatgtgtctaaatgtttcattttataatttagtattatgcaatttcaaggttgaaaactgtaataatacagaataagtataagcaacatttaacatgcttgtttacccataagtatgccataagaaaaataacttctgaattggatattttcctgatttattcctttatttgctggttaaaattatattgcttcaactaagcaaaacttaaaaatgattattcaaaggctttttttccaagatttagaaagatttcagcattatttttactgtgtttcagaagcagacaggccaatcagccttctaatgtttgcttataataatgagttatccacttcatagcacagcaaaatgtggaccttcgatcaagggaagaaggctaaagtctcaacttggaaacccttaagaaatacgtagtttaaaatttccaacctcctattctcacgactttacatcacaatatcttaatttatatagctttatattttgcaaggccctttcattttgtgtgctcaaaacaaagcgtgtgaagt

SEQ ID NO: 585849 - DNA, 4001 bp, Homo sapiens
cttcgaactcgtcgtcggaggacgaggagcccgaggaggaggaagaggaggagtgggacgaggccgaggaggacgcgtgcgagggcgcgctggacggggcgggcgaggcggcgcgcaggctggcgtagccgcggtggtcggcgggcgagcggccggcggcgggggacgaggcggcgctgctgcggccgctcaggctgggcgcgtcgggcgagcagcccgcgccctcctcctcgtacaggcccagggggtcgctggggtcggctcccgcgcccacgccgcccacgggcgacgacgacgtgcccaggccgccgaacaggtagacgcgcttcaccttcttctccgccaggtgcttgcccggggccgcgagcgctgcggaggccgaggctgccgaggaggcggaggccgaggcgctgggagtccgcgccttgtacagcgagtggtggtcggcggcggcgcccaggggcagcagggcggcggcccccgcctgttcggcggcgaaggaggcggcggcggcagccgctgctttcccgccgccgccgccgcctgccaggatgagcttggcgtgcggtttgctaaccccaccgcccgcgccgcccgccactttggagccgcagctctttttctgcgccggtttggagttggcgccgccgccactcgcaccgccgcctcctccccccgcgttgctgctcccgccgccgccgccgcccccatggccgcccccgccactgccaccgaccttgtctcccttctcccccggcttggaggaggcggcggccgaggagctggagttggcgttgccggacttcaccttcttcctgggccggtacttgtagtcggggtagtcagccatgtgcttgaggcgcagccgctccgcctctcgaatgaaagggatcttgtcgctgtctttgagcagcttccagcgtttgcccagccgcttggagatctcggcgttgtgcatgtcgggcgactgctccatgatcttgcgccgctcgatctgcgaccacaccatgaaggcgttcatgggtcgcttgatgtgcccactcggggtcttgcaccagctcgggtcgtcggccttgccgcccgtggaggcggtggagccgggcgtgggggaggaggcgattcccagctcgaggccggcgcccgagtccgagctctcgccggccagcagcgcttccgtgttctcggcattgttggtttgctgcaccatggcctcggctcggcgggcgcccacgcgcgctcacaccctcgcggcggccgccgcgcgatcgccgggccctcccggttccccgggccaagcacacgccgaacgggaagacgcgcgcggcggccgaactggcccctcaactcctcgcaggggcggaggtgggtaaagagagaaaagtccccaaaagatttggggaaggagttctccgcctctcgcagaggagttatagttcccaggctggagagtctctctctccctctctctcgctctctcaccgcgctgcagtttgctgtctctcggctgagtctggagaccgtgctaaagtagagaggagtttctcgaatgctggttgctgaagcttccaatgcaagtttctcgcggcctcccaggcaagtcttttttttttttttttctttttccctgaagcagttgattccagttcacgagcgctctcggtagctcaggaaagcgacatagtctctagcacttagtccctctcctacaatgcaaagcaaaaaagactgtggctccaggactctctgtgggcggaatcggcactaaggagttggtgcaattattttgttgcaaggtaggaagccaaaaagcctgcatgcaacagactggcatgaataaatgtatgtttccccctcccttctgcaagaagggagctggtaatggcaggagttcctccagtgcagactcttaaagagcgtgcaagaactagagacccgacagcgaaacaggcctcttcccctcacacacagtttctcttgctgcagcttagagcagaccccaattccgcctcgcgcctctttatcctttcacagtcttggctgcagccaatcagctgctgtaaccaacgcttcctcatgccaaacccctcccccgggcttcccattggcttggaacccgatgcaataataatctccgcgtgcaatgagaagctccaaatctgacctcattccaatttacagagcaaactttttaaaagggctagaagtacagctgagatttctgctgcctcttttttccttttgctgtgtgtgtgcgcgcgcgtgtgtgtgcgcgcgtgcgtgtgtgtatagtgtgtgaagaggatgttaatgcatgaaattattaaggggagagacggaaatgtattctaaccattatgttagataacaaggggcttggaacggggcggggtaagggtgaaatactgtaaatggaagctttctgcttaaaagccaagtgattatttttattagttcttttcagcattggaataaagaatcagcctctggtgcaaaatctgttccccagctctttcttaaagccaaagctgtaaaggggaagagaaagccacaaaacaataaatcaatggatattgaaaaccattaagaaagtggtacctagacacctgtcatcacaattattttaacaactctaggtacagcacagatgttgatgtattgtgtaaatcccttcagaaccgtttttgtgctgtttgtggaaggcagggaagaggactttgcaataattgcttactctcttaaccaagcaagggtcaactatggttatttaatgatttaaactccctgtaaatcctgcatagcccaaacaggggagctttcccttgaaacacattaggtagtgctccgtaattacctcaataggcagatttccagagttttgtataggatgtataatggcatgtaaaggatggaaatcggttttactttctaaatatttgttttccctgttttcaaaattaaagattgcttcactctcttccctctcctcctcccaaagccatcttcctcctttccttcttatatatttcctcttgttacttgaatcgaagggaactgaaaaaccaaggcaaagagaaactgtagaaggaggtgataactggtagcagaagagaatggggcctccggattcatagtagacctggctgctaatccttcttaatggtttgtaactatggggatgtggccaagtctcagttttcctcatctattatatgggaacactaggagctactttatagagggttgttgtgagggttcaatgaatttgtgactatgaagcacctgatgtattgtaagccctcaatgaatactaatatcttcctttctaattcaaatgccagacacactcctagtaaaagctgcatgttgttcaagaggctaaaacagaatagccacttatgtaaaaaagtaataacaggcaggacgcggtggctcacgcctgtaatcccagcactttgggaggctaaggtgggtggatcacttcaggtcaggagttcgagaccagcctggtcaacatggtgaaaccctgtctctactaaaaattaaaaaattaaaaaattagctgggcagggatgcatgcgcctgtaattccagctactcgagaagctaaggcgggagaattgcttgaacccaggaggttgcagtgagctaagattgagccactgcactccagtgtgggtgatagcgtgtgactatctcaaaaaaaaaaaaaaagtaatcacagatcattgatgtgaaccatagaaggacaatagtggcaaccctgccattccattgattttaaaagaaaggaactccatgaagaatactaagaagaatgtggcaaagaaaggatgccaaggtattcaaaataaacgttggctacagaaattacttgttttccagtgtctgaaaattagaattgtagtaaaaatcagctttccttaacactataataggaaactaatattcttcaggctaaccataagtggttaggtaaagtcaatccaaaataattaagtcgg

SEQ ID NO: 585850 - DNA, 4001 bp, Homo sapiens
cattcaaagtactttgcccagttagagtacatacaccttcaaaactaggatatatggaataaaaatttgaatttttccatgtttaaattcttcttgaaatttctaacacagttgttttcactatccctttattcttatttgtaaattatttttaaatgactaaaaaaaaattaaaggtccactggatagtaaatggggataactgtttctactgatccactgagggttaaggggacagtgcaaatttcaataatggttctggaaattttcagacctataacacctcagattgtttaaagttttggattctctcgctccccaagaaaaagcacttatgcatgaaatagtatgtattaaaatcccacaaagtacatggattccttgaagtccgtagatgaggaaactgtgactcagagaataagtaactaacctacattttaatttgaaggtaagacattataactttattgcctgagtttagcctaaataatatttagcattttatagctagaagtatttcttggccagtttaatactaaaattgttaattcaattactttaaagaagagaatgaagcaatagctactatgctttaggacgtgttctcttctttcctagtcatctttctttttcacatttccgaagtcaaggatctttttaagctctctgtagtataatgttacaaggccgtgcaaacctcgatcccactgttaacctcagacagttcatttctttctgttggtgctgaggatcactatcaggaaatgaaagaaaggctggtagacacagcagtcactcgatatgtatagactgaagagatatgagaatgcaaacaatattaaaagaattgcagctgggtcatttagaagggaaaggaataatctttcttgagaaggcagcaaacctgctgctgaccttctacctgctagaatgtgagttactaatcaatatgacatgtacaacagcctgtcaagttttattgcttaatgagccagcagaaaaaaaagcaaatgtatgtaccaagcggggggctcattgttccttggttaatatgtagcatctaacaaagccactagctggatcccttgacaggtgttttctactgctccattcctttgtccgaggccgcacataccaatcaaacaccacaatgcagaggtgctcaaggctaggagctgcaggaagctgccatggggcttctgggcagttttgtcggcatactggtctatctgggtgtatcgtcgtaaagggggattctgaattccattgcaaccccaagtgcaaatgtggaaatcaagcaacttggaacttgaaaaaaaaaatctactatgagaagggaaagtgactgcaagaggagtcaaaatgattcctcttgttggaaggctacctcccaccctgaaaaaaaatctttttccttgtccaaagcaatatttagaagtgtttctatagcaatttctatatacgtgcttatctgtgtatcttgctgtggcctgggagaatgagcacattcttcttcaaggccacaggatgcaagaaagggacaaactcggggctgaagtatgagagagagctctcctgacgttaacacacataattatggttctcaggcaaagagcaggcctttgctccgtcaacaggggcctccgcgtgccccgcaagggagctcccgccctcaccatcctcggtttcaggcggagcgtagttctccgcggtctcgctgtcgttgttttcggtctcctcctcgccctcgccttcgtgggccaggccggcatcctggacggcagcggtgacgttggtcccgcgcgcggactggaggcccgccagaagcagccagccgacagtcatcagcagcccggcggagcagcccgtgcccctggggctcatggttctcggccccgacggccgtccgaggcgcagtcgccgccgcggctcctgaggacaggtacgtcgaagagagctgcgacaccccgcccgtagccgcccggctccgaatcccgtgacgaaccgtgacgcctcaatggttgccggggcgctgctccggtgctgagcgcctggaactcgcgcggagctaggctgcgaggcgtgcaagacggaacgcgacgagaagccgcgtgcgacaagtccctaggagaggacgccgcccttccccgcaaccggaagttccctgcccagggcgcctccttgagccttccgggtgcggtaggcgttgctgtcggctgctccttctgcctcagtttatggagcgactcttcagcctcctcgctcaccctgcctgctttcttttaagacatttctttttcgtacataatgtttacccttccccaaactagacttcttatccctcacatactcttcgtgtgacttggtttcaaaatttcttatccagaatatccaatttgggatgtattgagaaggattcgatttcttctttgggatcagaataatagactttgagtaagaagaaatttagaaatcatctgatactccaagtccctcatttttaagtgaagagattaagaatcagagagatgaaatgactcgccccaaaaatccagaaattatttacaaagctggatctcacagtcatatctcccgaacacttacttactcgatgatcagtgattcttatgattcaaggttaacgaagaagcctttagtgggggtgattgggagttcaagcgctgaaaagttagggttgacttttttgattctgttattacaaattttacctcatctagtagtcacaatgtggttgtttgttgttgtttttgaaaagacatatagggtgccatactttgaggcttaatgtttaaattcctatgacaagtgagatgaaagtgaacttgcatacactctggcttttggaatatttgaatatctagtctcagcagactaacagataaggggggtaacagaaaagtattaagaggttcttcagaaacacttatttgtaacaaaataggttgtttgaagcagaagttgaaattttgtatttgaatattttctcctgcaaaggcttctaattttgaaaatacaaggactgctaaacaccttcagtgttaaagttcaaattggtattggtgagaagtctcgggaacatttatgtcaattaaaataccttaaaatatagcgcttgacaagattatgagggacgttaacatggaaaacttagatttgatcttgagaagtaaaggcctttgtttcatggctaaatgagtcaaaatttttcttttttgaatcctgagagaaataagtcaaaaattatgccgtcaaacacaaactttaaaaagatgatatatagtattgttgctggcaaattgttgagtgtttcaaagtcaattttaggatccattgcttcctgaagatagtatccttttttagcagaggaagtcccataaactctaaaatatgtaatttgactcaaggaaacattaataatctaacaaataatcatctccaaagggagccagatgggtctcaaagaggacctgaaagatttaactctgaaataaagactattaatatctctaatagcagcattataaatcacctataaaataccatgtcacgcatgtaagttataagaaaaagtataatatctgtcctcaacaaacttttactgtctctctagtactctctctagccacaaataaatgaaagataagtgtttagccagaagggcagggcacagaatctagagggactgaccctactctaacctgcagatactaaggagcaggaattccaccctggatccctgatatgctcctctgacccacctcatcctgcctggaactaagcatctccacccccatctccaatttccaagaggtggggattagagcccaaactcctctgccccactctgcccaaacatagctcacctatcttggtctgaccttaccttgcttggcctcatttggtatgtgggaaaatcattcctctatccagtctctgcactacctacccttgaagaccaatttgtattctgaaaaggaaga

SEQ ID NO: 585851 - DNA, 4001 bp, Homo sapiens
tgtttgtcatctcagctgattgtcataatagctctgtctggcagggagaaaaataatacatcaagccatgtttgtttaacatggatactcatttaaccaaacactatttcccacccctgcttatctgcttcacaaggggcctaaggatcaaggacagaagtttttaacccgttttttgattctatcctctcccccatgagcagtaatgaaagcaatcggttctctgatggaaaaatgcacacacacacacacacacacacacacacacacgtatcttcaattggtttgtggagccccttccttgctgaaatccatagactccatgttaagctaaactcagatgtattctcctgaatagactcacctacacagcaggaaaggacaccatgggtctttcattaatgtggtctgggacctggtacccttctgctacccctaactcgaaaacatggatcctccctaggacatccttaaaacagcagcttcttcctttaccccaaactggaaactgcaggaaggtctggagcttaaagttagaatcccagaacccttttctccttgctgttgcagacacacttggacaattaatagctctaactcctccagctcctccttctctacggtcctagcttatattaatagctgggtggaatgagttgtacctccctcctttctccccactgtgaaggagaatgaggagatcacacacccagaatacagaagaccagggagaaagctaagatctgatcccgcaaagtctggatatttcacaacccctttttgcagcactcaggccactcacccataacaggtaaatgagaacttgagcgcaggcgcactctgagcttttctgggagactgtggctgttcagcgccatgacactgttctccaaaggcaaacgtgcccccaaataccctcctcggccttaaccaattatggagctaccagccattatttaatttttagagtgttcataattctcacctgaactgtcccatccaataaacaatgacacaaacctactaatatctgagcaaaggaaagatgaaaggacacaggctcgaaagtatggcagactcatgtcaaatcccaggctcatgtcaaatcccaggctcaccttttattaacccaagcactgggcaggtcaaatctctggctccctttactcataggtaatatacttctccactgctgtgagatccagtgaggtaatttatgagactctctgctttggtggtgctctctgcctaatcaaatcttgggttagcacaaacataagctactattcaagcagctctttttacatgcccccaaactagcttccttctaaacttcaaatggtgccccccacctgcccccgcccccgggtgtagtatacttggatgtggccaccaactccacagcctggatttcttagaactcaactgtaggtcctctccacctcggtcatgccagagtcccttttttctggaaccttctccagctgtctgccgcaggtcgtgcttgagatggaggggagacggcagccccgtggactgtttccagtgagcatggatggactcatctgtgcccatgatgattttaaatattagaagcaacccagagacaaagaaagtccctcgtaagaaaggtatcagtcaaaacaaacaaattccacaagccaccgaaagtcaggagggcaggactggcctctaaacgggagccttactccctccacctgggcgtttcgtggtttggaagccctgggagccccagcgagtccgcccccagcccgaaccaggctcgctgcagcccccatccagctcaaggtgctccttcttttccacctcggggtcttcccacccccttccccaggggaggcccgggtctgtgctcagaggcctccacggaccaacgaaccaactggcaactgaactgccgaacgcacgccgcacgccgaggcctgagaaccgagagcctagggcaaaagggacaccgcagccgcctgcttctcccacagaggcgcgttccggggttgccgggacaccggctccagtaacgcggcgcgcagcgtcctgcctggctcggctgccggcccccctgtctgtcaccccccggctctctggccattggtacaggatggaggctcctgagaggtacggagcaaggagctccagccatggcccggcgtcacaggcaaggaccgctgcaaaagccactttgtgattttggactttttttttttttttaagagttgtggttcttttccaggcaattttcattattagaactgtaggctctggtagcagtgaaagatgcgccctccacaaagcttgcagatgcctggttataattggcgttgattagacaggatccacctaccacttacagagcgccttttctgggccaggcgccctggtggatattatcttccttaaacagccagctgcgtttttcaaaatagaaaaccaaattttagcaaaggcttgcgcaaggtcacccagaaaacagattcatttctaagtttcctcattccaaatccaccactctttccatcatattgacttaaatttgtcttcctcatcctttccagtatctaataaatcttgcatagaaagcttttctccaagtctagtttaagtccctaaattcgtgtttagaccaagttttcccttcttttgttactgattataagagaaataaatggtcattatagaaatattggaaaatatggaaaagtattattaatatccatgatctcaccatacagaagttaaatacttttttcctggatagctattgctatataacaaatcaccctcaaactctgttgttttaaacaacaacattcatttttaatttctgatcctggtcgttggctaggctaagctaggctgttcatgcttggggtctctcacagggtctcagtcagaggtcacagaggagcttcctcactcatgtgtctggtgattgatgctggttgtcagttgaggtcagcagggttagcgccagttcacccatgtgtggcgtttccatgtgctttctcacaccagtgtctgagtttccaacgtgagcatcccaggaggaccaggcagaagttgtattgcctccatagtcacaaatgcatggagagggaacttagatcacacctctccatcatggtcatactgtatgaagagcacaggggacaggggatcttgtggccctcctagaaaatacaatctcccctactgatatttaggggttattccttgtcctttttctatgcacatgtatgtcatatacccctagtgatttacacccctgctgatatttaggggctccttcctctctaccctttttctgtgcacaaatatgttaacatattatagatagatagatagatagatagatagatagatagatagatagatatagatatagatatctcttgtattgggcttttaaaatttaagattatagttgatggctggggctgtggctcacgcccataatcccataatcccagcactttgggaggccgaggtgggtggatcacttgagatcaggagttcaagaccagcctggccgtcatgatgaaacccgtctctactaaaaatacaaaaaaaaaaaaattagccaggcgtggtggcaggcacctgtaatcccagttatttggggtgctgaaggagaactgcttgaacccggggggcagaggttgcagtgaactgagatcatgccactgcactccatcctggacaagagagtgagactccatctcaaaaaaaaaaaaaaaaagttggccctccatatctgagggttttggatccacagatatgaccaactacagattaaaaatattcaaaaaatatataaaaatttaaaataatacagataaaaacagcaaagtatagcaacaatttacatagcatttacattgctttaggtattataaataatctagggatgatttgaagtaccgtacaggaggatttgcataagttatatgcaaatactatgccattttgtaaaagggacttga

SEQ ID NO: 585852 - DNA, 4001 bp, Homo sapiens
tgagcatcgactgagcacctactgagtgcagccctattccctcagacttggttgacagagaagccctatcgaattcagagggtccttgtgaaaaccaaagtgttttacaactgacagtgtgcaataagcaagtctggtagttttcagctctggatacccccacggggcctcactcagaggaaatgcttgtacatgcactgtcagcctctcaaaggcgagggtgggtcccctacgcagtgagaccacctcctccacacagccccacctgcctgggagctccgagaatgccccccaccatttgtctgtgagtttggggtggtgggactccaagctgggggtccttggctctggcccctcttgcaggtgggtggagggaagctcagcccaactggcctggctgaaccatggcctgggcctgcccgtctggtggggcgtctcctccccatccctgcccaccagcttgggcctggggcagcctggacgcctgtttgctttgttactcagctgagcagctggtgatggggagatgcagctttattggggaggttgcggcaggaaatgaggcaagtcccagccctggccgaggaggaggagaaagcccatggccatcataaaggacacaggctacgcggggctcatggcctgggtgtgggctgctgggcggccccagctgataggtgaggtgagggatcttggcctgcccctccccaacatgcacacacacgcacacacacatgcacatgcaacacgcacgcgcacatgcacacaccacacacacacatacttccgcgcacacacacgcacgcacacacctccaccagcctcaggggcacccagtcgcccaggcccttcagcttcccaccctgtcatcccaccacccacttcctctctccaccgcagaaatctggcaaatcttagaaatgagcaccttcgaggtactgctactgttgctttccttgtgtgccaagaccaggacccaaggctctcagcttcccccagtgtccaagggctcagagtgtgtgctcagcggtgaccccagccccctggttcctgtgcccatccctgcccagcccagctactgggctctggacctgtctcccctgtcccgaactggacccggccttagacttagccctgacccatcaagctccagcaagcccctgcccactggtggcctggcaccagggagaccctttcctcagcagagcagctgggttggcagcagcagcaagccgcttgtgtttctccagccaagcagaactggctgggtctcaggggccggggctctgcatctgcacggcggcctcccctcaggctgggcagactgggctcagtgtgggggaccccaggccttgccgggcaagggggctcacccagcatgtagagttggcccagagaggcagtctggggagcatgaggagggggcaaggaattctgagggtaaagggatccaggtcacagggtcactgatgactgggagatgagctctgagctggcaaagtgcgccccctccaagtcctgcctgcagtcgcccaccccccagctggcagggaaagaccccatgccagggtacccccacctcctgttggactcacctgttagctgcctggtgcccagggagctgtctgctgcagtgccaacttcaggggccgggaagaggtgtgggcagctgaggccactggcgtgtctcagccaggcatctggggggccagcggaaccaggggccagcagggctggtggcagaggcagcactcaggttggccactgggggcctggccaccctcaaggggtggccctctgaggtctcagggctgcgtgcctgtagggagtcccctacccccagcccagggctgcctgctggcaccgtggcaaggcccaacctgaggggcttgcagggagctggcagcaggcttggaggactgggtctgtggggcagtgtggacacggcagagtgcaggaatgtgctgggaggaagtcagacagccgcgagatgaagagttggccagggcctgatttcccattataagtaatccttccttatttacctgaacaaatacactccttgcttacctcagaccacaggcaggctcctgattaacccttgcaggtctccccctccttgctgggggatccatgccctgacagctaggggactcattcattcactcgctcattcactcgttcattggttgctgcatagccactcagctcatattacgtgcaaggcgccagagatacgtcgagtgggtccagggctggggttctaagatggatcagctgagggccagagacagacaagtgagcagcagtggagatccagaaccacccatgcccagatggaggactgagggggcactgagggtgggcaccaactagggaaatcagtgagggcttcctggaggaggtgctgtctggctactcaggccagggatggagagagcttcagagaaccctggggagggatcccgaggcttgtgggccaaccacgacctggtgggaactgtgttctctgtgccccacagggtcctcatgcagacctgtcacacagtggcggtgaggaaggactcctagctcgctttcccaggcccgtaatcgggggccagccagcagcaacttgctctcccatagccccaaagggtgatggcagggatgccacgcaggacagaggtacccaccaccaagcacttgctgccccagaccctccacctccttgagccctgcgggggccacacagtccagcttttggcttcctccatgtcctgccaggtgggctgagagttgtccctggaggctgggccttcctttctccaaatcatctcagaagggctccacgtacctgctacctccattctgacgggagaaagttctagataatgctgatttttctcttgtttcaggagtaactgtgtaactgccgagagcatgaggattctggggctgcaggggatcccaaggcctttagaactagcccctcaccttcaccaatacccacattctccaacgtaaggttgcactttgcacccccagggagccctgtacttggctgttatcgtcactggcaccttggttgaggatcagttatcagtcattccccagagaaggttgagggaggatggagcggaggaaggggaggtaacacaaggtcctgaaatggtacactcgaccactcctaatccccaatggtccagccctccagggtcaataaagaaagacacgctgcgtttccaggtggatctccttcccctagagtgcgtttttgtgcctgcttctctggtggccacgcctccctcctccccactctcacagaagcctggcttatatcacagcattctgatgcattaatactaatgaccactgcttaacaggcacctactgtatgcctgtatgttcgatgctcatgagatgctaagctattaatcatactgtaagtactataatgtgggtaagtacaaggaatatctaataaatgtttattgaggctgggtgcggtggctcacgcctgtaatcctaacactttaggaggccaaggtgggcagatcacttgagatcaggagttcaaaaccagcctgggcaacgtggtgaaaccccgtctctactaaacatacaaaaaattagctgggcgtggtggcaggcacctgtaatcccagctacttgggaggctgaagcaggagaatcgcttgaacccaggaggcagaggttgcagtgagccaagatcgtgccactgtactctagcctgggcaatagagcgaagctcaaaaaaaaaatgtttattgagtggataaggtgtcaaagatagctgtccattctccccttttcctcagtaaacaaggcttgatttttattttttattttatttatttttgtagagacagggtctctctatgttgcccagggtggtctcgaactcctggcctcaagcaatccttgtacctcggcctcctaaagtgctggaattacaagcatgagccactgtacctggccaaggcctggtttttagctgc

SEQ ID NO: 585853 - DNA, 4001 bp, Homo sapiens
tggcgggaggaatgcaaaggccctgccaggcaggcgggctgcgggcgggaggccggcgtggagcccaagccggccttatatgggcacggaggccgcccgcttatctaggggggcggtcttctatcaggaaagtgaggatggacacctgtcccctaggacgagggtcgttaatccggctccactccacatcggtgggcacctatccacctgtcctgggccagaaagggagagggaccccactcccttccctcctctcacataggcaacccaaacacaccttggtctccccactgctgtcagactccgacacctggtaggtgagatctgtctcttcaaagccagtggcactcattctctggtctgttgtggggtctgaacggggtggagagtctggcgagttgaggcaggtctgaatcagtgccttgccggtctcactggtgatcatgggctgcagttttcgggtggcaaaggtatacacatggcctgtctcactggccaccagcaacagcacctgtgtccctgtcagcgtggacagctcataggcctgaggggtgaggagggagatgggcaggtcagcaaactttttatctctaccttccttgagaagttggaaaaagaattatacagtgatgtcattcccccattcccataatgaccttcgtctctaatgactctgagggcagggtgtcctatcaggatctctggaagcagcaaaactacccatgctcctcctttgaggagcagccccattgacctgaagataccccaagcaaacagtaacagcccccagtgatggaacatataacttcaggggatacgaaggacccagctagctgctccccaacacagcttagtgcctggaatgtcccagagcctcaccccttctcactgtcacagggaccaggatggatccctacctatcacactggaatttgtacaagacattagtgataatggaccatttaagctccaactgtcccatgtttctttccagaaactgcacaggctccaacttgttgccacagcctagtttctccttttgccctgtaatactttactgcccttactcctttgtcttgggaagaaggttatggaaggagagaagagagttttccttaattacctccccccacaatcttctccactgatgatcaagtgacaagggacactgatacaacagtgtctggagtgatgggagacgagacctagattagcactaaacatcctgccatgagcccaggaaggggaccttcaaggatggccccatagatgccatactctcccaacaaagttctgcaaaccaccttggaagcagctctggtttctacatgggacagaaataaacaccagccagtgttcccaaggatccagctccttgtctcccagttcctctgctttcatctcttcccttatcgtctacaccccaaaatgactcctttcctcaacacttttcactggctggcagaagaggaattcctaggtacctctgcaagcctccctgacttcccccaaaccccatccaagcatagattctccctagggctggaaaccccacttgtcctaacggcaggagattctgcagcgggtcctgccaggagcatgtggttcccagtggatgccatggaagactcacggccggcgcaggactaggttcctgctgctcagggcagcaccagttctcctgccccgctcccttacctggtccctaaccctgcctgtccttccaaccagcactactctcgtggtgcccacttcctcccacacatgttcgctcattgttgtcatgcagctccagcctcctcacctccataccttctcgtttgctccctgcttttccggcgccctcgtccgaacaccggagtgcactggacctactgatcccgggttctcattatccacctccccggcagcctcgtagcctcccatcaccgctcctcaccccttcactcagcaagggccctcttcctctctggcgccggtcactcccacctctgcgcctttccccacggttgcgagcgttcgcgggatctcccctctccccacatttccccggcggcccctccccttcggccctccccgggcaggagccatcccctcccacacacctcctgcggactcgcagcctctcacctccgcctcggctctgcggtcctcccgggctccctttgcacatccccaccccaaccgggccccggggccggccagccccccggcttggtaccttcttcatgatgcccgtcttcctcttgctgaaggtcgtgtagcgccgcagcttgttgtcgatgaactccatcttgatcttcacgcggccccgggtcttcttacccggcttggccccgctcaccgcgccgctcaccggcccgtagcccccggtggccgctgccgacgcctcgggcccaccgaccaccataccgatctccatctcgctcaggctccgcttcaggccgcgccgctcggcgcccagctcctcctcctcgcccgactccgagtcgccctcgctgccgctgtagagggcccccgcggtgggcgccggggtggttgccgccgctgccgcagcctcccgctccaggcggccgggcccgagccccgcgccattcccggggacccggcccccgttagccccgcgtgtcccgccgccgccgcccggccgccccgtcggggtccggttcaggctgccccccagggccgagccccggcccagagccgccgcggccccagcttgggtcggtaacatggcgctcgatgcaggagggcggacgggcagtcagcgaggaatcggagccgccgcagccgccgccatcggcttcccggctcaacccggcactcccgctgctgctagtgccgctatcgctgccgcggccgccgctgcgaacccggggcccctgcacgcccgggccgacctgggccctcactttcctgcccctgtggcccgggttgccccaggccgcgcgcagcgccccctgtccgtctgctagggcggcgcgccgggcggccgtcagcgtcccccggggggcaggggctgctggccgcggccgagacggcgggtggagggggccgggaccacgcgctggcggcggagggatcccccgacccttccccccatataaagagatacaatgtttccttttatggcgaggccgctccttatatggtgagccccagcgcccccgccccattggtccgtggttccggcacctccgctccccattggcccacaagagggcgcttatttgcatagacataccgaactcgttgctgtcatctcgcgtcagaccgcgactctgagaggggtggagccgacgcctcttaaaggaaccggagagcaggcacgattccgcctccctgaacccgagaatgatagaacggtttgggaggcacccgcggagaaggaggctgggactggagcgcagtcttgcggaagagagggagcagcactagtaaatgggcaccgggaccgctggaggcaaacactggggaaacccctgggtggattgtggggtttgcagtaaataaaaaaatacagcccaaattccaagggaggagtgcagggattgattggagcatttcctcacgccttcctaagggaggcacagttattggctgagcggagagagcttgggtccccgcccggtgtccagactcgtcgcgccccagcctctcagctctaacttttcccctacccccaacttcccttccctttccctcgcttttgtaggcgacgaaactttcccaccgggctggctcgaggatcttcattcatcatcctctgcactggggggtctttggcagacatacatctggaaaaggctggtggaggggagggcgagagagagagatcggcctcccagtcctgaggcgggcagggaggagagacggagatcagggaggagagatggagatcagtgaagacttccagctgcaggctggacttggggaggaggacgtcccgaggataaagcccaccctacagccagtgcaaagacttgggaaagtgtggcccg

SEQ ID NO: 585854 - DNA, 4001 bp, Homo sapiens
aggagagaagagagttttccttaattacctccccccacaatcttctccactgatgatcaagtgacaagggacactgatacaacagtgtctggagtgatgggagacgagacctagattagcactaaacatcctgccatgagcccaggaaggggaccttcaaggatggccccatagatgccatactctcccaacaaagttctgcaaaccaccttggaagcagctctggtttctacatgggacagaaataaacaccagccagtgttcccaaggatccagctccttgtctcccagttcctctgctttcatctcttcccttatcgtctacaccccaaaatgactcctttcctcaacacttttcactggctggcagaagaggaattcctaggtacctctgcaagcctccctgacttcccccaaaccccatccaagcatagattctccctagggctggaaaccccacttgtcctaacggcaggagattctgcagcgggtcctgccaggagcatgtggttcccagtggatgccatggaagactcacggccggcgcaggactaggttcctgctgctcagggcagcaccagttctcctgccccgctcccttacctggtccctaaccctgcctgtccttccaaccagcactactctcgtggtgcccacttcctcccacacatgttcgctcattgttgtcatgcagctccagcctcctcacctccataccttctcgtttgctccctgcttttccggcgccctcgtccgaacaccggagtgcactggacctactgatcccgggttctcattatccacctccccggcagcctcgtagcctcccatcaccgctcctcaccccttcactcagcaagggccctcttcctctctggcgccggtcactcccacctctgcgcctttccccacggttgcgagcgttcgcgggatctcccctctccccacatttccccggcggcccctccccttcggccctccccgggcaggagccatcccctcccacacacctcctgcggactcgcagcctctcacctccgcctcggctctgcggtcctcccgggctccctttgcacatccccaccccaaccgggccccggggccggccagccccccggcttggtaccttcttcatgatgcccgtcttcctcttgctgaaggtcgtgtagcgccgcagcttgttgtcgatgaactccatcttgatcttcacgcggccccgggtcttcttacccggcttggccccgctcaccgcgccgctcaccggcccgtagcccccggtggccgctgccgacgcctcgggcccaccgaccaccataccgatctccatctcgctcaggctccgcttcaggccgcgccgctcggcgcccagctcctcctcctcgcccgactccgagtcgccctcgctgccgctgtagagggcccccgcggtgggcgccggggtggttgccgccgctgccgcagcctcccgctccaggcggccgggcccgagccccgcgccattcccggggacccggcccccgttagccccgcgtgtcccgccgccgccgcccggccgccccgtcggggtccggttcaggctgccccccagggccgagccccggcccagagccgccgcggccccagcttgggtcggtaacatggcgctcgatgcaggagggcggacgggcagtcagcgaggaatcggagccgccgcagccgccgccatcggcttcccggctcaacccggcactcccgctgctgctagtgccgctatcgctgccgcggccgccgctgcgaacccggggcccctgcacgcccgggccgacctgggccctcactttcctgcccctgtggcccgggttgccccaggccgcgcgcagcgccccctgtccgtctgctagggcggcgcgccgggcggccgtcagcgtcccccggggggcaggggctgctggccgcggccgagacggcgggtggagggggccgggaccacgcgctggcggcggagggatcccccgacccttccccccatataaagagatacaatgtttccttttatggcgaggccgctccttatatggtgagccccagcgcccccgccccattggtccgtggttccggcacctccgctccccattggcccacaagagggcgcttatttgcatagacataccgaactcgttgctgtcatctcgcgtcagaccgcgactctgagaggggtggagccgacgcctcttaaaggaaccggagagcaggcacgattccgcctccctgaacccgagaatgatagaacggtttgggaggcacccgcggagaaggaggctgggactggagcgcagtcttgcggaagagagggagcagcactagtaaatgggcaccgggaccgctggaggcaaacactggggaaacccctgggtggattgtggggtttgcagtaaataaaaaaatacagcccaaattccaagggaggagtgcagggattgattggagcatttcctcacgccttcctaagggaggcacagttattggctgagcggagagagcttgggtccccgcccggtgtccagactcgtcgcgccccagcctctcagctctaacttttcccctacccccaacttcccttccctttccctcgcttttgtaggcgacgaaactttcccaccgggctggctcgaggatcttcattcatcatcctctgcactggggggtctttggcagacatacatctggaaaaggctggtggaggggagggcgagagagagagatcggcctcccagtcctgaggcgggcagggaggagagacggagatcagggaggagagatggagatcagtgaagacttccagctgcaggctggacttggggaggaggacgtcccgaggataaagcccaccctacagccagtgcaaagacttgggaaagtgtggcccgacagaaagtttaagcccaagcaagcacgctcgcgcacacacacgcacatacacacacttctctggaaagcccgttggagaaaaaaaaaaaagtttcacacagggtatcgctctgtcgcccaacctggagtgcagtggcgggatctgagctcattgcaacctctgcctcccgggttcaagcgattctcccacctccgcctctcacgtagctggaactacaggtgcgcgccaccactctggcctaatttttgtattttttgtagagatggggttttgccatgttgcccagactggtttcgaactcctggcctcaagcgatccttccccctcggcttcccaaagtgctgggattataggcatgaaccaccgtgcccagcagaaaaaaaaaaaaaaaaaaaaaaaaacttaaaagattagaactggggtgctgcaaagtgaggttcaagctctgggtctgggtcttttctccaaagcagtgaaaatagcttggactttgctgttacagaattatttaaatctggaatctgcctcttggtaagccctgtgcctggaaacaagtgacaagtgatctgatctctccagacgcaatattcatcaatgctgctatccattccctgagttttttttttttttttttttgagacagagtctcgctctgtcgcccaggctggagtgcactggcacgatctcgactcactgcaacctctgcctccccagttcaagcgattctcctgctgcctcagcttcccaaatagctgggattacaggtgcccaccaccacacctggctagttattttgtgtttttagtagagatggggtttcgccatgttgtccaggctggtctcgaactgctgacctcaagtgatcctcccacctcggtctcccaaggtgctgggattacaggcatgagccaccatgccgggcctattccatgaaattcttaatgcagatttaatgacataaagactaaagggcagagtaattggtcagtggttaggcaataggagttacctggagtaagtcacctcatcctagggataaagcatcttggcatgtttaaggggatgggaggcagtgattattcctgcccgaaaa

SEQ ID NO: 585855 - DNA, 4001 bp, Homo sapiens
gtaaacagacacacacaaactctcatttacaagacttcgtcaccaagcacttacaaaatacatttcataagacagaagagaaaatggagcaagaggtgaggtcacctaccactttagttctattgaaagagagaagtcattatgtgctctccccaaacagtaggtagcctccaaaaacaacacacacccctacacccccctaatctggtattgtcattcagtggggtgacctaggaaggcctttgaaatgtgttgtatcagctcagagggaattagaccgcatacgatgccacaaaacatcaaataaatgtaaaactataaagataatacatctaaaattaagatgtattaataactaggcatacaagctctctctgaatacaaagtgtgtaagagctgatttccaagatcctttgcaattaaacgttagtacatgatgaaagttcttaaggcttagcctcacttgctgctaagcctgctacctgagtttctactaggctgtgaccaacttttgaacttgccacgatagcactaaactactgttatgcatcctactgataaaactggacatgtggcgcttaatacgccaaaccagaatcatcaatgtttgttaaagaactctcccgttactattgtgatgtccactccggaagattatctgcatctggttgaggtttagacagaagagaagcagttaacagacaccgactgtatacacagcggtctgccggcacactgcaaaaaagccgatacgccttacaggctcaggaagttgactaacccagggaaaagccccatgccctcctctatgaaagggagtgtgtggttggtagaacccaaagtaaacacggaaaaattcattcaagaatttccttaaggcctaccgtgaagacgtcggaggcaagttaagacgttggggagcaggtaagagagaccagagttcagaaacagaccgataatgatctaccagctccggtggggaggtccaagctaggggagtttgtgcctcctctgtggagttggggaggaaaggtaccgggcgggctctggtcctcctccgacagccctttccagcaggcccggggctgctaagacccaggcctggcgttgagcaacagcagctctcttccacatggttgctggagagcgaccctccgagctgccccgaggccatgtggctgcagccacagggtgcccaaacccggtgcacgttcaagacgtgaaaccagagcagagaaggtgccggaggaaaatccaaagaatgggatgttggggtacaagactcacttcctttgggctttgtccttcttggccttggtccttttctttcgggcctggagcgcaagcactgcaggagagagggatggatgaagggcgaatgtggaggaaaggaggcgaccaaggtgagggtggagacccagcaggggcgccaggcccggctgcggggcctgcctcgggggcggctgcgggctccggcgaggcggccggccgtggggctggcggcccacggggcgcagagcagcgcccgggcgggatgcgccggaggggtctcaggccgggtcagggggcgggcgggtgggggtctgcgtcgcccgccaagggccgggccctggagtggccccaaggcgcgagccggcctggcggggaacaaggggcggctacggccggcgccagaggacgcccggactgaggggcgcggacccgcagcccagaggcagggggtgtggggcggcgccacctcagtggaggggcgccgcacgtccgggaaccgaaccgcggcagttaagcgaagctcccggcgctgacccgggcctcgccccggcgaccattgcccctcgtggcggaggccgctccaccgctcacctttccgctccatggtgagaccggtaatcgccaggcgcctgcgcactcgagtggcggcgactcccgctcccgccgcggcccaaaaccgagcccgctcacactccgccctcagtcccgccccacccccgccccacgatgccgcgcgcttgcgcgttgggcgcggagcctaccacctgctcccgaggagggggcggcaaggagagggagggggcgcagcggggaggaacgccggggtgaacgttgaaggagtgttagagatccaagcttggaaacctggcaaggttagttttgttctatttgtttagaaaaggcgcagagagcggcagggctctctgcatgctgctgagtcagagcttcggaggcaactgggatctgcctcagtttcctggcctgtaaaatggattaatcaggcatgtcccagtttctccttccctgagctattgtgagcccagttgagatactatttaaagaaaatggaaaaaaattacatgtgagaaagaaaagggagtgggagcaacacaaaaagactggaaggaaagaacctgtgaccctattatcacttgaaaagtaaaaacttcaaaagtgaattttctcttgaaatttcaagtttaagtgaaagctgtaaaggaaagaaggggaaatgagaataaaaacgtttaatgttttcttattctaccaccttcaatacatgataaagctgtcttgtttataagttttttttgtttttattttctaagtgcattatctcatttgatgtttatggcaacttaaaggcaaaatagttattacttccattacacaaagacactaaacttaagagggcctgcctatatgttcagaatcttggtgtacgacccagttatttaatcatgaagcccttattgtatagcaggctcagcaaagtttttctttgggccgtacagtaaatatttaggctttgtggaccataagatctctttctcagctactcaactctgccattggagctcaaaagcagtcatagaaaatatgggctgtgttcctataaagatttatgtatggacactgaaatttgaatttcatataattttcacgtcataaaatgttcttctattgatttaaacatggtctttgttaggttttgaagggaaggtgagggttaaagaaagacagagagagcagtcttgctctgctgcctaggccggagtacagtggcatgatctcggctcactgcagcctggacatccagggctcaagtgatcctcccacctcagcctcccaaggtgctggaattacaggtgtgagccactgagccaggcccttttgatcttttttcaaccgtttcaacggttattcttatttcagatcttagtttaccaacccatgttgtaaagtaccgcagctggacagagtggaagctctgaagacctttgctctgaacaagtaattgagaagggaagatgagagggcaatagtacagcacaagtcaagcatgggggctttggcagaacttattgagcaaagtaagtaattaagcccatccagagaaggcagtttttgagctgggtattaggaaatatgtaagatttctataggtggagaaggagatgtcaggcattcctgaatgagaaaatacattgagcaaaaaggcacagacgtggacacctgtaggtgggggctaggattggggctggtaacaactgaagggatgaaatggaaggtgaggctggaaaggcaggttagccaaatttgaaatttagataattgatatatgttgcatggaacctgaatgatagcatgtctgagtatattgcaaaagaagacagtacctgttggccaaggaaggatgcagcccagtctattccctgctgtaaagttgaaaacaaaaggaaggttaggacagacagggaagccctagactctgagggttgtgtgagttcaggataaccgcgtgtggtttagaaaagacagggagagagctgatagctaggaaaaatcccagaattgggaaagtactgcccaccccaaagtaaactgtttgagtgtagagaccctgcttaggttttccttgatgtaaactcagtgcctacacagtgttaggcacttagtaggtgctcatatatttgtctaataaaagaataaatgggccaggcacagtg

SEQ ID NO: 585856 - DNA, 4001 bp, Homo sapiens
ctagaggcagatgctgcaccttttagatggcatatttccttttctatttgctattctatttctatttgatagtccacaccatcctactgtgccttataggctggcagcttcactcgtttatattaccccggctggcccctgtgaaccattagaattggaaacctctgatttttctacagacaccctgaagaggcttgatgcttattccattttcaagttgtctgttcaactgcaaggttttttaattctgcccaaatcataaattatgttcgtgttttctatgtaatatattgataaaaaggctgacagaagaaatgtaaacaaggcaccttttagatgttaactaagatatattaaccacaacatatagttgtgatacatgtacttgcggtgatcaaataaaaaatacttggccgggcacggtggctcatgcctgtaatctcagcgctttgggaggccgagctgggcggatcacttgaggtcaggagttggagatcagcctggccaacataatgaaacctcatctctactaaaaatataaaaattagccgggtgtggtggcacacgcctgtaatcccatctactttggatgctgaggcaggagaatcgcttgaacccgggaggcagaggttgcagccaaccaagatcgggccattgtactccagcctgggggacaagagcgagactttgtctaaaaaaaaaaaaaaaactaaaaaataaaaaatacttaacgtttatttactcctcaaaggtaaattataatactcatctcagatgactatggagtcaagagctccatgtatctatacctctctggccccaggtaaatcattaaaactcttagtttccgctctcccttatgtacaataaaacagtactgcataggtagaaaggctggggggaagtaaatgaagcccagtgaaatgagaatgtctattaacaccgttccctctccccccgcccccaatttcttcagctccattaaggaaggaagtgctatatgaaaaagtcattccttagtatctgtgttcagacactctgtagacaaaattctcaacggaggggtggggcatcagaatcaaccaggtgagcctatactcacgcccttaaaaagggtgttaatactggactcagaactttaaagaaaaacgcactgatctcattcattgaagttattttttgtatgcagaataaaattgtgtgaataaaatgcaagcagcaccgtctgtaagtagaccagaactgggggaaagaaactgtaaggcccgagtacgcattatggtacaaaacgttctcaccagccccaattcctctccatctaggagggttggatgcgcgcgattttatcggggcacggcgacaaaggagctgaaacgcgggcactcgctggagcgcaaaccctcccgactcccggcggggagcgacctgagctcgggagaggggcgccccgtgtcccacggcccgccggctgcggtgctgaaccgcggaaagcgacgcgggcccgggacacgatgtgcgcggcgccggggctgaaagctggccgggagggcggaggcgcgagttccgccctgggccgcggagtagtccgagggctcacacctccccaagtggcgcagcctgggcccgcggggaggctccgcgcagctcccccgagcctccgccgggcctcggccgtgctccgcggcgcggctgttaccccgcccctcctccgcgcccccaacctgcagccgcggccgttcacctggtggcgtccgcgacgttcctgatgaacagggaggtgttggggggcctcgtgtagcgagacatgaccgcttcctccgttccctccgggtctgcccgcggccgctggactcgctccgtctcccgctaccgctgctaccaccacaggagctccgccggcccccggcgcgacccccacccctcggcctcagccccgccagcgcgcagccgcagaggccggcgcagagggggcgcagcgcggcgccagcctggacgcacgggccgggggcgggggcggcgccggcgcggcccaggggccgcgggaattccgaagacaggagcgcggccgttcccaggccctatgggatccgggtatggggggtcctggagtgcgacgggatttggggagggggcggcgagggccagtgtatgtcaggagggcggaggccaagagggggcttgaggccgcggcggggacgccgggggttagaggacccagaggtggtggcggggctgcggctgggcggaggtggggtcagtgagagccgctttcaaccgcgcccccgctcagcctccgcggccctcagcgcatcgtcctgagcgcaggaccttggcagttggtaggcctcctgcccctctggtcttgagccttcggctttccaactgtgaggtctcggttttgttcggatttgtttttttaatagagacggggtctcgctgtgttgcccaggtggtctcaaactcctgggctcaagcctctcccgcctcggccttccaaagtgctgggattacaggtgtgagccaccgcgcctggcctgttggatttttaagtattatatgattcttcatcctttattcacttggggcataacactcagctgtgagtacattcattcagatgtttattgagcgtctactatgcgccaggcacttagcgtgggatatagcaatgaacaaacaggccaagccccgccctctgagcttacattctagaggggggacaaacgaatgtacaaatgaatacatgatgtagaagacaacagtttaaatgcagggacagttaagcaaaatttaaattaccctctccctattcccccaaaatgttgtagcccatccccttctagttagactcgtcttcgccttgctcctgtggccggcaggcacagcctgttattcagggctgggagtgtaaccaggcaactcctaagtgtgaagagtgccccttttcgctcgcagaagtggtaggctttgaagaatacatgtcgtggtcacccttctagctcacagccctcccagaggctgtggaggttcctgggtctgcagctgtactggaacggtggctattctttcattcagaagggattgctctggcactgcaggcacagggctagactggcaccgtgcctattcccctagagcttagaatttggtagggaggcagaatctaacaatcacactggtaaagatacaaactataatacagggctatgaaaagaactatatgctgctgagagcaggcattgtgggatggtgagcaaggctagagggtcacttatgttccctgaacaagtcttgaagagatgggtaaagaatggagaagagtaattagtgcagtggaacagcacgtgcaaaggctttgaggcaatatagtaaatgaggcaaaacaggagcatgaggctggagaagagttggaaaatgaggctggagagcaggctggattcataatacaaaagcttagaatgcttaccatgtgttagttggctagggctgccatgacaaagcaccacagatttggtggcccgaaacaacagaaatttattctcttgtagttcagaggccagaagtctgaaatccaggtgtccgcagggccatcatctatctgaaggcactctaggggaatcctctgtttcttccagtctttggtggccccacacatgttttggctgtggatacatagatccagtctccacttctgtcttcacatggcctcctgtctttctctctctctttctctgtctctctctctttttattttagatggagtctatgttgcctaggctgatttcaaactcttaggctcaagtgatcctcctgccttggcctcccaaagttgagattacaggtgtgagccactgtattagtccgttttcacactgctgataaagacatacccaagactggggaggcctcacaatcatggtgtagggcaaaaggcacatcttacatggtggcagacagagaatgagagccaagcgaaaggggtttccccttataaaaccatc

SEQ ID NO: 585857 - DNA, 4001 bp, Homo sapiens
gcaagcgattcaaagtacctacataagccaaaacttaccagctttaataaaaataaggccaacgattttcacttttaaaaaaatgcccatggaccgggcgcggcggctcacacctgcaatcccagaacttttgggaagccgaggcgggcgaatcacgaggtcaggagttcgacccagcctggccaatatggtgaaaccccgtcacaactaaaaatacaaaaattagccgggcatggtggcgcacacctgtagtcccagctactcgggaggctgaggcagaacaatcgcttgaacccgcgaggcggaggtggcagtgagccgagatcgcgccactgcactccagcctcggcgacagagcgagattccatcgccaaaaaaaaaccacaaataaataaataaataaatgcctattttggtcatttggaactataggaacaaggctagtatcaaatgtcattagatagaccagagtcttacgcggtaaaaatttatcaagcaacgagaccaactttacagttttttaaaaaatgtaaactcatagtagcacttattcacagtagcccaaagatgttaacccaaatgtccatcaacagaaacggataagcaaaatgtggtatagacataaaatgagtattattcagaatgatgtactgacaaatcctccaacgttggaaaatcttgaaaacattacgctaagttaaagaagccagacataaaagtacacgattccataaatactaaatatctaaaatagctaagttcagagagacaggaagattagtggttgctagggactagaggaagggggacagggaatctgggagtaagtgctcaatgggtagtagtctcctgcggggggaggtgacggaaatgttttggaactacgtgtaagtgatgattacacaacactgaatatactaaataccacttaaagataatttcactttaataaaaaattacaaagagatatttgctactaaaaaatttactgcactttggggacttatttttttgttcttccttggcggacttgtatttgataaagctttattactgagtcacttcgacgatgaatctgataaacttgtagaccagtttcaattacataaaaaccatctactcaataattcagctgaagtgctttccataaacaccacgttcttcttactctgggcttgtctaattaaaatatccagtccagacacatcctatttgccgtgaccacaccctgtgcccaggagtaagttctaagaccaaaccactggtgaaaatttttaaaaacactgctggcacctgtcttaagcctccattttaatgggaagcgatgaaagaacgaatcttaagttcaaggaagatctttcggtcttagaaaaaggtgattagattcaggctgcaaaatctgaaactacatgaaagtaaggtgactacgggggccatttaatatgaactgaaaggtccggtcttggttagtgactttacaaaaacattctgagaagcttcccaattaaatgaggggccaaaaaaaaaaaaggcgccataaaaataaaaaggccgtgacctggaatacaactcggctatcggctcccctttgtggttcccaactcccaggtaacccccatcctggctcatgccccaatgaggaatataaagacttccactccaagactaggaaaccctccgatgggccgggagcccccgccaccgccccgtgctgaacgtcacaaaatggcggcggcgcctctttgtctcaatctggcgccgccattgggcctggctccttggtactgttaaattccatttccacctcattccctctttcgctggtctcttaccgagatctagggttaaaaaatgcggcggctcaaatccacacgctccgatgagtcttcccgctttcctccggcccaacaccaaccaactctctcactcacccggcgtccacgaaatggcggaccaccgccttctcctcgcctttatttatacgccatactggaatcacatgattggacgggctcccccaatgagaagcagaagaggccgtgacgtatggctacaaacgcagcgagagccgcggttgctgggagcgcgctctggcggttgcgccgggtgggtggagacgtgcgtcggcgcgcgctcgttgtaacaggcctggtgctccctcgagcgttcctcccggtctgtcgacctccaggttacccacagactcctcttcctcacctccaaataggctagggcttcataaacagcaccgtcgccgtcacgctcaaacactaataggagccgttggcccctaacaagattaagagatgaattaattaagtgcttcacccttgtgagcggttagtctggaactaagagcatcgcgtttacaaacaggtcacggagctgtttgtgacccagctggcaccagactgtggccgcctagattccacactgaaggaaaagcctggtttggaaagtttgcccaactcttgctggtttctcgtctctcaagcaaacttgcaggacttggcgccgacagcaaaggagaccggtcaggtgacctggaaactatcacctttagcaaacacccggaaagggaagtttctgaagaagattgaatgtaaattctggcccccaagcaaatgccaggaggggtatctcgagcctttctcctagcagccgttgcactgcctggcatgtattttgtccgggccacttcccttacgaagacagagccgcaagagtaattaaggggagagagactgtgattgggttagaaaaatcaccaagggccgggcgcggtggctcatgcctgtaatcccagcactttgggaggccgaggcaggcggatcacttgaggtcaggagttcaagaccagcctggccaacatggtgaaatcccgtctctattaaaaatacaaatggccgggcatggtggcaggcgcctgtaatcccagctacttgggaggctgagagcaggagaatcgcttgaacccaggaggcggaggttgccgtgagctgagatcctaccactgcacaaaaaaaaaaagagagaaaaagaacctgtctttttatttattccctcttagctgaaagatatgccaattattatgtttttttttttcttttttctttttttttttttcttgagatggagtctcgttctgttgcccaggctggagtgcaatggcgcgacctcggctcactgcaaactccgcctcccgggttcaagcgattcgcctacctcagcttcccgagtagctgggattacaggcacctgccaccacacccggctaatttttgtatttttaatagagacggggtttcaccatgctggtcaggctggtctcgaactcgccacctcaggcgattctcccgcctcggcctcccaaagtgctggtattacaggcgtgagccacagcacccggccagccaattaatatgttttaactttcccaggtatttttcttttgaagccttacctcttattgtggttctaaaaggtttatctgtagtggaggaaaaaaatacagatttattacatctcagcctagtttcctcacctgtaaaaggggagaaggggatcctagcaaaccttttcttatttctctctcgtctagatttttttttctggctcacttatatttgccttgatttgttcccctcctctatgtaagcttttctcctctttttcattttctttccttctatcaaatcaaaggctctggagtcaggcagtcctggatttggccccagcccccactgctagttactggctgaagcatcctgagaagaacgtttaacctctctatttcctctgtataaaataaccccaggcttgcagcgttacagatgttaggttttgtcactttggccaattgtggtcacacctgcatccccagggcttggaaacgatacagcagtcaagcaatacatatttgtttatttttagttagttatttatttttgagactctgggtctggctctgtcacccaggctggagtacagtggttcgatct

SEQ ID NO: 585858 - DNA, 4001 bp, Homo sapiens
agtgtcttccaacatctctcagaaaaaatgatgatgtggcaattctgtggataaaaaacatgggaagggaagcgtgttttcacccaggagaaacagttaaggaccatgcatttgcagtcttttccatgtctttaagttctcactggctgctaagatttattgcaaaatattaaagaacactgaaccatgcattatgaactaaagagatttcactgcctgctgaacaaagcctaaaatagtgcattcataacttacaagtccttttcaaaaaccagtaagaaaaataccatgtctgatatagtaatttaaagtcgtggttaaatttgagcactttggaatataaaggcctttcataaatattaaacaattttattattttaatgttaaccaataacaattttgtccccatgaagtctaacagtcttcattcaactggaaaaaccaaacacaaaaaccgtttctcacaaaaaatgtttacaagatattaattcagtttagataatgaattcatgcttcttgaaagtttttataacttgaaaatagttataaatagttctaaaactaaaactacatttgtcaagttttcttttaaaaagcttaaagagtaccagcaaacgactcctaaagtaaaaaatcttgttaaacctgcagattaactcattaacagttgtttaattctcccacttggttttctagccattaaacagaagccagtcacttcacttttcatcgcaaaacaactcgtgaatacctgtcactaccgttaagacacacagcttgcttaaacttacagaatgaaagggatgcttagtcagactaattatttcactttacaaattagaaagtcgaagttcacgacaaaacctgtgcaggaagtcaagttgccatatttttatattctgctaagttattttcacacttaattgctgggttaattgttgaaagaataaatctatgtattaaaaacactcgaagtaggccacattttttcagcacaatacgatgtttccacaaacaaaaaattgttccatggaaagacaagaagaggaagaaggcagaagggagacatcccacagggattcttcagtctgcttggcagcaggggcggataacgggggtgacgatggggtagtttttctgaaatcaagcctcctagtaacacatacgggtcaagcagggcgtgaacaaggcagatgaccattgaacaagacactctgatggcttagatgtgtagaaaacaagggttttggcaaatgaatgaagacggactcccggcgtggaagctaaagacacgtcagccctgagcgcgaggggctgggggtggagcggagccggaggtggccaaaagaaacagcccggctgcggcgcgctcggagcgcagccgtgtccagcgcctcctcctgcagccgaggaccctccagttctggccgctcctgcaggcgagggtccagggcaagaggagcaagcccagccctcggccggccacgaagcaaggtcgcccgggcacggccccgcgctccgcgtgcaaggggcaggccgcagcggggtctccagcgcccgcggggacccctgctgctacgagcctaggcttggggagagggcggagagaggccagcggggtggacgcggaccccaggacccggagcggccaccgcctccaacttcaaacttgccatcactggcatctccttcctggccatcccctccgcacactcccccagcctcacctctggggccgcctcggaacaagacagtggcagggaacacgagtaagagaagcagcagcaagcgggggaggagtctcatggcgctgccggtccagtgtccagtttccgtcggctaaggctctcggcggctccggcggtaatggcgttactcttcatccgggctccgggcagcgaggggcgggacacgtaccgcgcacgggcctttgccacgcccctccctggaccagggaccgccgccgacgtggctgctcagcgcggagaggtggggagagcaggccaccgggaagtcacgtggccggctgctgcctctttgtggctcccgcgagagtccgccttccgccgcagttgcgacccggcagcttgcggttagccgttctttccgcccagttctttacttccaattaattagcattgtcagtggttactttatttgaatgacgatcctcttgataacggcgatgtaaggaacatgagctgcctttatgtggcacttaaaagcaaaaaattttgttggaagagaggacattgttcaaaggaaaaaccatgaaaatacacagtggaaaatctttgtcccctgtctgcccacaccctctcccatggttaagtaatgacaattcttaaattattatttttgagacgaagtcttgctctgtcgcccaggccagagttcagtggcaccatctctgttcaccgcaacctccgcctcccgggttcaagcgattctcccgcctcagcctcctaagcagctgggactacaggcgcgcaccactacgcccggctaatttttgtatttttactggagacgggggtttcaccatgttggccagactaatctcaaactcctgacctcaggtgatccacccgcctgggtctctcaaagtgctgggattacaggtgtgagccactgcgcctggccagcaattcttaaattcgtatgtgacattccagaattataagtcacctaaacagtgttttggtatgtagtcagcatttgtaactatacaataggtgcagcaatggctgtccagttttctttagtttccttttcatctattttggatttgagttgctggagtaatatagcagttcatgaaattaatctgaatattaagtaatcttggtctggaccagagtgagatgtcataaagatgaggaaataaatcatatgcttactattgtcaatcacctccttagagctgtgctttttcatttaattttctaaacctctctatgagctggatattatttactgaggagaaaacagacccagagaggttagtaatttactcaaagcttcaaaacgctagcaaacggcagatgcaagatttgaacaaggctatctggttccagattccatacactactgacctaggacatttgctgttctactcctgcattgtttccgcttcaggtctccttgtcctgggggctgtaaatgcagcttggacccactgccaccactacctacagtctgctaaagtcacagcctgatggtgctgggctgaatcaaccaaattccactctgccaggccaccagtggcaccgctgctgtgttgctgctgctactagggcgcccagcataagtggagggcctcctctcactttgctgctgcctctgctcctgtgcacgctaccagtgttgccactctatgtcagagctgtgtctggaatagggttcttggtctcactgactttaagactgaaaccgcagaccctcgtgctgagtgttacagttcttaaagtccagagtttgttccttcatcatgttcggatgtgttccgagtttcttccttctggtgggttcatggtctcactggctcaggagtgaagctactagaccatcgcagtgagtgttacagctgttaaggtgtccattcctcctggtgggttcatagtctcggtggctttaggagtgaagctgcagaccttcgcggtgagtgttacagctcataaaggcagtgagcagcagcaagatttattgcaaaaaacaaagcttctgagaggtgacagcatgctggcagtactcagccctcgctcgctctcggcgcctcctctgcctgggcccccactttggtggcacttgaggagctcttcagcccaccgctgcactgtgggagcccctttctgggctggccaaggccggagccagctccctcagcttgccgggaaggtgtggagagaggcgtgggcgggcgggaactggggttacgcgcggtgcttgccagccagtgcgagttccgggtgggcgtgggcttggcgggccctgcagtggga

SEQ ID NO: 585859 - DNA, 4001 bp, Homo sapiens
gtagagtcccaaatcccgccccaagagagcgtaattcattaaccttggatgagtcccaggaacctgtattttttttaacaagcagcccacgtaattttgacacaggcataataactcagctcatatattcagtaacactgccttaaatgatggtgtttcccagcattgtggatttgaccctattaacttccactctaaacctggagtccttaaccacggacctcgcaggattagtaaaatatttcccccctaactatacatacaccctatgtatatgtggcaaacgtgcatttttctggagagagatagccatagcttttatcaccttctaaagattacaaaaaggttagaaatcactcctctacccactcttcctactggatctcaccacatcacagaattaaccacttgctattcacacctccatgacttgtaattctattatcactggcccagaattctctccaactctcatatccaactgtctaatacctttgtctttggatgctccacatgcaccatcaactcaacttgtataaaattaaacacattatctgtagtccaacaactaaatgtgctcctaataccaccagccacgcagtcatctggaaagtctgagttgtcctggactcctccctcttcctcactctcctctccctccctactgcactgacctaatttaggccttcaccacttctcagatgcagtatcttcttagctgacctccctgcctcatccactatctccaatacaccattccctctctctatgatattctctaccagcccatcgcctcagtgtaagatggaaacaacactgatgtacaaggcctgtcatgatctgacgtctgactgcactcccagcgctgtatgttcgaaccatgccccatgactcggtttccccaaaagcctcgttcttctacctccatgatttgaaatgccctgtactacctgcgggacttttaacagggtctctgtggcaccccagtgcctggcacagtgccctcgcctgaaaggcctaatgcttgctgaacggctggcggagtgactgagtgacagggaattccaggagttaggaaaggggcttccggcggtcgcaccgacgcccctcaccagctgccggtcggccacggtcctgtcaggcacaaggctgtacacctggctcctcagcacgatgggcggcagcgcgtcctcaaacaggcctcgcgggaacagctgcatgagttctgagacagccgcgcgcgccgaccctgggcagataaatcggctcacggacagggaactggggcggggacgcggttctaacaaaactctcggctaccggaagcgaggccccacccccggggttgccatggttacctggctcaccccgaagaggatccgactccacaggccctcgcttccgccgcctcttaactccaaaggtctccgggatcaggtgatgcctcttccagctcatatcccgggattttatggtaccggggaaggggtaggaatggagggaagagaacctgaaaatagggtcttccggcgcagagcagtgacgtacggtctccccgggcgtccctcctagaccaggtgatgacgaaaggagcgtcaacttgtcgtccctcaggcccgtcagtgctgggaggggcggtggcgacgcacataccagcatcacctccgccaggccgggccccacgccggccgcggattggctccctccaagggcacgcacgcccggggactcgttggcggcgtggaggggcgccggtggccacgttggtgtcaacctccttcgtgaagctcacacctcccccgccccgggaggggtttgcccgccactgtcgctgaatgattgcatcatcgaaagcagaaaaccacttttgcatccttcggcctctggcgtgcctgccatgacgtcatagctctgcggaggtggaagttggggagctttgaggtaactggattcttgatctgagcgcagacgtccttcctaacctcactgcatttggaggacctggagggagggtgggtgaagggcaaggaaagaggcaggatgagagcttggccgcggtggcgtctgaggggcctgaatgtttcaaggccagagcctggcgatcaggtggctcgcttagtcctaaaccagtcatccttctccaggcctcctctgtagaatggaaactctgtacccctgcttgtcttaggacctcatggatcccagggggaccaagagaggagctgagaagacagaggtagctgagcctcggaacaaactacctcgtccagcaccttctctgcccacagaccctgccctctactctgggccctttcctttctaccggcgcccttcggaactgggctgcttctccctggatgctcaacgccagtaccatggagatgcccgagccctgcgctactatagcccaccccccactaacggtccaggccccaactttgacctcagagacggatacccggatcgataccagccccgggacgaggaggtccaggaaaggctggaccacctgctgtgctggctcctggaacaccgaggccggttggaggggtgagcaaagcgtggtaggcagtatatctggagacccgtacctaccctctaaaattaggagagccaaagccggggtgagaatcagtccttagaagaaacaagactattcttcgaggggagcatctcactaatgcttgtgtcagaccttcagcctgtaactcctgcctctcaggggtccaggctggctggcagaggccatagtgacgtggcgggggcacctgacaaaactgctgacgacaccgtatgagcggcaggagggctggcagctggcagcctcccggttccagggaacactatacctgagtgaagtggagacaccgaacgctcgggcccagaggcttgctcggccaccgctcctccgggagcttatgtacatgggatacaaatttgagcagtacatgtgtgcaggtgagttgcccctgcttcatagcccccttccccttcccagaggttgagagccccccacgcctgctgctgcttctctccttgtgcagacaaacctggaagctccccagacccctctggggaggttaacaccaacgtggccttctgctctgtgctacgcagccgcctgggaagccaccctctgctcttctcaggggaggtagactgcacagacccccaagccccatccacacagcccccaacctgctatgtggagctcaagacctccaaggagatgcacagccctggccaatggaggagtttctacaggttcaggatcggggtgggcagggcgagagcttaggcttgaaggctgggaaagggacttggggaggagggtgaaggcagaatggagggtgcacgaggggtcccactgatcccttgcttttcctgtcagacacaagctcctgaaatggtgggctcagtcattcctcccaggggtcccgaatgttgttgctggcttccgtaacccagacggttttgtctcttccctcaagacctttcctaccatgaagatgtttgaatatgtcagggtaagggaacgatgttgcagctcccacccgtatccccaaacaccaagaccacaggtctagcatccagggcaacagcctgccttctctcctcccaccacccccactgcccatcttctgcctcctcctctgcctgctccagaatgaccgtgacggctggaatccctctgtgtgcatgaacttctgtgccgccttccttagctttgcccagagcacggttgtccaggatgaccccaggtgaggcattcagctctgtccctcccctctggatcccaggatccagcctctggccctcaactgatgcctccatctgccccccaggctcgttcatctcttctcttgggagcctggcggcccagtcaccgtgtctgtacaccaagatgcaccttacgccttcctgcccatatggtatgtggaagctatgactcaggacctcccatcaccccccaagactccctctcccaaatagtaatgctt

SEQ ID NO: 585860 - DNA, 4001 bp, Homo sapiens
agcagcaggagggcatggggtctggttacctggagactgaggagtgcgaagtctctttctgagctaagggtgaagtccacctttggggagcaggggacattattacgagatgggtttctcaggaacactgatcctttcactacctgtcctcggggcacatcctggagctgcacccccaccgatagggggacccccagatgaaccacagaaggagagaacaagagcaacctggggagaacagacaggatcagcagtcagacttcgctctgacacctccacccctgctctccctcactcctgaatcgggtcccgatgccagccctgccccaatccaagcacccagcatcccgcctccaggacctgggcttctgcagagataaggtgaagaagctggatgcccagatcagcccccagagcagcctcatggctggaggatccaagagaggttagatccgtctgtctgtctgctaccttctggccaagctaggcctcggggcagagttgactctggaccttgctcctcccccagcccagctaagctgggaaaccacgtgacagccaagaagtgcaactggcctcaggcccagagttgtgggggcaccccggacacctgggtgtccatgggaaactctgaatcttggcccagaaataaccctgtccttccccgttaactcctctcattccagtgcctgagcacctccccctaccaggtatatctgtatcagggtataggtgcacacaagctcatgtatacctgggcgtacaagggcccaacatggcccacgagtacaggatatttaaaggccctcacaaaacaatgacaggcttctaagacacttgtctcttactttcattccaacacaaattgaactatactaggcttttgcttttttaggccctaacagaaattccgtggtttaggagattaggtacaccctcaccactccacagggagaatggcctgaacgtcagagtgaacccctgacccctttcctctctgaatgaggcaaagctcagacttcacctctacccctaaacaaggcacccaaacacacgtcacagtaaataaaggacatccagaaaatatcacaggcagaggtactttatttggcaattttaacatgacacgtagagaaaagaaccctgccctccttcaccagcctccccagaaatcccaccttcctatttcaagacagagtaataacagcaccattttacacgaaagggaacagccacagccttggcaccatttctggttccactttccatggaagggcagagaagcattgctcaaaccccaccactgggtcagaaaccaggcaaacagcagcagtcacatctgaccttttgcacacacgagagcccgacactcatcctggctcccaagccttcccaaggtgaccctgtctcagccaccatcatgcagctcttctagtcccctcccggcccactctgaggagctgagcaatgatgagcagaatcttcatgtctctggcaggcggaggagggttcctgaagtggtagagatgctgtgcaggagaaagacaaggctggagccagacgcctaggctcaagctgtgaggagaacttagaacttgggaaggggtgctcccgggttccagagaagaatgagagccactggccttcactaggaaactaagcatgagctgggaggaaatcccactttgggtcattgctccataatctgccagaggccagggaaagactcaccagtccactagctgggccccaatgaggtcgtgcacatggtaggtgaggccaagccgcaccacgacaggcacccgccggcccaggagctctgataggagcagctcccggtactttgccttccggaccatgccaaggacagcctggcgccctagaggagaagtggcacaggaaaggggaaaggtgaataaggcctagaggcctgaggagccaccaaaaggtgaggggctgcaggcttgagctgcagatgggatacctttaacaaagtacttgtgcatttggtctgaagacaaagatgactgcaggagtgggcaggccggagtggggtgacctggcctgtgcccaggaaggaggaggagtctgcagccctgtgggcttcaacatccatcaaggagtccagagcaggagccaggccaggcgggagggaaaggccctgggaggggctctctaatctcccagccccgactctgccccgtcactgccgctgctcctcattactcgctggggctgctgtcgcctccccgaagggtggccttgtccagatagtggcaaacctccctgccgtggatgagtcaggagcattttcttaagaggaacatcactggaaaacaaaatgagcggggacacagaaaccaacagcagtggctgcatttgtggtacaggctcctcttccagagctcgctgatgcccacctcagacaggcctgaccacggcacggctggtgggatttgccagtcacctcaaccagccagttccaccctcagcttctctcagaagggagcaccacactcctcaagctcagtgaatgtatcccggcatgggtggggccagagcctgtgatatctcgaggtgggctcggcaggacaccggggtgtggaagggggaagcgagcacctgactcagacagcgcgggagctcgcaggagtcacgaggccacagcgacttcattgtctgactgggcctggacctataaacttcccacctcagccttgggccaagcctggaagataaaaatggagcaccccatggcgcccctcactcagattctcccctgggcttctcccacgcagccccagaagaggacacaccagccccagagttagccccagaggcccctgagcctcctgaagagccccgcctaggagtgctgaccgtgaccgacacaaccccagactccatgcgcctctcgtggagcgtggcccagggcccctttgattccttcgtggtccagtatgaggacacgaatgggcagccccaggccttgctcgtggacggcgaccagagcaagatcctcatctcaggcctggagcccagcacccgctacaggttcctcctctatggcctccatgaagggaagcgcctggggcccctctcagctgagggcaccacaggtaccaccaggcgtctccggcctctagcctaggactcagaagggagaaacgggggctcagaaggggtggtcgcagggaaagagcgtgaggcgggtaccagggagagaggatggatgggctggatgcgagtggcctttagctctgccccacaggacccccctgtggctgcaagtccctggttacagatagagaaacgggggcagggaggggggtggaagggacgtgctctgggtcaccaagctggtgtgcttctgtctccaatcccttctcccccacccactccgtgcagggctggctcctgctggtcagacctcagaggagtcaaggccccgcctgtcccagctgtctgtgactgacgtgaccaccagttcactgaggctcaactgggaggccccaccgggggccttcgactccttcctgctccgctttggggttccatcaccaagcactctggagccgcatccgcgtccactgctgcagcgcgagctgatggtgccggggacgcggcactcggccgtgctccgggacctgcgttccgggactctgtacagcctgacactgtatgggctgcgaggaccccacaaggccgacagcatccagggaaccgcccgcaccctcagcccaggtaaggacccacacacactctgccccaaagtgggggtctttgtacttcacgggggggacctagtgcctcagccagcggtgggggtgggcgagttggtggtgggcctggaggaatctgcagagcgacttccattcctggggactagaggaaaaggggtggtgagcctgtgctggagcagaggcgagggggggactcgcagggaggagcctccctgcccctgcctgcgtcattgttccttgacccctctgcagttctgg

SEQ ID NO: 585861 - DNA, 4001 bp, Homo sapiens
gagtgtttttcaacttttagagtttctaatataatgataaagactgcactctccttccctttgacctttctttaaaccctcctccacttcctctattgtaatataaaaaatttagcctaattctaatatcctttaatcaaaagatgtaattaatattgccctatagcaattcatagatttactgggtcaaccaacttttcttaagacaggactatccatcaggctttccacaattcaagccttcctgccctgacctagaagccattggaggcctttgccccatttgtttcattcttcaactctgaagaattaggaaataataggtggctgaggaattcttcaaagttttaaaaaattaacaaaaggaactgatcctcataaaagtcaggtgtaaggcctgcaaactcaaaaggaagtcaaatgaaaaccattatgtgattcaatctatatggttatgcctggctaactgactgactttacaatggtactctgtgatcactataaacaaccctctctcaacaatatggactttatttctttgcgactgacaatccattatctttcatttggacgattcaacattggagctaagattattgcttaagtcgcatgtctaatctctcccactgaactgtaaatcctactaaactgtaatctctacctacactagaaagcaagcaccatgtcttatacttgttttaatattcttcccccatttcatgcacagtgctatgcacttagcaccttaagaaagattaactaggaaatatactcatttttgatgtccattcctaggagtttatgtgtgatgggggatagggctgggacatgaaatggtttgctatagcgttctctcctcttaggaggaagctggtatctaacgtttagggtggggaggagagcctgttatcgaggtggtggttgttttatgtttagggaaaccaaatatattgcctggctaattcagaggcagggtgagctcaaagggtggagacactcagggtctacttcactccaaccctcctcggtgcatttcaaacagaacaagtttctctccgagtcttttagtcgtttcagaatgaactgagagatctggtctctctgccggccgttctgcccgctttctgacacagactttcctctaagcccttaccgactttttcctctggctgttgcttttccactctcttcttaagaattttccctgccttttcctgtgatttgaagcttatctgaagcccagtatcctaagactaacggagaaaggagccgactcaaagataccacaccccaaggggggctttcgacatctctgcctcagaccacagttcacagaccccagaagaaggaaaaggagataaaaaccggtgatgaccgagatccctgagggactgactggtggcagggagcagacaaaggtggcaacatggaaaggaaagcctggctcccgctccaactgcaaaaggagaaagataaaggatggggtggaaaggctgggactggaaaaatgtggagagggccaacaaggggcatctggagacgggggaagaagggggttaaggagaggggcggagagaggccaagaggctgagaggttagggcttgaaagagggcgccggcgagcaggagaaagcccaagaaggagtcggaggttggggaaggaggagataaaggaaaaaccccgggatggagtgaagacggcggcagcaagcaactcaccagagcccagggagaggcagggctggggacggcggagagccgcagacgccccttcggccagtagtctcgacttgaaggctggcgaagccccggcggcggcagccaacgagccaaagacgggaggggacgcgtgagggactctgagacagggggcaacaggcggttacgggtgaggacaacaggaagcgttccaactgccggaaaagacgcgagcgctgaggggccaaggcagcccggtcccccgccgcggagacgggctggcgcggcagcccggggccgagactacgcatgcgcgacttcccggagcggccgggattgcggaactgcgcttgcgtggccccgccctgcccctcccttcaccccctgcctagggctggctggacctgggtgaggccagatgtgtgagtgtgaggcggtctcgaagtaggctgggctgagggggaagttccattgttttcttttgttttactttttacttcgaaataattatggactcacaagaagttgcaaaattaatacatacaggttccctataccatcacccacccagcttacctcaacatttttcttaagatacaacattctcaaagccaggaaattgacattcgcacaatacaattaactaaaccaatacaattaactaaaccaatacaattaacttcattacagaccacactcggatttaacctgttgggtatgcagtcatgtgcgtgtgtgtgagtgtgtgtgtagttctatgaaatgttgtcacctgtatagttcccacccacccccctaccccgtgtagaacaggtctgctggagcccttggcccccctcctcttccttaaagtaaggaccttacctgggataaggtgagctctcataggtttgggaggttacccagcgggcgacccagtgtggacagaagaaggtgcttttcaaggccacccaactcttattctgtactacttttgggggtaaagaggtcccaagtttaatagcctttgggcacttgtcgtttcttgagaatggagcacaaagccctcaactacaaagtgtcaagctcctggaaactaagatgaacgagacatggtccctgactgcctgcaaaggggccatctagggagagaaggaagcatgtgctgcgagttattcattcatttcatcttcaaagcccagtttccttttgtctagcctcttaacaaaaatcacttctcgccaggcgcggtggctcctgcctgtaattccagcactttgggaggtccaggtgggaggatagcttgagcctaggagtttgagaccagtctgggcaacataaggagaatccacctctaaaaaaatttttgtaattggccagcatggtggcaagtgcctgtggtcccacctactgtggaggctgaagcaggaggattgattgagtccaggagttcagggctgctatgagccatgatcatgacactgcaccccagcctgggcaacggagggagaccctgtctcaatcagtcactacatacatatcaatcaatcacttcgcctttcattctctctgcccagaggcccttctccccaaatgcctgttgtcaaagtcctacccattcttaagcttttaataatagtccaagatgtctgcataatgctttacagtttacaaacaactttcacttatttaatctcacttggtcctcactttggcagtgacacacgaggttttgcagatgaagtaattgatacttagagaagctaagtgacttgtctgaattcccacggctagtaagccaagtagccaagaggggaaccccattttctgtctgcaaatccaatgttctttctcctcttctctttcctccttccaaagcccagctcaaaccttatcttcctcctggaactttcccagtttcagaagaggaatttcactctctcttctctcttatatatatgttttttttggtggggggaggggggttgtttttgttttgttttgagacggagtgtcgctctatcactaggctggagtgtagtggcacgatctcggctcactgcaacctccacctcccaggctcaagtgattctcctgcctcagcctccttagtagctgggactacaggactacaggcacgtgccaccatgcccagctaatcttttcttcttcttcttcttcctcttcttcttcttcttcttcttcttcttcttcttcttcttcttcttcttctccttctccttctccttctccttcttcttttttttttttgagacggagtcttgctctgttgcccaggctgaagtgcagtggcgcgatctctg

SEQ ID NO: 585862 - DNA, 4001 bp, Homo sapiens
tgtatttttgaaaaatgggagaaaaaagtatttctacgtattagtccaaagtgatcatgagttcaccaggccaataggagagggtcccagggagggcatctcaggaagagggaatggcacaggtaaaggcatggaggtgtgagatgcctggaagaactgagccctgagagtcatttggtttagcagatccaagagcccatgagtgacaggcactggcagaagacaagagaagaggatgacattagagggacaggatagattataaactaaagggttttgcacacgaagagaaatttttcccttggcaagataggtggcagtgtggaggagaaacttgttaggatcctgtcaggagaggcagaaataccccataaaaggtaatgggtcctagcagggtgcggtgagttacacctgtaatcccagcactttgggaggctggggcgggtggatcacgaggtcaggagttcgagaccagcctgaccaacatgaagaaactctgtctctaataaaaatacaaaaattagctgggcgtggtggcgcacgcctgtcatcccagctactcaggaggctgaggcaggagaattgcttgaacccgggggatggaggttgcagtgagctgagatcgtgccattgcactccagcctgggtgacagagcaagactccgtctcaaaaaaaaaaaaaaaaaaaaaaaggtaatgggtccctatacagagacagtggcagtttcaggatggaaagcagaaaatagtgttaagatgggtggccatttgggcacaggcttcccccagggcaccaggtactaaatgtggagtcagccttcactagattctggtttgcttgtttcaaaatgtactccaagagcccaagagatgtgccccacatgaagtaggtgctgcagctggcacttaatagtgtcttgcacagtgcctgctgagaccaagtgtgtgctctttgaacagtagctccaaaaatgacccttcggaaaggtggccataagtcccagtttgctgtgcttcagccagggtctttgggaaaatgtattaatagggtttcctttcactcttaaaagcataattttgatgataaattatatgttagccttatctttcggtgtaacccctcttaggtggacccttgagggttgctagcgctgtctgtggaatctggagggtggtaaggatgcaaagaaatcatggacctcatttctgctcagccaactcatccctctaggtctcgctctggaaaaaattccccataatgtctctagaagaattacagtgcatgcaactttgaggaattagggaaaagagtattggaacgaaactcttgaaaactaaattctaccttcgctgtgcccccaaattagctgtgcagcctcggacaagtcgcctatctctctgggcctcatgattctcatctatgaatcgagaggacgcaaccagataggttctgagatctctcccagctttaagaaacgaccaaagggcctatttttcagaagccaataatatatggcagttcctacggactctaaccttccctcgagaatcacggtcaacactagctctgtgcagaacatgctgctcatccggttattccttgcctgtgccctggggtgtgaccaccttcgtaatctctttaaacaccaaaggctctcaaaattgatcttatagccatatatctgtatctatactctctatcgatatagatagatatattttgatatttatgcatccgtctagtcccggttaagacagcagttaaacaccggcagaataaagttgctcccacctgttaactagcctcgaccgaccctgctccagccaactcttgtcgcccccaagcgtgggaatcgcgagacctcccaggcaaaaggctttctgtctgtttgtttgtttgtttgtttgtttgtttattaccttgaattcctctttccagcccttcttgggcgcgcgtacacgtctccggtcttcagcaggttgggaaggtccacagcccatgctgcgcgcgcgcgctcctcctccgcgggcttggctgctgtgcgcccccgcgagcgctccctgccgcgctccggcgccggtggtcccgcgctcctgcgccctgcgccctacgcccctgctactgcgctcgggcgccacccgcctctcccacttcccgcgcttaaaccccgggcaggacgcactgagtttctgggcagtcgccaggaatggttgccacaataaattacgtcatgcagacctgggacctgggcggagatgggactcttgtaactgaaaactagaaggttggaggtgtctaaatcacagctaggatgcaaatggcagccctatccagagcgaggggccgggggaaagcccgctgcctggctgcgttactttgaaaagtaccagagtcgcaagcatcttgcgggaacctcttatttttcctctttgtaagacacggtgtgtgtgacacgcccctacccctggtgcctggaccacatccttgtttttagacactgtctgtagtgaaggtgatcgtgtggcatgcgaggcaggtgtccagtcgcagagacggctgttgagggccggaggacggtgtggaggcggccccgacagcaccagaaggcagtggcacaaaagcgacctcagaaagacggtcgcacgaacagaaaccaacacgatgaagaaaagcagatagtcaggaccataaacagctcagcagccgccaaatgggtcacgcaaatcattttaatggcaggtgcattttacgagctgttaggctgtatggaaagagcatggctatgcatatttctagcagagaattaaatcaaggtgttatccgtccaaaaaggcagaccaggaagactgctccaatgaggatcaagtttgtctttcccggatattttcttttaatcttaatttttatttttttttaaagaattaaaacgaactaaaaggaatcttagaggtctcctatcaactctttttttttagttttgcagaagttgagtgactttcccaaggtcaacgggaagctagttaatgaaggtaggatgaggaactaggtggcctgactcagtttctctctgtctccacaataccaggaaagtacaactgaggattcttagaggtgtaaaaatcctgggtccttccaaggaaactaatgctcagctctgtgataggaagctgattacttacagcatttaaactcatttcactgttattggatattgctgtcaattttccttctactaaaattgaggaagaggaaagatgaggaaatgaaactcaactcaaagtattataattatggagcaagaaacattgaagatttattgaatgaagagttgaaacaaagctaaaatggtgttgggggaacagctctgatagtattaactcatgggtgtcataagacacatgtaatgccccaactggaaactgggggaaattctcgattagaatattccaacacaaaggacaccaataaaatgttcttgagcaagttgaatggatgtttgtataactgtaagggtaagatactgcacacaactttttttttttcttttaaggctctctgtgaacagagatttgctgagaacgagtaggtggtacccaagtgtgttgtgcaggtgttgtttgcagcatcctaggactacagtgtgtaaactaaaataaaatcctaagcccaccatagactgaacagaccccttctgagccaaggggacccaagaacaacttaaaaaccaagttcctggttatgacggaatgagaggtgagacatgccttttttttttttttataccgccttggtttagacacaacaactgatcagcattaatgttaaaatagagaccagaagattggcagaacaggcggtggctcacgcctgtaatcccagcccttcgggaggccaaggcaggtggatcaccttaggtcaggagttcaagaccaacctggccaacctggcgaatcaccgtctctactaaaattacaaaaattagcgggtgtggtggcgggtg

SEQ ID NO: 585863 - DNA, 4001 bp, Homo sapiens
aacatgaaacatggttcattcaagcactttaaaaaccatacctttcaaattcatacatttttaaatcatgtatcaaatgaagaataggctgcctacaaagacaagtaaatgactaaactcaaaagtttccttgctcttccagccatgacccagtccattccaaatcccagatcttcagaaacatcagtcatattgggacagaaacttttctctgggtatagatttaccctagcacctatctcattatattgaattttccagcatatttaaataaactattaattagtcacactatttcttaaaagtcacactatcaactaatcgtgaccgcaattatctaggggtgataatctgctgagtctactctttaaatacactgggacccagcatattgagttatattggcacagaaacttcactctgggtatagatttaccctagtaccttgccggcaggatcctattattcatggttgtacaagcaaggttcagggaagaggctggcacagagaaggtacctggtaactgttgtttgaggctgaattcagctcaactcagctccagtagagatggtgtccccttctctaccgtgttgagatagtgtgcagtcccttcctaagggctgttacccaccgcaataggacttgtcagcttcaacttttaaatttctctgctcccgctgggacccacccgcttcaaaaatcatcatgtggttttagcaccaatttagtaaacacaaactgtctgaaatattttgattttagagagttacttacaatcaccacattaaatgatacctttctcccatgcagtgaaaatgacagcaaaatggtcattgaataatgaaattaattttctcttgggcatctgtggcaaagcacatgatttcaatggttatcttagatcagcccagtgacctttactggcatgttgtaacatcaggcgccttaggaaactgaaaactcaatcgtcacttcccataccactgccccaggttggcagggcaggcatttcacatctagagtctcattttaaagcaagcctcgcttttcaaaagttcattaacaaagtctcacaattaagagagcagccctgtgactcatttttggatacctgtaaataacagctcctccctctgctgagaaacggctgaaacaagtgcgtgagaaccacaggaagtaatacagatctcagctggtgtcagcggagtctagaaaaaggcagaattccctctcaggacggcgtggctctcgcaggcattgccactacttctctccatgtttctaaaacaaagtcttacgtgggcttcgaagggactcctcgaaggctctatcaatttctccgtctttcctggctactgagtgacaccgccaagttcaagtcaagaagtacccattctggtgtttttgacacagtcaccctactaggaagtgaagaggtgataataaaaaaacactccagcctttcgatttaaaataaaagtagtcttgggtggacactttataaaggcagcctaccaacaggtatccctaaaataattcttacgaagcactaaatcctaagtccctcagcctctgaaattaaaagtaattttaaaaaatcattctgctttatatgagaaacccaatgctgtgtttccgaaggtgcccagaggcggcgtgaggacctgcgccagatccaaaatcccacctaaggcacagccgcgggtcccgagcctagacagtgcccccgccccgacccgccctccccgatctctccgcgcacggggaaaatagtcaggaagagaaatgggggctcaggaagagaaaaacaaacctggactgggagcgagagtgcgaaccgagaagcccctctcccggcagggcgcgcgtcccctgtgggcgcagcgatggagaaggaaacctgttgcgcgactcccggcggctccgctcccggcgcctcctgcggccgaggctgagttcctccacggccgcccgagctccgcgccgccgcggccgcatctgggcgccgccggctcagcccccgccgcttaggaagcgaccacagctggggaccaggccccgccccgggatgacagcgctggggcgcggcggcagccggctcacagagcgcgggttcccgccccacccagagtccatgcgctcgggaccgcccggagccggggacgcgctccagcccctcccgcaagcccaggggcgttcccgcgggctgcgcggaccggcgcggggagtgggatgtttgccgcccaagacacttcctccgctcgtcctctggtccccagggcagggagcgcgctggacttcccccgggaatccccgctgcgctggtgacatttgcagtccggtgcgttgccgcggcgaggacgctggaagccgtctctgagcgtgggtgtggctgcggaagctgcggcaggtcctgcatccctgggaccctcgaggacgcgggcgaggagcctgcggtcacacggaggccgagcaccgccttcccagaaccctgccgaccaacctctctccagtcggcctcaacacccgccgggctcatcattctctggatatcaactgagcgtccccttgtgtgcccaccgcgctcaaaaatactgccaagacccaccctccaggtcccggcactttaacggggagggataaatagaaagtgtggattgtgccaggtggtggtaaagcaccttgaaaaacaaggctgaggctgaaaagtaaggaagtgatactcaaaaaaggaaaaatcgggccgggcgcggtggctcacgcgcgtattcctaacactttgggaggccgaagggggaggatctcttgagcccaggagtttgagaccagcctgagcgatgtggtgaaagcctatctctacaaaaaataaaaaaattaactgggcgtggtggcgcacgctgtgatcccagctgctcgggaggctaaggtgggaggatcacttgaggctgagaggtcaaggatgcagtgagccgagatcgcgccactgtactccagcctgggcgacagaatgagacgctgtctcaattgaatgagaagaaaaaaaataaaactaaagaacgaatcctgccttgatggcagaatgtttagacacaggaaccacctgaaagctcccagttgccaaagatggaaccatttgagcaacgaagtaaactaaacaaggtagtattggattacaagccaaagtaaaaaaatccatgagtctacactgatataaataaataattgaataaataaataaaaggcggagaggagacaaatctcctatacagaataattccaaataatttatgtagatcatgtaccctaggctgtgcacagtgacttcctccaaaatagtacaatgtggaaagggaaaaacagtaggtttacaatggagaaagccgacagacactaccccagccagatgttctaagccaacgtcaacaatcgtgactcattgatggcatgtagtcaatatgatgtgatgaatgtggcatattacatgtgtggtctccctcctggaaaaccataacctcagtctcataatgagaaaaatatcaaacaaattccagtagtggaacatcctacaaaatacctgaccaatattcctcaaagttgtcaggttatcaaaagtaaggaaagtacagtccagacgtggctcacgcctgtaatccgtacactttgagaggctgaagcgagaggattgcttgaggccaggagttcgaggcctgatctggccgacatagccagatgctgtctctacaaaaaataaaataaaataaggaaagtctgaaaaactgccgcagcctagaagaaactcaggagacgtgaaaactaaatgtaatgtggtatcctggatgggatcctgggacagaaaaaggacttggggaaaaactaaggaaatctaaataaagcatggactttcattagtaataagaatcaaggttgattaattagttgtgaggaatgtaatgtaagatggtaatcatagggaaatctgaaatggaatttatggaaattc

SEQ ID NO: 585864 - DNA, 4001 bp, Homo sapiens
tgagggtaaatattaccatttccaaaacataaaattccagtgccttctttcagataccgaaggtcccaggcttcttgctgccttgggcctttgctgggtgccatttcctatttctagaaggctcttcccatgatctccacgtgactggctccttctccccagcaaggcctcatcacatgctagagaaacctttgtgaccactctgatatgaaagtgagaactcaccactggtcactctttgtcaatctaacttactgcttcacaatactcaaaagtcgaattaatcactgtttattatttatccctacacctctggaatacaaacaggagctacttctggaatataaacaggagagagatgaccttgtcatcctgtgtaatctacagtgcctggtgcatagtaaatgctcaaggaatgtgagggtgctctgtctacataagtatcctctgcaaaaactacattaactgtattctttggccttagctctttcatcactgaccttttgtactacttggttttagttcacaataccgaggattgtttttttcatactttcacacatgaaacttgcaaattaaatggaatcacagcaaacttcactcagacttactgtgaatattttctataatttacttttcaatcatcagcacttaaagtttggggtcataaccaaaataaggattgattttgttatcaagagcaacataagtaacatatctgaggaaaaattatgatgttaatcagttaatatggtatcatattaacctctacagaaactgtgaagttaagagcataattcttaactagtcacgagtctgaggccaacttctcaaagtagcctataaggcctgtccacaacacaaaacacagtttaacaccgttatcagcctctgcccaggtgtgctcagagaacctgcagaagaaatgtccacttccaacattattaaatagcacagcatttcataattactttcttttcttccagattctgggcaagttttatatattatatataattatagtcagaatacaacgatctgaggtaaacaaaaattaacgtatacagataagagccaaacaaatgtaagaaatttgtgggaaaaaacacacagcatttgatcagaaatgcaactttttttctttgtctgaatttaaagaaagtaactagaaaacaaggtggaggaaatactagaaatattttatgtacgtttaaaggtttttatgtaaattaattaaaggtgtatactcaaagaatgtcaaagtatgttaaagtcatcaagccaaattaaaaaaacaatactacgatcctctgaataaataaacatacacggttcgcctgctacagccatacatttttcagttcctctatattcgggaagtttagtgtgtttttcaatccgtgagttgaaaagaggaagaggtcatttggtcgtgtctggattcctgagctgggccccagccggctctggcgccctccccggggtgcgctccgccagccgtgcgcctccggagctctgcccaggggaccgcggcgggtgcgtggctgggtaggcccacctgaccacagccgcgcgcacccggaatgcggaacgcgccgcgcccttgcacccggccggggggcgtggggagccgcaggcgctccgggagctggggcagtcccgcccttcctagcctcccgagtgcctgctgcagagcgcagggcggcggccacctgaccacgcgcacaaacaagaaggcgcagcagccgcaggggcaccgcgcctccctgtcgcccggccagggagccccctccccagggtcctcttacctggacctccacggctccctcctacacctccgaccgccgtcacccacctaccccggagccctcagctgcaattctcagctgatgggcggtggcgtggggacgcccagtgcgcatgcccgcagcacaactcaggaagaaggcggggttcaccccttttctattggcccgcggggctgagtgacagcggccctcaccgcccctccggttccaagctaaggaatgggggtatcagcaaaattgcaagggagctgttctttgaagcctgacgtagagatggtgaacgcctcttagcctgcgtgcaaaaaaggacagaatggaggacagttgtcttctttatctggtgaagccagccttcttgcacgcgggtcttcaccccgccccattagctcttgcctgtcttgtttgctaacctttaactgcagtagatcgcgttgacagctctatcgaaaaatgcaaaggcgagtacacaatcctagcaggaacaatgaaggaataagtgaagagtcatctctgggtgctcacttgtaaacaagttttcctagtacatacaagtcattctaagcattcctgaaaagcagggcgtagttttcacagggtttaaaacaagcagagacagttccaatgataaatatgcaaatatattgtaattgttagatgaaaagcatcaattgctacaaatgaaagaaagccctctccaaattaattagaagatagattggcttagcctttgcctatattaaggcaacactattttctaaaatgattacccggataggtgatatcaaaagtccagacgcacttaggtggaaaaaaacaaaacccaggatagaattctgattggaactcaccaacactaagtgtggaatgttgtctgcttaagagagatggacagagaaagaataaccctgaaaacgagtaacccacaagataggaaataaaccaggaaaaggtaaactagagaatgaaggaaaaaaggagggaattgtccatgatgtcacctgttacacaaagttcaagtaaataaagaactgaaagtagtgcattgtacttgagaattaggaagtggctggtgaacgtaggaagaaacatttcaatcattgaaggaacacatgaaaggatcttacatccatgtgaggtttagtgcactttccaaatacccattcatattacctttgatagaactctgggctccggggagggaaggtacaatgcactacagaagaacctgagattaagtggcctcttcaagttaccctgatagttactgactatgctgggcccaaaacttagctgtctgagccctcatcttgggctcattccaattccttgttttaaaatatgttatgagtggattccttccaggtcttttgaaaacttagaataagatttcatcctttggtattcaaatgggaaaaaaaagaattatagtctagacaaacttgcaaaatttagaagtattaagataaatgaattactaagagttcctgacacagtattccatctgtgaatctggctgctaccaagttaaattcagccaggtgtcttgaaagtggtagggctttaaaagtctcctaatttgatgagtgataatgtcacatctcccaaaataaatcatttccatgtgcagaagttacctatgactgaaagcttgtaatttggattttcagaaatagtaatttgcgagatttgggccttcttggagagattttgaaggaaaccagaagttgttgagtggggaatgttatctgcacacttgtggtgtccttattaatataaataccataaatacctcctatgtaacatctctcatgtaggatggagaactgtccactgctgtatctccagtgtctgggatagcaattccagggaatagaaggagataattgctggttcatttaatagttactgaactaaaaatattttttacatgaccactatgtgatcttctgggaaagccaaagaagtaaaagacgcataaaggtaaatagagcaaacagggacttattggtaagtgagaaggacaagttgacttatgaaggtttgtttttatttataatacagtgggaaaaccacaactggtttaaaaaatctatgctagattaaaaggaagcttaaattaatacttaataaacaagagttagttcagttgtgccttattgttaagcaccttccatgtctctctacagtctactt

SEQ ID NO: 585865 - DNA, 4001 bp, Homo sapiens
tatttttccttagaaacttctatctccttacaaataaaatagttatcataaaaaaactttagacctctatttggatatatgtttagctactataaactaggagctgagaaacatcacagcagtatataagctgaattataatcaagggaaaagccaacacatgatttctcatagtatatatctaatcacaccaacaggaaaataaaaactttctttggaactaatcagcaacacagaaggactggggagaacaaagtagaagttaaaaaataaaattaaagaaaggatacagccttaaagcaccagtctgagttcccactgccaggatcttctgtacaggatcaaaggccagggctgagggttgatagggaaatccatggcgaacagtctagggatgggcaagtgacatcacagcaaccaaggcagcaagcgaaattttaaaatagaaagtcaatagaggcgttagaatttagaaccactaccactgatgcaaaacacatacacatgcacttactgcttttgaaaaaataagtgaaacctacattaacaaagttattcacatagaacctgaaacaaacaaaaatctagtccagtgatatactttaatttcgcttttccataatactggtattccatagaagaaaatcttttattaatattctatactactacatccgacaccagatgactaaagtttgcaatggtccaaaattctgtaaacccattaaatgcaattcatactttattttggcagtattcatttcatcattactttatttggatgctaacgcaagtacttctaaggaaaagctgtcatataattactttagtcaagcattcagtagagcaataatcaaacctctatcccaacattttacacttgtaacagaatgaagatgagtacaacatacatttttgcaatttactattaaggccataatcattttagggcattagacctatatatatatatatatatatatatatgcacacttttaattaactctgacatacaaatacatggctatttatgagaaaggcaggtattaaaaccgaggcaagtttgtgtttctcattaagcagctggtgacttaattcgctgcatcattctttctgaattacagaacgctatggcaattatcgtgccattaacaggcaaaaatctcagtactttttaacaaacataatgataaaaagaaccctgtgatttcatatcgtaagccacttacaccacattttaagggaaaagtgatgagcaaaggtgtggtagaacaggtttggctttttgataaacaacattcattagacaccgtttccaaaggaaacttcgaagttggtgaatcatattaaaacgcttgaatataaaagcttccaggttattactggcagtgtcagaatacgattaaaggtcggataatagtttgaagcaaccttgaactgattgctgcatgtgcaaaggggagagagaaaaatcaatgaaaaggagtaaggtatcaatctccaaaacaacccaccgaagaaacgtttgccaagggaggagcgagccttttattagagttattattattattattggcgttctcttcccttgcattcccatgtaaagcccgagtagcccccttaaaacaaccccaatttttcaatgacggtgtcgcggggctgcgcgctccgttcaccttgcagagctgaaagtgctcggactggagcgtttcctggatctccggctcccggttcccaggcggatgctgctgctgttgctgctgcgacgccgaggacgagccggcggtcaggccgtccagcaccttcctgatgttgaatttcctcatggtctcggaggggctcccccgcagcccgggaggggaggcacagggggtccccgggcgggggagaccacccggggccgaaggcagcttcgaccgcggaaacggaggagtgggagtgtgagggtaaggaggcagctggggggaagcaaaagataatccgaacaggaaatactgcgacgacaagagcggcggccgcaagaaacctgggcggcgacccctcttcctccgaggccgccgctgcttggcgcggctgctgtggtgccgattcagccgccgccgccgccgcctcgctccgcggcccggcagcagcagcagcagcagtggcggcggcgcccgagcccgctcagcccagcctcacctggccgcgggcggactctgcgccgcgccgccgccccggctcgcccccggcgccgccaccgtcgccgctgcgtccatggcccgcggccgcgccgctgctcgcccgccccggccccgcagtccctcggcgcgtcctccggctccttctcctcctgccgggggtcgccggctctctgtccgcggccgccgctcggcctcgcacacaaggcgcctggtgtgggtccccgcgccgcctgcctcgccccgcctcgctcctccgccgctggaccggcccgccctcgccgctcccgagcccggctgcgttcctcaggcgccgccgcggccgtcggctctccccgcccagccgctccccatcgcctgacagggcgcctcggcacacggcaccaacgcccgcccggagcagcagcggcagccgcggttacagcgcgggccgcggcggtggcggcagcagggcctcccaggagccgggctgcggtacctgcgcatgcgcgccgcagcccggttcccccaccctggcccagcaggcccccagccccccagcccgagcgaagctggggcttaaattatcttctgcgaaaatcccagacgctggctaaatttctcccaccccagtcgagttgccagagtatgcagctgcttctcttgcagctggcatagtaaaaatgttgacgactaacaagcagcaggaaacctttctttccaattcagtcattacagcaggggttgatgctttctcgccgttaatggggtgcacgctcctggccgctggctgcagtattatttttcttgctttattgacgggcgttgtttttgtttgattggatttgagttttgaaaaagagcgtctagacaacgatatgtcagtggcaggaggatgatggacttaggtactaggaaaaggagagaaacctagacgggaaaaaacgggttctttcctacagctgttactgttggtggaacgtgtctggtcttagcagttagctgctgggatggaagaggctgccagcggggaacggttccagggccggtgtcagcccgggccgatgacactaccccgcacccagcccctcgccggggaggagcgcgggtggcaggaaacgccgcgctgccactatttttcagaaccttcaatctgccctgacgctgatgagccactcagtaatgccctgggagcttcactctagaacggggaaagggggataggatgaagtttttgctcagatctttccgaggccgcactgcccatctcgcgtgaatgcttggagacaaatgcctggctcaagttggaaaagacagacaagagattgtgccggggaaaccccccggagagtgcgttcaacaggacaggtggacggaagcacaggtacttgattaggaaggatgtggaaataggaaagacgtaaggaaggaaggaagtgcaggaagactaatcctaattcggggagagggggacaggttcctagcgaatgactcctcgcgcgctctggtctgcggaaaagccacggaaccgccacaaagggtttttttaagttccaaacctgtcagaagcacccgccctcttctttgtgaggtcggctccctctcctttagggaaattctcgtcaccctattggttgagttaaccagcattcaaaagcagtcagcgaaccaactacgactgggcccagggatttcgggaaatgtagtccactctgcagcttccgcatcccaggacgatgtcttgcatttggaacctacaaaattttgatttgtcgtttaatatttattgaattagttgattcgctgggtgcaacgaccaagaaaacaaatgtgaggacattc

SEQ ID NO: 585866 - DNA, 4001 bp, Homo sapiens
tttttttggatattttttggataggaatgtatcaatttttttctaggttatctagtctgttggcataaaattgttcctaatattcccttatgatccttttatttctgaggcatctgttgtcttcattttcatttctgattttgtctcctttttttctcaatttatctagctaagggtttgtcaatcttgttgattttttaaaaaacctcttagttttactatttctttttctgttgtttctaaattctctatttttgctctaattcttattattttcttcattatgctaacattaggcttagcttgttgttcttctactggttccctgaggtataattgagatctttctttttttttttttaatgtagtattgtttatctctagaaacttctctcttagtactgcctttgcttcatcccataggttctagtatgctatgttttcctttttgtctgaagatactgttaagattcccttttgatttccttcttgactcaatgattattcaagactgtgtttaaatttccacaaattttatggttttcttgctgttactgatttctagttttattccactgtggttagaaaaaatacgtggaatgatttctatcttcttaggtttgtttaaactcgttttgtgaactaacatatgatctatcctacagaatgttccgtgtgtgcttgttcaaatcagctgtttctttattcattttctgcctggatattctattattgtaaggggggtattgaagtctcctactattgctgtcaatttctgtcgtcagaactgtcattatttgctttacatattaatgtagtctgatgtggggtgtgtatatatttataatttttatatttttctgtggaattgatccttttaccattacataataatctttgtctcaagttttagacttaaaaatctattgtttctgatataattatagccacttttgatttcttttagctaccatttatataaaatctttttccatcccttcactttctgcctatgtgtgtctttaaatataaaatgagtctcttgtagatagtatattattggatcctgtttttatttttatttcattttaaacaaaaagtttatttaaataagaagcctgacttgaaggaaaaactttctaggattctttcttttttttttagagtaatttatccctacttaaagacagattgccctacatgtaacagctatgtacacaaaagttataaaattgtccttggttttacaatgataaatgaaaaacatgaaaatcctccaattgaacaaggtatgtgagaatttttttttgttgttgttaaaacagtgagagcaaaataacttactagaatataaagataagacctgaatgaacatgccactaatggataaagggggtattttcacagaatcagtattttttcccatcctgtctccacttgatgtcaatcaaaacataccattggctgtttggtttgaagaaaaaagcaatatgcttgtgtacacataccagttacttcatgtataataaaagaatgtggaagggggaaacaaaagaatagagaaaactatactgtagtagtcagaatgtggtggaaccaaattgcagttttctaattgagaatgcagtaatcttggtctttaaagaacagcgttctggagtaaagaagcaggttcccttttcagtagacacctcccgtaggctgttgaaacacatcaattgtatcttcatcttccatttccaactgtgcaggtttgtctgttccactgattggttgcccaccaaatcggaatctgatctgcttcactgacaatccccgtggttcacaataggctttcattagtttactaagtggtgtctgcctcttaatcttaaactgcaccacagaaccatcctgtcccgccaccttcaaattaatatgattgttgttctcagtcttgacttcttctgtgggcttttcgttggccatggtgaacaccggagtctcctcagctgctgcttcacaaaagaggtggcgggtccgcacctaacgagtacacgagcagcaggaagagcagcaggaggtgacagcggtggatgagggagagggtgcgtgcacatcctgggctccctcccctcccgctgtgtgcgccagcacgagctgttggggcctcccattggctgctgccagatcctgtttttaaaatccattcatacaactccttgtgagtggtgagtttaatccatttccagttaaggtaattactaataagtgaggacttactattggcagtttgttgcttcctgtctatttgacaactgttttgctcctcttttcctcttattgtcttgttattcgacaacgtttaatcgtgatttactttgattatatttggttatactcttctattttaagttgataacaacttaacttcaaatgcatacaaaaatactactgcatctttacaacctccaccctcccacacttttgtgttcttgcagttttcttcttttaatattatgtatccattaacacatttttaccttttaactttcttattagagttgaaagtaaattatataccacggttaagtgttaatctgtaaatatgtctatatttttaccttcagcagtgatatttatgtacctgtttccatttctacacacattttaatgcctggatcaaaacacacagacatactttgaaatgtcttagtttggtgtgcatatattctgagaatatcaatgatgtaaaatgatagaaggtagaaaactattcacctggaatttagggtattttgattacttaaagttatatataaattaaactaaatactcatggggggggggaacttccctaaggtatcttccttatcatttgtctaaagttttaaatgatacaaatttttgtacttagtaattgttttttaaccaagacttgctattattggttgggagtacatagtgtttcctaagctcgtgcatattacttttaaaaagctaagaatattacatctttgcatccttcccaaccccaagcatgtaaatgaaaataagcaaacatcttcttaatgaattcatttaagaatgccaaagtttgaagcaattctagagaggaaggttgctgaacaggaaaaattttctaaaattttgcttttcaaaagtaacagttttcacatttaatggatacactaacctttgggttttggtggcacaggacctacaaatccaatattgtcataaaagttatgaatagcgctggggttaaaatgtggtcctgaaatatataaaaagtaaatatatcaatgcttatagctcaaaaacaactttactttttaaaacaagtatttctttctaaaaataaacacgctataagaaatgcttttcatttattttgcccctctaacctcgaattatatgtaagatttcaaaacatatttcaaatatattatcttaggtataatgtagtactcataaacacgggtaagtggtaaactgtgaaagaagtcaaattaatgctggtaagacattaatagaagtagaagtagatccctgttctatgtggcaagttaaaataacttaaaatttcacaatttaaaatgtaattttaaacgatcaaacatggacttaagtaactaaacagctttacctcaagtaaatataaaaaccttgcactatgtaatagaatggttaaaattttacacaaaaagagtaagttcaaggattgtagtttctagaacagcaccaactttttagagttaaattatggtatttttctatgaatgtttaaagataaatagcttaatcaacatttaaaaagaataaaaataaaaataatcatcttccagttgaacagattctagaacacagtcccaagtgtgattaaagacttctcttttggttagattccttccccttcctgtcttttccattttatatctttttattatttatccaacttcagaattaggtttaagtgataacatttccttttagttctctatggaactgaattaaattgt

SEQ ID NO: 585867 - DNA, 4001 bp, Homo sapiens
agtggtaaaagatagcagaaaccgacaatcacaaaatagtacaataatgtttaaagaaaactccagttaatactgtcatagctctctgaatctggcattagctgtacaacctaggagacaacgttttgctttaatttgtcaagatgtaaataagtactaacagacccatggtctgaactgcagtatttgaatgaaaggcattatttgaatataattacaattccctatggcaataaatgttccaaagagctggcttatctgatttaaaactcaaccatatcaagactcggaaggactctcaaaatctaaattgtagccctgtgctgtccaatgcagtagctaccactagccacatgtgggtatttaaacgtaaatcaatttattaatttatgaataaaattaaaaattaagttcctcagtgacacttatcacatttcaagtgctgaagagccactgtgcctaggctaccactagtgcctaaaggcacagattatggaacatctccatcaaggcagaaactgctagtgaaaagtgcagccctagacttaggcatacttcgctccaacgtcccgaatatcctgagataagaaactttccatagcacaatgaagagcattccattcttgcaaagtactctcacgaactgtttctcataggcaaattcagcctctttgaaacattcaccagaaattccccaagttttgtccttcaagtaaatctttgcagggcgaatttaattcctcttccagagtctgcccttcacatatactaagaccccaggtcctctccttccaaatacatacatacatatatacacatacatatacttatatacacacatatgtatatacatatatatacacacacatttctttctaccgaaataacttaacatttctattagcctcttggagaaatgctaatttatccacgtgtacagtaatactacgtccaggatcgtctgagtgtcaaatattacatatcactgtcttcataacttcactctcacgtgtgagaccaagtgtcctgattctctgagaaaataaggtcacagtcattctgaactcctaaaacgtggagagcaaaagcagagctaatatgtactgagcagcacctggcgctgttctaagcgtttaacgtgtattttctcatataatcctcacaattctgaaataggctataagatcgccattttacagaccaaaacaaggcaaagacaagctaaataatttccccaggggtcacagacgtgagctcaccccacagagaacacagcggatcttttcctctttctggatgctacactcccactaactacctaactcttctctcgccgtgccataaagcaacaatttccctctttaatgattcctccggcagcccccacactacctagacgacccgcgcaccccgcttctcagcacagcccagcccccctcaccccacgcccacccgccaaaagggaggagtcgagaggcaactccacgctcggcagcggaaccagggcgctgcgcccggccagcgcctcccacagccgccctcccttcaacactccggcgtagaccacgaagacccaggcagccgccctcgagccggggccagggcgtggccggcgcgggggcccagcgacgctgggatctccgctctgcgtccctcccggctctctgacgtctcccccgcccgaatccccgcaccgccccccgcaagccctacaacctctgctttaagaacccttggaggcactgctgcgcttcccgcgaggagaatgtgggggtggagatggtgcggtttctgctgctgcggcccgggacacgcttggaaaggggcggggtgggggactgagagtgtggagtgtagaaagggaaaaggtgactcggctgtgtgacggggcgatggggggggtacaagatggcgtgagcccgactctcggtggggcgggggttgcggagactgaggagtaagcgatacggacgccccccgcactggcagtgcgggcgcatgcgcgcttggccaggtggcgcgcgctctcccagcccgagcgagctacttccgccacgctcgccgggggcggggcgttgtgcgcggccttcagggcccggcttgggcagcgctgagccacgcggcggcgtttagagctggggacgctgggagcggagtggggacgagctgagatcggtcagggtgtacagggtgcaggcttgaattctttaggaattgggcccgagagggctaggatttttgaaggattgggtgaccggcactggaagttgattttcaactccgaggaagagattcaccgttctaagcttctttccaggaattggagtgaacgggatcttaatgggattgcgcgtttacaatggtgaagggaaacggaggggtctgaacgctccccgcagggccgcagtacaggcgtgtggatgtggaaccctttctgggacggcgaaaccagctcttacgccgcttccgcgcgccatcactccctaccctgacctcgcacagaatctgtttcattaatctgctattaatgttttttccccaactcatgttactagacgcaggcgtttaactaccatgttttgttattgaaaactttttctacttgaaggcttttttttttttttggacgattctgtgtttagattttggcctgttcctcattttaaaatcttgcacccccagtattgtactgtacattctgtcctgccacatttaattgatatagatgtagttctttaaataatacagtagtcgtaagacaatgctttcagtctttcactctttatattatatgaagtcttatttatatttaacattcttattgcctgcttagagaagaaaactggttatccatgctcaccttcacacctgtgttgtcaaatactataaaatactgtattttatagggattcaagtattaaccctcaccaagtctttttaagcatcactgcttcagttattttcttgcctatagatactgtgagttctgaaatcccttccttctatttgcttaaattgtttaaaatagcaacttatttggttatttcctctgtggattgtagttgagtctgctagtgttgtgtttgattctctttaatctccccaacgcttcaatatttgccaaatacctaaaattccaaaagaatagatatatttaggatgtgagagctcagcttgatgtgtaaatcagggatcaattcattgctgagcaaagtgtgcagtataagggaaagtaacagagtgagtatggtgataacttcttacatgggaagactggttgaaagctcttttgagtacattaccaagaaattagttaacagaagattaagagaaaaattaatgttcacatctaaagaaacataaaagtagatcatttcaattaaaattatgttcagttaatgttatcatagaagttcctgcactggagtttcacctgcatcagatgagtacctgtttgatccagtttatcaggatagaatccagatcatcttattctaggatactggtgtccagcctgcataaaatcacacacaggccaggcgcggtggctcacgcctgtaatcccagcactttgggaggccgagacgggcagatcacaaggtcaggagatcgaaaccatcctggccaacatgatgaaaccccgtctctactaaaaatacaaaaaagtatccgggcgtggtggcacgtgcctgtagtcccagctactcgggaggctgaggcaggagaatcgcttgaacctgggaggcggaggttgcagggagccgagatcacgccgctgctctccagcctggcaacagaactagactccgtcaaaaaaagaaaaaaaaaaatcacgcacaacaaaagttaatgagagtgacacatggagaagggaaactgagttaaggcattgatacaggaagtttaaaaatttattcttaggaaactgaattgggctgttggcagagatctgatttttaaagtcacatgagttaaccaggttcctacctcctggaatttct

SEQ ID NO: 585868 - DNA, 4001 bp, Homo sapiens
actatgctacgtatctataatttctaagttttgtcaacaaattctgaattagtgggaaatacttcccatcccaaagaaaatattcccgggagcctttatgttaagcttctttacctcttttctctatagacacggccctatctctccttcagttcaattcgtatgcagagatgctctgcttatttttatttctacctcctttcaaccttctctggccttggtggtcagtactttgcaaattccaaagaaatgcttcctgtttctggaatttctggagccactctagtacacagaaaggtatcccccttctgtgaagatcatgtggcagcttttgtgggtaggaacctgacaggaaaatcagaaagtgggatggtttaggcagaaaagatcgttagattctctgagattcagtctcctcatttaaaaaacatgatgatagccgggcgctgtggctcacgcctgtaatcccagcactttgggaggccgaagcgggcagatcatgaggtcaagagacagagaccatcctggccaacatggtgaaaccccgtctctactagaaatacaaaaattaccctggcgtggtggcgcgcgcctgtagtctcagctactcgggaggctgaggtaggagaatcgcttgaacccgggaggcagaggttgcagtgagccaagatcacgccactgcactccagcctgggcgacagaatgagactccgtctcaaaaaaaaaaaaaaaaaaaaaaaaaaaaaaaaaaaaaaaaaaaaaaaagatggtaacacctatatggaaggattggagtgaggactgactgacagaatgtctgtaatgttcttagcatagtgcctgggcacataaaaatggctcagtgaatggcagctttcaatgtaacagggatggagagggtgaggaggttatgcttaagtgctctgaatttaagcgtagcttgatgttagaaaggtttctgtcccaaatctgtttccccatggctgggaagatggcgccagatgacagatggattttatggagaacaagagtgagttcctggatctaggcaagcagttacccctggctatcagaatcacctggcgtcctcactaacaaactaacaaactaccggcccaccgtagaccaattacatcagaatttctaccaccaggaacccaggcagaagaatgttagaaacacgccccaggtggtttttgtttgttgtttttggcgtccctgggtgggctcaaacttcatgtgtttttttttattatttattgataagtaataattgtagctttatcttaggggctgtcctttgtcgttcggttaaatgaagtcccagcacttggggttgcttaacacttctgcactttctacgcagcaaggtggaaagagggctggaaaaccggctaggaaaatacgcaaagcaactagaaaagaactatctcattgctttccgaacacgaattctccggttcccctttccctgagcgctatttagctagggatccgaggtttctattctgcctggtctccccgcaggctgccaatacactccgagcaaacccaaggaggtggcgggggactatgcccagcacccggtctctgagcgaacacctcaaggcggcagaacctgagccccagggaccccgcgccctcgcgcgccctagcactgtggacagaaggtccgggcccttcgggggtcactcaccgcttgcataacgaggcttcttcgttcctgaagcgacgcgccgctcagctttgttgcgctcggtcggccctctcctgcttccccgcccaagagccccgcccgctgggggcgctgccgaaagagccctggtggcggaccgctcttcgagtcgagtcttcttccgcaactgtaattgacgaatccgccccctgaagtttactagagctctgtgttttgagactcaagaagcgcgtgcaagtaactagcgcacacaggccaaaccacctgggcgcacgcactcaccctttaagagaaagccagcactcaaaggatgtgaactacgtcatttaaacgttccttatttgcgaaattccaaacagataggcgttcgctttgtggtagctgttccaagtttttgccccgccttaaaaagccagaggggcggccaggcgcggtggctcacgcctgtaatcccagcactttgggtggccgaggctggtggatcacttgaggtcaggagttcaagaccagtctggtcaacatggtgaaaccttgtctctactaaaaatacaaaaaattagccgggcgcggtgcacgtgcctgtaatcctagctgttggggaggctgaggcaggagaatcacttgaacccgggaggcggaggttgcagtgagcggagatctcgccactgcactccagcctgggggacagagtgagactccgtctcaaaaaaaaaacagccagaggagcagtttttggtccattgatgtgtgcagacagaagccgaaccctttcctatggtaaccagacttgtacccgatattattaatacattcctgatttcacacacacacaaagtgtgtttggtggttgttttttaagtaccgtggtggggaggaaggggaatttttttttttaatcaaagcaaatagttttgtttttgtttttgtttttttgtttctttgtttgcctatttcctttaacctgacaagtatgcgtaccaatggctaggctgattcggataggtggccagttgtgtgaacacggtggcaaaattaaattggactagagttttccacaaaaaacaaaaaaaagacccctccaatccaaacatcctttgtgtaaaaatcaacttgtattataactagacctgtgagtatttcaagtcataatatgtacggaagatatttgtctacaccaaagcaaaacataacaaaaccagaacccctgttagcccaggacttgcacacatttctagtccgttcaaaacaatgtttatgtcaaagcctgtcatatcaatttcctggaaagtataatgtaaacattcttacattaatttacctattttaatctaaaccaaggaaattcaaacgcaagtttttttccttttcaatgaatggacttttgtaatattaaactagtaatcaagacaggaacagctgtgagtataagctattgtgagtcaatacaaatataataccagggcaagaaagaaacaatgaataataagaagcaataaacaaaatactacagtttaaatgaattttaagagaatatttaaaaattagagttttcataatattagatagaaaacttaatcatctattattttcaggctttgggggaaaacatgtccttccaaagtctatggtgcaatgcattcaaatctttaagagaaattaaaaataacagaataggcaaaataccttttatctggttttttttttactttgattagcttcttttactaacatgttttgtcttaatataatttatggcaacttgaaatgcatactctaattcttctcaaactaaatatagtagaggctctatgacatttctttggataccagaatccctttagaaattaattgatttgccttttacataaaaaagttttatttatttatgtttttgacgggtcaggtctctctaggaacattccaaaagcacagagacaagaactattctagcactgcaataagaccaaaaattaatttctatgcattttcagaggtaactttaaatcaccattttaaagttatttttagaacatttgaaaggataagttatcttagactacaacatttaatgaaatactataattaaaatggataatcaataaattttcattcaattttggaagacaaaacaacacgaaaagcaactgaatcaacaggagtttcggggacctttggcagacagttaataagatgaaaaatctgtgaatgaaactcgtgggtgaagagtagacagatctcttcgttcccagctagacctcagtggcgaccatttgagagtgattttaatcagaaaccttgactgaca

SEQ ID NO: 585869 - DNA, 4001 bp, Homo sapiens
aagttaacagccgcaccagaaagacaagaaaacaagtctacagttaccaagttatttaagaagaatcctactataaaaatactcaaaaaagtcacatggcctgttcccaacatttagcagctgttgctactatcatatacttatccatcaggccagcatgcaagccagcctttagctcctaaccttctcttcttccctccctctatacatcttaacctctacttcaaacttaaattaaccaactatcacaacaagcaaaactccagtacccacacttattggaaaccacaaaaagttgctattttagctcaaagccagaaatccaatagaaaaatttcataatgtaattttgcaagtgttagttcttacctgcaacgtaaatttcatctagtttttcagcaactttctgtggtaaaccagcatcaagcaatgtctgaaaattttctgaatggataactgcagaagtagtatccatgggctcttcagtaccatttccattaacatgttctgtagccatgtttccagagatctgttcaaacgcaataagcaaaattaaactaggatcttcaaaaagaatacaagacaatatgagagccccatctttactttctctaccatttactacaccagctagcctatacctccctttaaaaaagccttacagtcactatcgcctgacaagccagatttggagcacagggcacagaaggaccgattcaccatattcttcctcagcaccacccctgactcacctgctaacactccctaggaaaaaccatattacaaatagagcccaatcagcacgggtacgagccagcgtgccacatgcagctgtgcccgttcggaaaatgaggtgtgtgtggagaaagcaaaactgggctcctctctctcaaagataaacccccaaagtgcgcgcttttcccgcctgccgcttatagatcggtaacaacagccagcgaagaacaaagcgctcatacaagccaccttcccaccacccaatttctccaccctttaaccccgcaccccaaagcccgcccctgactccgcacccagagcggcagtctcaccactgcggccgccaggagcccattagaaacacgtgctctgcgccttccaatgtcctacaacttccttcaacggcaacccaacgaatcccaaaccaagacgaccatcactggttcccaacatcaacccgaagccgcggtcggagcccccagaaagctgcagcagcacaatctctcccctgaacaccgaggcaccggcggcgccaggccacaggctctccccgccccccagcgccgccgtctccgccgtgacacatggctctccgcccctggcgctccccgggcgccgacgacccccggccgcccgcccggccgagacgtgacccgtggcgcgctgtgcaggtccccaccccttacccttccgtgcagtgactgcgacgcctgcccggcaacccagcagcgtgagggcgttcagcggacggctcaacgcccgcgggaccgtgagcaccgcccaagctcgccgcacggctgcaggacaagacccactcctctccgcccactcccgcgccgcggcgaccgccacgacagcaccaactctgaagccgctcgcggtccgtgcgggccacgggaccgtggaggcgcctcctcccaaagcgccgcagacaaagcccgaaccgcagcagcacatggaaaggaggaagtggcggcgcgggccgcggcctactcccaggcagccccagtcaacgtgctcttctccccattggaatccattttccagaaaagccggtttctacccgcgccaccctcccccagctcactccacaatgtcatggagctcccctcccacacccaggttctggcagtcgttacctccccgttgggctgaggcggagaaatcctgtccgatggtatcgggttgcgggaaacgcgtgctcgctgctccctgtgtccggcgcgagtggagctgttgtaaaatggcggccgaagctcacgccgctggcagcaaacccgatccagttccactcgcctccgagcgcgctcccggtgcgcgcgcgcgcccccgcgtgacccccccttcccttcccttcccttccctcccctccctcgcgcgtccgcttcactcactccctcagcccctgccctcctccagctcctccttctccccctaccaccaccaccaccactagcctctgtccgccttctctcggcctttcttattcccgccccccgctcctttaccccactgctcccactcccctctgcggtcgctcaggcacgagtggccgcctttccccttctggctcgcacgctccctcactccctccctcgctcgctcgcactctcggcccggtcccccagtccctgccgagtcggctcctctctttctctctcccgcgctgacgtgacaacgtagcctacgcctcgggacgcgcgcccgcgggctccgcccccacgccgcgccgccttccccgctcctcaccccttgggttgggggtgggggaggcacaagaccccgcccttccgctccgacggtggcggccgaggggccgagactgaatgaaaggcccgccccttcccctcccgacactccccctccctctcccctccaggcggggcgggccggctcagcgtgtcccactcgttttcctttgtcaggagactggcatctccccaccccgccccaccccaccccctccccgcgacaccatgcgcacgccacccccaccgagctcccgcccgccccatccctgcccggtccggggctggcggggcagagtgctgtgggcgctgagtgcgactgccgcttcccggagggcacccaccggtctgtgcgcgcccggcccccgcccccggctccgcggccgcgtagccgttccaggcggtgtccacgccgctgccaccgccccgcgctctcctcctcgggaagctgcaggcgcacgtgtcccccggggcggggcgaggcagacaatggggccaagggggaggggagcggcgcggagacccgcggacctttggtccgccggactggcggtactcgagtgcgagagtcgcccttggagactcgatctccccaactggacagtgggccctcctcgcagccgcgcggctccgctttcacgggaaccttcggcgaagggaggggcgccccaggcttggacgcggaaaccccggctgcttttgaagggggaacggggctggctccagtggagcgaggagcggctcctgccttgggatgacacgaaggccagatttggaagcgaaaccgcccggtggtgaagggttgtgcaatactccgtttcagtccctggccttttaagcagttaagggcttcctcctggcacagtttgagcaacttgaaacagcacaaagctgcgtggttagaacaactttgagaaaaatgtctgtgtttcttttaaaaaaaaccttggcaactaaatcttctgtgaaatgacgtttcctttataatcgtttactaggtacaagaaagacaagacaaaggcatttgaattacagacgcgatatggatactaattttatccagggcagctgtaatgaaaaatagaaacaatgtccttttgattaaaaagcttatttttaagagcttactggttccccagatgagctctgtgctatgataacaaatcagtggtttgaggaaaagttagataaacactcttcaaagtgcacaagcacataaaatgctagattattttcatagctacttggatcagatatgaagtatgttttagccaaagcaccacatagccaacctgtttagtaaggatttgagatctccaccaccccagattccttactatcaaacatatgtgatattcagctgcttcagccatagggatttttgttcacaatgcagaggtcgtggttaatgatatacatgaaaaacaaaatgtttaatagaaaactatgaaaataagagtcataccatggattaaacaagaataaaaattggccgggcgcggtggctcacgcctgtaa

SEQ ID NO: 585870 - DNA, 4001 bp, Homo sapiens
aacctctactcaatttcaaataccaccagaaaaagttaacagccgcaccagaaagacaagaaaacaagtctacagttaccaagttatttaagaagaatcctactataaaaatactcaaaaaagtcacatggcctgttcccaacatttagcagctgttgctactatcatatacttatccatcaggccagcatgcaagccagcctttagctcctaaccttctcttcttccctccctctatacatcttaacctctacttcaaacttaaattaaccaactatcacaacaagcaaaactccagtacccacacttattggaaaccacaaaaagttgctattttagctcaaagccagaaatccaatagaaaaatttcataatgtaattttgcaagtgttagttcttacctgcaacgtaaatttcatctagtttttcagcaactttctgtggtaaaccagcatcaagcaatgtctgaaaattttctgaatggataactgcagaagtagtatccatgggctcttcagtaccatttccattaacatgttctgtagccatgtttccagagatctgttcaaacgcaataagcaaaattaaactaggatcttcaaaaagaatacaagacaatatgagagccccatctttactttctctaccatttactacaccagctagcctatacctccctttaaaaaagccttacagtcactatcgcctgacaagccagatttggagcacagggcacagaaggaccgattcaccatattcttcctcagcaccacccctgactcacctgctaacactccctaggaaaaaccatattacaaatagagcccaatcagcacgggtacgagccagcgtgccacatgcagctgtgcccgttcggaaaatgaggtgtgtgtggagaaagcaaaactgggctcctctctctcaaagataaacccccaaagtgcgcgcttttcccgcctgccgcttatagatcggtaacaacagccagcgaagaacaaagcgctcatacaagccaccttcccaccacccaatttctccaccctttaaccccgcaccccaaagcccgcccctgactccgcacccagagcggcagtctcaccactgcggccgccaggagcccattagaaacacgtgctctgcgccttccaatgtcctacaacttccttcaacggcaacccaacgaatcccaaaccaagacgaccatcactggttcccaacatcaacccgaagccgcggtcggagcccccagaaagctgcagcagcacaatctctcccctgaacaccgaggcaccggcggcgccaggccacaggctctccccgccccccagcgccgccgtctccgccgtgacacatggctctccgcccctggcgctccccgggcgccgacgacccccggccgcccgcccggccgagacgtgacccgtggcgcgctgtgcaggtccccaccccttacccttccgtgcagtgactgcgacgcctgcccggcaacccagcagcgtgagggcgttcagcggacggctcaacgcccgcgggaccgtgagcaccgcccaagctcgccgcacggctgcaggacaagacccactcctctccgcccactcccgcgccgcggcgaccgccacgacagcaccaactctgaagccgctcgcggtccgtgcgggccacgggaccgtggaggcgcctcctcccaaagcgccgcagacaaagcccgaaccgcagcagcacatggaaaggaggaagtggcggcgcgggccgcggcctactcccaggcagccccagtcaacgtgctcttctccccattggaatccattttccagaaaagccggtttctacccgcgccaccctcccccagctcactccacaatgtcatggagctcccctcccacacccaggttctggcagtcgttacctccccgttgggctgaggcggagaaatcctgtccgatggtatcgggttgcgggaaacgcgtgctcgctgctccctgtgtccggcgcgagtggagctgttgtaaaatggcggccgaagctcacgccgctggcagcaaacccgatccagttccactcgcctccgagcgcgctcccggtgcgcgcgcgcgcccccgcgtgacccccccttcccttcccttcccttccctcccctccctcgcgcgtccgcttcactcactccctcagcccctgccctcctccagctcctccttctccccctaccaccaccaccaccactagcctctgtccgccttctctcggcctttcttattcccgccccccgctcctttaccccactgctcccactcccctctgcggtcgctcaggcacgagtggccgcctttccccttctggctcgcacgctccctcactccctccctcgctcgctcgcactctcggcccggtcccccagtccctgccgagtcggctcctctctttctctctcccgcgctgacgtgacaacgtagcctacgcctcgggacgcgcgcccgcgggctccgcccccacgccgcgccgccttccccgctcctcaccccttgggttgggggtgggggaggcacaagaccccgcccttccgctccgacggtggcggccgaggggccgagactgaatgaaaggcccgccccttcccctcccgacactccccctccctctcccctccaggcggggcgggccggctcagcgtgtcccactcgttttcctttgtcaggagactggcatctccccaccccgccccaccccaccccctccccgcgacaccatgcgcacgccacccccaccgagctcccgcccgccccatccctgcccggtccggggctggcggggcagagtgctgtgggcgctgagtgcgactgccgcttcccggagggcacccaccggtctgtgcgcgcccggcccccgcccccggctccgcggccgcgtagccgttccaggcggtgtccacgccgctgccaccgccccgcgctctcctcctcgggaagctgcaggcgcacgtgtcccccggggcggggcgaggcagacaatggggccaagggggaggggagcggcgcggagacccgcggacctttggtccgccggactggcggtactcgagtgcgagagtcgcccttggagactcgatctccccaactggacagtgggccctcctcgcagccgcgcggctccgctttcacgggaaccttcggcgaagggaggggcgccccaggcttggacgcggaaaccccggctgcttttgaagggggaacggggctggctccagtggagcgaggagcggctcctgccttgggatgacacgaaggccagatttggaagcgaaaccgcccggtggtgaagggttgtgcaatactccgtttcagtccctggccttttaagcagttaagggcttcctcctggcacagtttgagcaacttgaaacagcacaaagctgcgtggttagaacaactttgagaaaaatgtctgtgtttcttttaaaaaaaaccttggcaactaaatcttctgtgaaatgacgtttcctttataatcgtttactaggtacaagaaagacaagacaaaggcatttgaattacagacgcgatatggatactaattttatccagggcagctgtaatgaaaaatagaaacaatgtccttttgattaaaaagcttatttttaagagcttactggttccccagatgagctctgtgctatgataacaaatcagtggtttgaggaaaagttagataaacactcttcaaagtgcacaagcacataaaatgctagattattttcatagctacttggatcagatatgaagtatgttttagccaaagcaccacatagccaacctgtttagtaaggatttgagatctccaccaccccagattccttactatcaaacatatgtgatattcagctgcttcagccatagggatttttgttcacaatgcagaggtcgtggttaatgatatacatgaaaaacaaaatgtttaatagaaaactatgaaaataagagtcataccatggattaaacaagaataaa

SEQ ID NO: 585871 - DNA, 4001 bp, Homo sapiens
acagctaactccatataccaaccttttccatattctaggctttccctgtttccacaccactacaacaatgctcaaggcctatacccttaactgattttcttaaaccatacgcttggctcaagagcactggcacactacaaagcacaccaggttaaaaagtaatacaatcaccacattgtctataaattagaaaactcaccaatataaatatcaaaaccaagctgaatttgaagccattcaccatgattttaaaccaaaaaaaaagcctcctcctcctagcctcagtttctcatctacatacccacactaaacaatcttattgtcaaagctgctttgagaaatagtctaataatccatactgatggaagtggagggcagcagggttaacattctaaattcattggggtttgagactcctaaaaaaaaaagccagttgccaaatgtacattctccatcagtatttcaactgtcaataagctggctttgcagcttttcaaaaaatattctagaggtatcatgggtgtgtttctttatactaggactaccaatagaacagatttaaacatcagtagctggataacatgataaacttcacagcaaattgctttagaaacaaatagtttaaaaaaacttaaaaaaaggaattaggaaagattgatgaattatctcaacatctaacatacatccatttcatacccaaggaatatttaccaaaattaggaaacagttaaaatgactttaaaactaaagggagtatagaaagacataccttaatttttgcctcatctggtcctttactagaatctgctactttggtcccttgtttttctctctgcctgtaagtcttcatgactccacataaaaaggcacttttgttctgcaaaaaaatgttccattaatatttaacaataaccatatctgagtctaataaaattcagcagatagtatcaaaactactcaaattttttaattttcacattgacattaacattacctgaacatgagagagatcactgtctttaaactgttgaagaactgccaatgcaccgtcttcattgaattcttttaaagcttcaatagctctttcatctaaatcactatgtgcaactagccctgaaaaaaataaaagttatcagcttttaatatttttagaaaagattttttagagaagactatgttggcaatacaggtacatgtgtgcctttacaattcttctactcccctcatctatacctgaaaaaaaaaaaacacacacttcagccactctgaactgaatcctgaactaaatatgccctaccaaccacacttacaataatcagctaacttcttttacatcttttatctccaaagtctgataactctgaacactacggtatttttacagtatacagacttacgaatcctagaatcaaccaacaaagtaccaagcatgacaactgaacctctactcaatttcaaataccaccagaaaaagttaacagccgcaccagaaagacaagaaaacaagtctacagttaccaagttatttaagaagaatcctactataaaaatactcaaaaaagtcacatggcctgttcccaacatttagcagctgttgctactatcatatacttatccatcaggccagcatgcaagccagcctttagctcctaaccttctcttcttccctccctctatacatcttaacctctacttcaaacttaaattaaccaactatcacaacaagcaaaactccagtacccacacttattggaaaccacaaaaagttgctattttagctcaaagccagaaatccaatagaaaaatttcataatgtaattttgcaagtgttagttcttacctgcaacgtaaatttcatctagtttttcagcaactttctgtggtaaaccagcatcaagcaatgtctgaaaattttctgaatggataactgcagaagtagtatccatgggctcttcagtaccatttccattaacatgttctgtagccatgtttccagagatctgttcaaacgcaataagcaaaattaaactaggatcttcaaaaagaatacaagacaatatgagagccccatctttactttctctaccatttactacaccagctagcctatacctccctttaaaaaagccttacagtcactatcgcctgacaagccagatttggagcacagggcacagaaggaccgattcaccatattcttcctcagcaccacccctgactcacctgctaacactccctaggaaaaaccatattacaaatagagcccaatcagcacgggtacgagccagcgtgccacatgcagctgtgcccgttcggaaaatgaggtgtgtgtggagaaagcaaaactgggctcctctctctcaaagataaacccccaaagtgcgcgcttttcccgcctgccgcttatagatcggtaacaacagccagcgaagaacaaagcgctcatacaagccaccttcccaccacccaatttctccaccctttaaccccgcaccccaaagcccgcccctgactccgcacccagagcggcagtctcaccactgcggccgccaggagcccattagaaacacgtgctctgcgccttccaatgtcctacaacttccttcaacggcaacccaacgaatcccaaaccaagacgaccatcactggttcccaacatcaacccgaagccgcggtcggagcccccagaaagctgcagcagcacaatctctcccctgaacaccgaggcaccggcggcgccaggccacaggctctccccgccccccagcgccgccgtctccgccgtgacacatggctctccgcccctggcgctccccgggcgccgacgacccccggccgcccgcccggccgagacgtgacccgtggcgcgctgtgcaggtccccaccccttacccttccgtgcagtgactgcgacgcctgcccggcaacccagcagcgtgagggcgttcagcggacggctcaacgcccgcgggaccgtgagcaccgcccaagctcgccgcacggctgcaggacaagacccactcctctccgcccactcccgcgccgcggcgaccgccacgacagcaccaactctgaagccgctcgcggtccgtgcgggccacgggaccgtggaggcgcctcctcccaaagcgccgcagacaaagcccgaaccgcagcagcacatggaaaggaggaagtggcggcgcgggccgcggcctactcccaggcagccccagtcaacgtgctcttctccccattggaatccattttccagaaaagccggtttctacccgcgccaccctcccccagctcactccacaatgtcatggagctcccctcccacacccaggttctggcagtcgttacctccccgttgggctgaggcggagaaatcctgtccgatggtatcgggttgcgggaaacgcgtgctcgctgctccctgtgtccggcgcgagtggagctgttgtaaaatggcggccgaagctcacgccgctggcagcaaacccgatccagttccactcgcctccgagcgcgctcccggtgcgcgcgcgcgcccccgcgtgacccccccttcccttcccttcccttccctcccctccctcgcgcgtccgcttcactcactccctcagcccctgccctcctccagctcctccttctccccctaccaccaccaccaccactagcctctgtccgccttctctcggcctttcttattcccgccccccgctcctttaccccactgctcccactcccctctgcggtcgctcaggcacgagtggccgcctttccccttctggctcgcacgctccctcactccctccctcgctcgctcgcactctcggcccggtcccccagtccctgccgagtcggctcctctctttctctctcccgcgctgacgtgacaacgtagcctacgcctcgggacgcgcgcccgcgggctccgcccccacgccgcgccgccttccccgctcctcaccccttgggttgggggtgggggaggcacaagaccccgcccttccgct

SEQ ID NO: 585872 - DNA, 4001 bp, Homo sapiens
tttctgtggtaaaccagcatcaagcaatgtctgaaaattttctgaatggataactgcagaagtagtatccatgggctcttcagtaccatttccattaacatgttctgtagccatgtttccagagatctgttcaaacgcaataagcaaaattaaactaggatcttcaaaaagaatacaagacaatatgagagccccatctttactttctctaccatttactacaccagctagcctatacctccctttaaaaaagccttacagtcactatcgcctgacaagccagatttggagcacagggcacagaaggaccgattcaccatattcttcctcagcaccacccctgactcacctgctaacactccctaggaaaaaccatattacaaatagagcccaatcagcacgggtacgagccagcgtgccacatgcagctgtgcccgttcggaaaatgaggtgtgtgtggagaaagcaaaactgggctcctctctctcaaagataaacccccaaagtgcgcgcttttcccgcctgccgcttatagatcggtaacaacagccagcgaagaacaaagcgctcatacaagccaccttcccaccacccaatttctccaccctttaaccccgcaccccaaagcccgcccctgactccgcacccagagcggcagtctcaccactgcggccgccaggagcccattagaaacacgtgctctgcgccttccaatgtcctacaacttccttcaacggcaacccaacgaatcccaaaccaagacgaccatcactggttcccaacatcaacccgaagccgcggtcggagcccccagaaagctgcagcagcacaatctctcccctgaacaccgaggcaccggcggcgccaggccacaggctctccccgccccccagcgccgccgtctccgccgtgacacatggctctccgcccctggcgctccccgggcgccgacgacccccggccgcccgcccggccgagacgtgacccgtggcgcgctgtgcaggtccccaccccttacccttccgtgcagtgactgcgacgcctgcccggcaacccagcagcgtgagggcgttcagcggacggctcaacgcccgcgggaccgtgagcaccgcccaagctcgccgcacggctgcaggacaagacccactcctctccgcccactcccgcgccgcggcgaccgccacgacagcaccaactctgaagccgctcgcggtccgtgcgggccacgggaccgtggaggcgcctcctcccaaagcgccgcagacaaagcccgaaccgcagcagcacatggaaaggaggaagtggcggcgcgggccgcggcctactcccaggcagccccagtcaacgtgctcttctccccattggaatccattttccagaaaagccggtttctacccgcgccaccctcccccagctcactccacaatgtcatggagctcccctcccacacccaggttctggcagtcgttacctccccgttgggctgaggcggagaaatcctgtccgatggtatcgggttgcgggaaacgcgtgctcgctgctccctgtgtccggcgcgagtggagctgttgtaaaatggcggccgaagctcacgccgctggcagcaaacccgatccagttccactcgcctccgagcgcgctcccggtgcgcgcgcgcgcccccgcgtgacccccccttcccttcccttcccttccctcccctccctcgcgcgtccgcttcactcactccctcagcccctgccctcctccagctcctccttctccccctaccaccaccaccaccactagcctctgtccgccttctctcggcctttcttattcccgccccccgctcctttaccccactgctcccactcccctctgcggtcgctcaggcacgagtggccgcctttccccttctggctcgcacgctccctcactccctccctcgctcgctcgcactctcggcccggtcccccagtccctgccgagtcggctcctctctttctctctcccgcgctgacgtgacaacgtagcctacgcctcgggacgcgcgcccgcgggctccgcccccacgccgcgccgccttccccgctcctcaccccttgggttgggggtgggggaggcacaagaccccgcccttccgctccgacggtggcggccgaggggccgagactgaatgaaaggcccgccccttcccctcccgacactccccctccctctcccctccaggcggggcgggccggctcagcgtgtcccactcgttttcctttgtcaggagactggcatctccccaccccgccccaccccaccccctccccgcgacaccatgcgcacgccacccccaccgagctcccgcccgccccatccctgcccggtccggggctggcggggcagagtgctgtgggcgctgagtgcgactgccgcttcccggagggcacccaccggtctgtgcgcgcccggcccccgcccccggctccgcggccgcgtagccgttccaggcggtgtccacgccgctgccaccgccccgcgctctcctcctcgggaagctgcaggcgcacgtgtcccccggggcggggcgaggcagacaatggggccaagggggaggggagcggcgcggagacccgcggacctttggtccgccggactggcggtactcgagtgcgagagtcgcccttggagactcgatctccccaactggacagtgggccctcctcgcagccgcgcggctccgctttcacgggaaccttcggcgaagggaggggcgccccaggcttggacgcggaaaccccggctgcttttgaagggggaacggggctggctccagtggagcgaggagcggctcctgccttgggatgacacgaaggccagatttggaagcgaaaccgcccggtggtgaagggttgtgcaatactccgtttcagtccctggccttttaagcagttaagggcttcctcctggcacagtttgagcaacttgaaacagcacaaagctgcgtggttagaacaactttgagaaaaatgtctgtgtttcttttaaaaaaaaccttggcaactaaatcttctgtgaaatgacgtttcctttataatcgtttactaggtacaagaaagacaagacaaaggcatttgaattacagacgcgatatggatactaattttatccagggcagctgtaatgaaaaatagaaacaatgtccttttgattaaaaagcttatttttaagagcttactggttccccagatgagctctgtgctatgataacaaatcagtggtttgaggaaaagttagataaacactcttcaaagtgcacaagcacataaaatgctagattattttcatagctacttggatcagatatgaagtatgttttagccaaagcaccacatagccaacctgtttagtaaggatttgagatctccaccaccccagattccttactatcaaacatatgtgatattcagctgcttcagccatagggatttttgttcacaatgcagaggtcgtggttaatgatatacatgaaaaacaaaatgtttaatagaaaactatgaaaataagagtcataccatggattaaacaagaataaaaattggccgggcgcggtggctcacgcctgtaatcccagcactttggaaggccgaggcgggcggatcacaaggtcaggagatcgagaccatcctggctaacacggtgaaaccccgtctctactaaaaatacaaaaaaattagccaggcgtggtggcgggcgcctgtagtcccagctaccctggaggctgaggcaggagaatggcgttaacccgggaggcggagcttgcagtgagcggagatcgcgccactgcactccagccaggacgacagagcgagactccgtctcaaaaaaaaaaagaataaaaatgagtctgaaacatgtaacactttgtttagaccttcctgggtattaaaaaaaattttttaaagtgccttaacctgggcaaagctcccaaattaaaatctctagctgttctctgacatctaattcctttc

SEQ ID NO: 585873 - DNA, 4001 bp, Homo sapiens
agattagaccacaaagaagtacacatttaagaggagacacacagaggacctcgcagaggcgtttgggccctgcatgcctgtcacattcagaccacagggtgtggctgcagtagctagagctggagttgtgaaaatgccaccaaccttgcccagttatgggcttcctacatcctgtgacagtcacacctcctttcatttccaagatgctgtgtgtgcagcatagttatcagaaagtaggcccagtgcagcaccaaacaattcttgaacatttttaaatggcaaactagctttttccaatctcctctccctggcaggaaggactcaagtaaaaaagagttcttaaatgaggtcaatgaggacagaagaaaaccagtttgtgaaaatcattagttcagaaagatgaaagtgagactataaaataagagctaggcaaatatttccaaagcctagcaaatattgttatctgggtcagtctgaagctgtttcttaatcttcagcatgaaacatattaagttagtatagatctctcacattttgttctaaatctgccacaaagtaatgaacagaaaagaaaaaatagatatgtattttgtcacactgttccggtgatatcaggaactttttagccatactacaaatcttttttcaccatggggaataaaaagcctctcaaagaacaatcgtcatgactcgtgattaaattcgcattttatgaagatgtaggtcatattaatgacctttgcctcattgaaaattattatactttctcttgcataggtctggcttctgtatacgaatgttgtctttaggaaagtcattctcagatgaagacaaaaaatggatgggcattaaagaagagaaaaataattcatttttaactttcttaacattcacaggaacatttcagatacaagttttccaccccaaaacgaaaagctcagaaatgaacattgtgggatgctaaggcttcattgctgatatttccctctgggctggacctgactctatttacggaagggggcagaacttccagcatccaaagtctgggatcccagtcagcacacccagcctgccttcccaaggggcttcttcctgtgcggctgatggctgcttcgttttgcacggatgcctgcccgttgggatgcacctggccgcctgtgcaccaccatttcccagaactcctccgccagcaatgcaagatctctctatgtgaaacgtatctttataaagaggagacgaaagttctcttgccctctagtgcaggctctgccgggaagcaactgcaccatgacagcgccgctggagtctgacgcgccagggcctccgcgcagccttcaagccatttccctcccccagcccttcctaaaatagtcagggggtggaggaagggaggctcctagaatctgttcaacgccctacctctcccatctgatagtagcaacagtaccgaccatcacaataagaggctggctgccttttgcttctgcaccattggagcccaggagatgtgccacaagcggaaatgacaactcagagagggggatattaatagggacatctacgtacgagatgcaaagaggctccccaacctcctagtctccttatctatgagtatcgcacacgtacacacatcactgccaccaccccctcccatcaagcacgcagagccccagcgtgcaggcacaaacttgctgacaatttgtctgcaatgtgttcgtcttgcacctctctctcctctccctgtctctgtctctccctgtctcccagtctctgtctttccttttaccttctctctcggcctcgttcagtttcccagcagcaaggcgaagcgagcgaacgcttcctcccggctctctgcgcccaggctcggcgggaccccggggatgcgcggctgtccgcccgccctgtcgccgggatcgggcgcggtctgcaggactgcgggagcccagccgccctggtgacagaggacaacaatctcagcccgctgcggccggcggccgcggcccggcgcccgcgctcaccctggctggctcgcccacactcactcccgcgccgggctgctcagccgcgctccccgccctccgcgaccggttcctcctcccggctgctcgctggggggtgaggcctcccccttcgccctcccccacgcatctactgctcctgtcgggaaggaaggtcgcccaggccggttcagcctctgggcagggtccctgcaccgccctggcccgccacaccccctccccggctccgtgccccgcgccccgcgcccggctccgggatgcgccggtgcctggaagagctgggggcggggacccggaggctcgcaggcttccctacctcctggagatgcacggccttgggcgtttctccgcagctgcaaagctgtgctgtgacccacccgctcagcgagcctttataccgggaccacctcccgggggtcgaggtgggaaggaaatgtccctgagagccgggacgcgctgcctccgctgcctggaggagctgcgctgtcctgccagctaacttttgcccacggtttccactgcccgggtgacctttctgagcggaacctatcctgaaaggctgggaggttccctgatggtcccaggaagggcgtgatgcagagcaaagagcaaaacccgctggctcctttttcatcaacttccgaaagatcctaaatcgttttggctgccaagtcagtagcaaataacttaatttgagggagactggtcaggctttatagatcttttttaatgttatgtataaagtttagacttcttgagaaagcgcttgacatctttaattcttgactgtttattatgatgattctaaaaaccacttttaggttcttcaggtgcactgtatgcaccctgtacattgcggagccatttgtatctttggccacaagtccttctcgtggtgtaagagatcttggtgttgcctggtagcattcaggagaatttattttgttgtggttttatggtatccaggcaaagtcaaacacagtctctcttcaccaacagtgaagtccaagtccaacaggatgattgcagctaaaataatcgaagccatgttgcaataatcttaaaagtaataatcccccccttgaatctccaatctgaacaaaacagtcatttatcctctaaatttgctgaaaggaaggagcagtttataaagtagatgaagtttctctttgctgcctgcctttcccttacctgctgccaacattcccactgcctagctttccattttcttcaaattctccttcttctggatcgtgtcaaaataataacatctgaaacaaatctggtaaaccaatctgatgtgttcctcttctttgtgctgacttttgtttttttttagagagagaaaccaaacaatggatctctatttgcagaacttgctacctccaaaagttgggcctggaggaggagtgtttgggatcactctcaatgtatgccctgcctctgcctgagggcaacaatcctggggcacccccagagccccttgtggagacaaccaccagagcataattattccaggtcagccctctgtgcccagtggccacaaaatggggtccagatttccaggcttgccactcagaagaaacagatcagaatggctcagctcaccctctcaatccctaccttcatagaatcaatccaccctgccggcttttgaagatgggtagaaagttattgtgccaactttgccattctttttgtttgtttgtttgtttgagatggagtttcgctcttgttccccaggctggggtgcaatggtgcaatctcggctcactgcaacctccgcctcccaggttcaagcaattatcctgcctcagcctcctgagtagctgagattacagggatgcgtcaccacacctggctaattttgtatttttagtagagacagggttccttcatgttggtcaggctggtctcaaacttccgacctcaggtgacccatccagctcggcctcccaaagtgctgggattacaggtgtg

SEQ ID NO: 585874 - DNA, 4001 bp, Homo sapiens
ccacaaagtaatgaacagaaaagaaaaaatagatatgtattttgtcacactgttccggtgatatcaggaactttttagccatactacaaatcttttttcaccatggggaataaaaagcctctcaaagaacaatcgtcatgactcgtgattaaattcgcattttatgaagatgtaggtcatattaatgacctttgcctcattgaaaattattatactttctcttgcataggtctggcttctgtatacgaatgttgtctttaggaaagtcattctcagatgaagacaaaaaatggatgggcattaaagaagagaaaaataattcatttttaactttcttaacattcacaggaacatttcagatacaagttttccaccccaaaacgaaaagctcagaaatgaacattgtgggatgctaaggcttcattgctgatatttccctctgggctggacctgactctatttacggaagggggcagaacttccagcatccaaagtctgggatcccagtcagcacacccagcctgccttcccaaggggcttcttcctgtgcggctgatggctgcttcgttttgcacggatgcctgcccgttgggatgcacctggccgcctgtgcaccaccatttcccagaactcctccgccagcaatgcaagatctctctatgtgaaacgtatctttataaagaggagacgaaagttctcttgccctctagtgcaggctctgccgggaagcaactgcaccatgacagcgccgctggagtctgacgcgccagggcctccgcgcagccttcaagccatttccctcccccagcccttcctaaaatagtcagggggtggaggaagggaggctcctagaatctgttcaacgccctacctctcccatctgatagtagcaacagtaccgaccatcacaataagaggctggctgccttttgcttctgcaccattggagcccaggagatgtgccacaagcggaaatgacaactcagagagggggatattaatagggacatctacgtacgagatgcaaagaggctccccaacctcctagtctccttatctatgagtatcgcacacgtacacacatcactgccaccaccccctcccatcaagcacgcagagccccagcgtgcaggcacaaacttgctgacaatttgtctgcaatgtgttcgtcttgcacctctctctcctctccctgtctctgtctctccctgtctcccagtctctgtctttccttttaccttctctctcggcctcgttcagtttcccagcagcaaggcgaagcgagcgaacgcttcctcccggctctctgcgcccaggctcggcgggaccccggggatgcgcggctgtccgcccgccctgtcgccgggatcgggcgcggtctgcaggactgcgggagcccagccgccctggtgacagaggacaacaatctcagcccgctgcggccggcggccgcggcccggcgcccgcgctcaccctggctggctcgcccacactcactcccgcgccgggctgctcagccgcgctccccgccctccgcgaccggttcctcctcccggctgctcgctggggggtgaggcctcccccttcgccctcccccacgcatctactgctcctgtcgggaaggaaggtcgcccaggccggttcagcctctgggcagggtccctgcaccgccctggcccgccacaccccctccccggctccgtgccccgcgccccgcgcccggctccgggatgcgccggtgcctggaagagctgggggcggggacccggaggctcgcaggcttccctacctcctggagatgcacggccttgggcgtttctccgcagctgcaaagctgtgctgtgacccacccgctcagcgagcctttataccgggaccacctcccgggggtcgaggtgggaaggaaatgtccctgagagccgggacgcgctgcctccgctgcctggaggagctgcgctgtcctgccagctaacttttgcccacggtttccactgcccgggtgacctttctgagcggaacctatcctgaaaggctgggaggttccctgatggtcccaggaagggcgtgatgcagagcaaagagcaaaacccgctggctcctttttcatcaacttccgaaagatcctaaatcgttttggctgccaagtcagtagcaaataacttaatttgagggagactggtcaggctttatagatcttttttaatgttatgtataaagtttagacttcttgagaaagcgcttgacatctttaattcttgactgtttattatgatgattctaaaaaccacttttaggttcttcaggtgcactgtatgcaccctgtacattgcggagccatttgtatctttggccacaagtccttctcgtggtgtaagagatcttggtgttgcctggtagcattcaggagaatttattttgttgtggttttatggtatccaggcaaagtcaaacacagtctctcttcaccaacagtgaagtccaagtccaacaggatgattgcagctaaaataatcgaagccatgttgcaataatcttaaaagtaataatcccccccttgaatctccaatctgaacaaaacagtcatttatcctctaaatttgctgaaaggaaggagcagtttataaagtagatgaagtttctctttgctgcctgcctttcccttacctgctgccaacattcccactgcctagctttccattttcttcaaattctccttcttctggatcgtgtcaaaataataacatctgaaacaaatctggtaaaccaatctgatgtgttcctcttctttgtgctgacttttgtttttttttagagagagaaaccaaacaatggatctctatttgcagaacttgctacctccaaaagttgggcctggaggaggagtgtttgggatcactctcaatgtatgccctgcctctgcctgagggcaacaatcctggggcacccccagagccccttgtggagacaaccaccagagcataattattccaggtcagccctctgtgcccagtggccacaaaatggggtccagatttccaggcttgccactcagaagaaacagatcagaatggctcagctcaccctctcaatccctaccttcatagaatcaatccaccctgccggcttttgaagatgggtagaaagttattgtgccaactttgccattctttttgtttgtttgtttgtttgagatggagtttcgctcttgttccccaggctggggtgcaatggtgcaatctcggctcactgcaacctccgcctcccaggttcaagcaattatcctgcctcagcctcctgagtagctgagattacagggatgcgtcaccacacctggctaattttgtatttttagtagagacagggttccttcatgttggtcaggctggtctcaaacttccgacctcaggtgacccatccagctcggcctcccaaagtgctgggattacaggtgtgagccactgcacctggccaccaacttgctattctacacgttaagcaactactttcttgggtttacttacttgagaagtgagccacttaaaacacaagcctgaaacattgcttccaccaactaaaactcctctactaggcctaatctctgttctcacaggctgagacagacagaagcatagagctgtcttgctggcattgattccctatacagctgaaatcccattctcagctaaactttatcctctgtagaaggactaagcacattttagagttttgcaaagggcttgtcagtttcacacaccccagggaagggtgttgtagctccatttactcaacagctattgcttgaacacttaccacataacaaatattgtcctaagtgctggggctaccgtggtaagcaaactctgaccgggctcttgccttcatggagcttacagtatgatgggggaagagccagacattcatcagagaaccacacaaatacttataaaaccccattctccaagcaaaggcaaatgttgctatgagagctttcaagaacggga

SEQ ID NO: 585875 - DNA, 4001 bp, Homo sapiens
cgatgaaccctcagaatgtccaccatttagaaaccacatactttgaaactctatctcaacccatctcagagactaactaatgttctctagatacagagatcaccaatacctagcctctgaaactacagacattgcaggcaacatgcccaccgcacttagacacttggtatacccagaggagaaatctgttgatacacataagcatttggggaaagggctggttcaggctgcagccaagggaggcgggttagacttcagagggcatctttctcctggcagcagggaacttaggaacaactctagaaacacacacacacatactgtctggacttggtgaagaatgattctgggaggcagatgcaagaggcagagcaacatggctgagaaacgggaaatttttactaggatgagaaatccctcaagggctgagatggggatcccttgttctaatcatcaaaacctgtgtctttgtaccccaaatctccaacaccccaataagtagaggagacaagaaaagagaaatgataataagagttgaggtattaagggaaagtgggtaggcacagacttgtggtgacaaggaatggtctgggagacaaataataggagtagatagaaaaggaggcagaaatgatggtaaatgcccaggggcaagggaatacacctgaagggctcgactggacatgtgtcagagcaaaggaggcagacctaatgcggaggctatgagaaggggtcaagacggactagtaaagaagtgatagagatataagggagcgaccacatagaaaagagataagagagaggcaatgaacaccagagaggggactgatataggggaaggacagaagggggactcatataaggaacggacaccatatggggggaaagatataggtgatggacagcagaggagggagggggaatggaaataaggattggaggggtgggggaagggggtaaaagtgatgaagtgaagacagcattaagaccccagaggttacattttactggtcaagagcctttaagagggtcagagtctggggcaggatcctaacctgtcccctactcccatcatttcatcttacttgtactgccacccccccaagcacacataatttggccctccccctgccctggtctcccctcccccaccgttccctctctcttctctcttccctccatctggaccctccatccccccaccccccactgcctccctctctctccatctggccccttctctccctccatcctcctctctttttccgccccttaccatactctgagtcccccaccaaattatccccccacatcttcttggcttctcttttcacccctatgttttcatttctccttcctagcccctctcccaagactctgtccctctatttccttgatgttttcctcatcactcagctcccacccccaaattatttctgcagctttttccccaacccaatccttctaccttcccacccctttctggcgctttctttccccttcatcattttcccttcagccccctttcaaggcccatttcctggcccctccatcccttatctacccctatccctctggcctccaatccctccttcccggttgctcccacccctgccttcccggtcctcccctctccctccatttcagccgctcccttccctcggccccgactctcccccgccccctgcccctccccctgttgccccccatatggccctccccctccccccaccacgtacctctgaagggggcataggacatcgcggggatgctcccccgatggatggaggctcgagacctgctcatcaggcctggggggagggggcggggggacgggggagaaagaagagagaaagagggggagaaagagggggagaaggaggaggaggtggaggaggaggaggaggagagaggaggagagaggagcagagagaagcagagaggaggagagaggaggaggaggaggagaataagagccaacggcagcagcggcagccgagagagagggggggcgggggagcgagcgagagcgaagagagcaggaggaggaggaggagggagagactctgcagcccccacccctactccgggaggcccagattgtgagagagagagagacccctgactcaaaaacacaccagagagagacagaggtcctaaagatgcagaccccagaccctgagacagagagaccctagacccacagagaaagatacttcaccaccccccactgtggggtaatttgagacacagggccaaaatctagaggaaaagagactcctgatttgaggaaaaaacgaccccagatcccccagagagagaagctcaatatcaaaatctgaaaatccagtctaaaaagggttctccatacctacagatatcttagactccagaccctgagatgatgatttcagggaccaggacctgagacctagactcagaaaaagatgaggcccagattcagaaagagccagatgtagaattagagcttagagaactcagacctagaaagagaccccagactcagatctcagagactgataacttagagacagagacactcctgacttaaggggagatagagacttcagctggtccggagatggacaactcagagacccaaaattcatgaagaagacttcgaaagacctcagagtgcgaccacagaccctgaaacatagaaaccccccaaaccagaagcataaaaggaaactcaatcctaagaaagatctccacacaaatactgaaagacccctccgaaatctgtctcagagacaaactccaaactcaaagacagagatctcagggaacctcccctccccacttccctgccctagaacctccgagaggtataaccctgacgtcagcctgggaaactccgaggcatccccaccaccagaccaatgacctcagaccttgaagggaggggaaatattgggtgggggcagtggcaagagcttttttctctgcacctcctcccacctctctgcctctcattggcccctctctccatttttgggtcacaggatgtgcttgggccccagggaagttatgtagggcaggtcctggctccttgggggatgggttagggaaaggagacccgaggctgagaggtggaccaatcctggggagtggaataggcagggaagaggggacagaaggaccatcaccactgtccccatcctgcagccctcgttctccttccctctgattcagtagtctgtctcaagctttgggttttcaattaagatggctaggccccattttcaccatcctctaccacagggtctcgctctgttttaaaatgcttctttcctcagctagctattgtcttgccatgcccgtgcctgcctaatcactccctgctacccagggacagcgggcttctagatcaccgttgttcattcccaaacccaggcatatctctgcccaactaaaagggcagggggcgctctcttaacccctgagtttggggtgaagggtccttctcagaccctcccactccttaagacctcggaaacagtgcaggggaggtcactaggcacattgtggggtttaaggatgattccccactccacagcctgacgcatcgactctgcggggtctctggcccccctttcctggaaccagctctcgcctcacgtggcctgcgaggctggcctgtgattggccacttggcgtcactcactgagtgccgccgccgaagaggaccggccccctcacgtgacagtggaacgccgcagcggctctcctcagccagcaagtggcagtttcgggttcacacggaaacgggcgtgccatttccgcgcacgtctgcagatgcggtagtcgattggtcaagtctcccatggctcctccttcatcaggaggtgggcaaaccgcgccatgatagggtcgggattggctggctctggaggcgcaggtggtccttcttctactgtcacatggtgcgcgctgttttctaatcacgtggctgccacccaggtaagaagaggccgctc

SEQ ID NO: 585876 - DNA, 4001 bp, Homo sapiens
ggcagggtgacaacagcacaggtggcctcgggagccgtgttaacaagttcctaagtgagtcccatgcaggtgcaggccaccatcctcacggtcatcaccatggaaggcaagggccacagggatttcctgcaacttcaggaagatcgctgcagagcggaaagtcctgcagaaaaccctcggcagcccgcacatttccacagaaaaagcaagcgtttggaggcgcttcaaaccccaactaagtttctgacctaaggcaagttacttgaagcttctgagcctgttcccgttactgtaaacggggacaaagatgcattatcacggtagcctatttttaggattaaataagtgaatgtacggctagctcttggcacgaaacagacatttcataaatgcactttgtcatgtgggtactgtgtatttttcctaaatgctatttggaaatgatcactgtaatcgtcacagttcagggaaaaacattccatgacagaaaacacccagaaaaggaatggccaacgtaaccgtgcttttctggcagctttaaacatcctcagtctctgaaaacagctgctgtgagcagggaagggaggtgtgcgcttggctcagggaaagcccgaattcagacaacccatacagccattcccatctcagccaggtgggactgagaatcaggaatgcgactgggctcttgtctcggccccagaagtcacaagagatgtccacagccaggtcacagatggcaagggggcccctgagagagaaggaaggaaacaggtggtagaacctaaagccccagggctcctgagctccaggaacagctgagtttggctgtgaccacccacgacagccggccaccaccggctcacccccgagtctctcagagtgagcagagatgcccacgtcttcctggaagttctctcccttcgcaagtcagatcacactgtcccttcctctccctcccaccccacactgactgacagtcacacatcggtggcttttttctcctgctgacaactcccagcccacccctgtgcccccgggcatctgccctggtccctgtcttcacccacccgccttggcacatcttctagagtactgcggacaatgccctgggcagaagccccagaccagactttcgaaacacttaggccctcgccggcaagcaatgaagacgagcttctctggcacagggtgggggtgccgggaaccccaccctgctccccagcacaggcaggtgacaaccaggcaacactcaccttgacctccccacctgcaggttcctgcaggaggagcaggtcccgaggcataaagaaacatcttaaaagagaagagaggtcggccaggcacggcggctcatggctgtaatcccagcactttgggaggctgaggcaggtggaccacctgaggtcggagtttcagaccagcctgaccaacatggaaaaaccccgtctctactaaaaatacaaaaaattagttgggcatggtggcgcatgcctgtagtcccagctattcaggaggctgaggcaggagaattgcttgaacccaggaggcagaggttgtggtgagccgagatcgcgccattgcactgcagcctgggcaacaagagcaaaactctatctcggagaaaaaaaaaaaaaaaaaaaaaagaagagagagagaagagcggtcaaacagaatgcctgcactgaggccccttccgacacagaggctcctgcccaccggggagcctggcgcctgctcctccagcgagcggctactcaccagatttcagcctcagctcccccaggcagccgtacgcgtccgtgagcttgccatactgtcctttaatgacttccttttcttctggagctggggaagaaacacatcacagaaggcatcagcgagcgtctcctgctcattcctgttcattcacacccggcttgccaagctggcttcccacccactccaaaaagaaaacacaaagacaatagctcggcccacaaacaccaagtgtggaggttttatgattcgcgaatcacagagctgcaaggattcagaccttcccaccaacagcttgctctctggaagtgctgacagcttcctgggggctggaggagctggggtcctggggttctggcgtccagctgggggcaggcacctggggcctggccctattactctaccttgctgtccctgtccacgggtatcatccactagaggctacatcctggagatgcccactcactccaaggcacctgtggaggtggtaacttggggagactgggcagaggtgcctgagtacctctgagtgcccagggcctgggtccaacccatcccaaggaaagctgcgtgccttgcctgccgggtctttggcagtgattgtccatgctcaagccaaggcatgtactagttttaatgcaaaactgacagagggaagaaccattaggcgcagggagccctaatggttagggagagccctaacctctccaatgatgccacaggcccttctggtgacgacggggcaggcctttagaccccttctcagaataatgttttaagtgcacagaacaaaatacaaagatagatgaaccttgaaaacattatgctacatgaaaaaagccagtcacaaaagacctcagaaagattccattttggccgggcacagtggcttactttgtaacctgtaaccccagcactttgggaggcgaaggcaggcggatcacctgaggtcagaagttcgagaccagcctgggcaacgtggcggaaccctatctctactaaaaatacaaaaattagctgggcgtggtggcacacgcctgtaatcccagctactcgggaggctgaggcagggggatggcttgaacccaggaggtggaggttgcagtgagccgaaattacgccactgcactccagcctgggtgacagagtgagactctgtctcaaaaacaagattccatttctatgaaacgtccagaacaggcacatttctagagacagaaagtagatgttgtggttgccaggggctgagagtggggaaagggggaatgtagataattgctaatgagtacgaagcttcttttaagggggacaaaaatattctaaaattagattatggtgatggtggtggtgatggttgtacaatcctgaaaatatattttagaaacatggagttgtacactttaatgagttgtatggtacagaaattatatctcaataaagctgttataaaaatcaagaaaataaatatgatcacaaataccaatcttattgaaatctagttatcaaaatttttaaaaaatgttatagtatagcaatatatgtgccttatcagcatattaaatcgcaaaatccagtggggtctattaaccaccttaatttaaaactagtaatgggaacaaatgctacttcaagatatctgaaacaacactaatgtgatgtggagacatctgtaattgcaattggtgacagggtcagagatacggctaacccacattggtgacagagtcacagacatagctaacatactggttttgttgcctgccttcctaattagaggaaatgctgcatttcaggtaggatttatacaaataaagatggacttttctccccacccaagaaaactaatcctcaaatcctatgcacagagcccttaaggagctttgggccccagaagaacccttgggctggatggaaccatttctacatcatcatggaggtaagaaaaggggcagctggttccctctctacctcattgtcttaagcagccgaaaaggattcttaggctgcctcgactcccacagttaaggaatttcaaccaggaactaagatcccaaagtgaaatgttagaaaggagaaaatgacagaaaacatcagcccctcataccaagccctcagagcagatggactgtgaactgactttcatcacttcctgctgtctctaaagatgttgactcagagaggcaagtgtagaaagcttggatgaacatttgaagcaggtgaaccttgttttagctgacacacatccc

SEQ ID NO: 585877 - DNA, 4001 bp, Homo sapiens
gcctctgtttcaaaaaaaaaaaaaatttttttttaaagttttctactgaaaaatgaatgctaggttaaatgacaaatgtggactgcacatgagttgaagacgagccaattcctttcttacattctctgttctaaaatctggtatactgtaatcaccaccgtgatgtaaatctcagcccaaacttcagctcctaatggaaaatatgcactacattactgtcattaatcatttttaaatcttcacttttgaaaaaataaaatctcttttttctaagctgcttcaaagaattcttgaatgtgtatgaacttggcttaatgttgccgtaatccaactgaaggacatcttaatctatttgatgaaacagtagttttgtaccatgaaattactctttcgcttccgataaatgtggtatgaagtagacatctaaaatggaatggaaatttctgtggttttctttcaaggccacaccaaataaccaaacttagactcttcaggacagcacaaattagaataatctgaaaataacttaatctacaattcactgcctacttttgatgctgagactactggagacattgtttcagtaatcaagtgactgagaacaagctggataaatgcatgttaatgaaatgattagggaatcagaaataggagagatagtccttccaagacatacatccgaacgggagtcgatgcatacaaatgtgaaaagaaggctagaggcatctacaaagcagcctgctgcatttgccgaccacctcaagtacgagtgaccccgggctgcaccttgtttagctaggaataccggcaagctgttacagctggacgcctagtggtgggagcttactctcgggtgtccacatttagaagtctaacaatcagacctggtttcacgtgctttggtgctacccaggttttccttataatggttagcacaaaacaagggacccaggttagcgataccaggaagccacgcattgaatgacattacagaaacagccacataaaagtcaggtggatggtgtcaccttggcaagcaacttagcctctttaggcctcagtttgctcatctgcaaaatggggataataatagctttttagtagaattgtgagaattaagtgagatcacgtactaaagcccatagcacaatgccagtttcaaggcttctgaagtccataggtgaaattcgctggcttggcaggatctaagacagcataaaggtcatggtatatttgtttacaagttctataaattgcagcaccgatgcttctcgaccaagtatttacgtgggacaaagctgccatcagcggtttctccagagcctatgttttggggcttttgtccccatcccctccaggagtggagccgccaacacaaaccaaagggcaatcactggtttcatcaacaggtgcaaaagaaaaggcgccaggcacagggtcaggccggctaagtcaacaccccgggatcctcatgaatacgcaaagcgccccagccggctatccagcaaccatatcctctggcggcgcgggccggagatccccgtggaggggcggccggcctccgtgcgccaccggcccagccagagtgctctctcgagtccccagccccacttcattcaaacagccacccctctgcgcgcgacccctacgccccggcagtcccagcgccgcccgatcccctcgggaagggggggtacccgtcttcccgaggctgggcgaatgcgggcgccctctcctccgggcgtcgctgcccccggcccggactcacccagcgtggccaccgtgccggcctcgaacagcaggcagtcgtcgcggccgcgcgcctccagcagcacgctacagtccccctcggcccccaggcgccccagcagccgcagccctttgctcagggccatgagggtcgggcccactgcgggcgggggccggggccacgtcctcccgagggcgcgctgcccgcgacagctccccgcgcgcccgcaacttgccagagtttcactttgcgccgccgctcccgccgcgccaggctcctccccggcctcctccccttcctcctcctccccactcgcgcctccccagcctggggcaggtgagggcgcgccgccgcctcccgcccggccccgcgctccccccagcggccaggcagctgcgcgaggccgcgccccggggctgaggctccccgcaggcgggcgtggagcggaagagcctcccggatgccacgcattcctcgctgcggaggaggatgccccgcgcggggcgaccccgggagcctggctgcgatgccggccgcccgcagccttatatgggcagcccggcccgggagtccgccaggctggacccgctgactgttcccgccgggggcgctgcgcctccctgtgtggtcggctcctgcgaccctggacgagtcctttcgaccctgcgtgcctcggtctccctgcggggaagcggggtcataactgcgcctacttcggcgcggaggcctgagttaattcgcggaggcgcttagcgggtgcggagcgcgtggagcgggctggagaaaggttacctttcactagcgttctatcccggaggctgttgcggtcaccgaccccgccagggagaggtgttgggggtcaacggtgcgttgtcgcgaagagacctggagccgtgatccccagaccacgacccccacttaccacgtgaccctgacttctctgcgctccaccttcctctcctgtcagatggtgacagcgcctctcccaccggctctggacaccggcacgtgtccgcgcgtgtacgctggagtgtgtggcccggccttctggcgcggggttctagcgcccaggcttggcctgtcagagctgcaggggaggtggggtgggtatgggtgtttagggctgagttggagtcactctttggggtggtttggcggcttaattcccttcgcttgtgatgggtacgtgaggatggcccgagaagcctccatcagctgtttccatcctgcccgcaaacgaactcagttcctctctcaccccattctgctgtactgggccaagctgtttgtctctgggacttgtcctagaaagggcagagcccccagagccaagcagaacactgccatgcccctgcagacattcagtaatgaccagacaagccatcctcaggggacaacctctcaggtgatggttgggtaataaatttgaacaaccccagcagagattatcttgacccttagcccctttccttgcccacaaactctgcccaggtcaagcatgatgtgctcaatatcccaggcatgatgctcatcagctgtccgagcagcttctttctgtgtagatggaaacattactacctcatgaaaacagtgtgcccattcagtgaggcagatcagcctttggcccactttttgacctgaaactcacttcttccaggaagctttcctggaatgctgaggtcccagataatagtgcttatataacacccagatttacagacttcagttctcacctactcatatgttgcttgagaagtgtttttatgttttctcttagccctgttttgcaaattgagtggtaaggccttagggaggggacccagtcttccatttatctctctctcctctttcctaactagcatcatatagtctaaagtcctgcacagtggcatgccatacctattttagaaattttcctgcagtcaggaccagcagttgagcctcacagcttatagaatccaagtcaccatcaactgtaaaatgaaccactattttatgtaccactgagaaaaaaaaaaaaacttccaattaaactagaacatgccaccaatagtcatctctgccctgatttagacaatgttaaaatgcacgtctcagactcaaggaactacagtggctgttcctccgtctctgagaaatggctgggtgagccaagagcctgctgggttttggggcctctgctgtctggtttcaggtgggacagcccacctgggtggcagagggagcagcttcctcacatgcgcactggctt

SEQ ID NO: 585878 - DNA, 4001 bp, Homo sapiens
caggggttgcagtgaaccgagatcgtgccattgcactccagcctgggcaacagagtgagactccatctcaaataaataaaaaaaaataaaaatacataaaaataaataaataaataaataaaacattagaagactcacacgtgggcttgaatctataaaacttgaagcctacctgagagaggacaaagttgaacaggcgctttctctgaaagatcactgcaattcaccgctgattccgagtattctttctcattcggggagccttttaccacccaaaaacaacaaaaaatattactttagaatcagaaataggaattcatgactgaaataggaagccatggcattcatactttaaacttgacctctttgtatggaagagcaaagaaatgagaattaatattattatttatttatttatttatttatttgagatggagtctcgctctgtcaccaggctggagtgcagtggcgcgatctcagctcactgcaacctccacctcccgggttcaagcaattcccctgcctcagcctcctgagtagctgggactacaggcgcccgccaccacacccagctaatttttttgtattttttagtagagtttcaccatgttggccaggatgatctcgatctcttgacctcatgatccatccgcctaggcctcccaaagtgctgagatgacaggcgtgagccatcacacccggccgagaattaatattattatatccttctaggtactactcacaattgttgttatgctttctgttgtgccaacagctactatttatttagctcttactctgaaccagatagtttaagtactttgcatacattatctctactaatccttattgccacattatgaagtaaatgtacccattctacagatgaggagagtgagtcttggagtgattaagtaacttacctaaactcacactctaaactgggtctgtttaactccaaaaccttatgcttcatttaggcaaagcagctaagttagaatctccaactatcttggctaaataatcttttctacaccaattctaatttctttttttctttttttgagacggagtcttactctgttgcccaggctggattgcagtggcaggatcttggctcactgccacctccgcctcccaggttcaagtgattctcgtgcctcagcctcctgggcagctgggattacaggtgcctgccaccacacccagctaatttttgtattttttttttttttttagagatggggtttcatcatgttggccaggctggtctcaaattcctgatctcaagggatctacccaccttggcctcccaaagtactgggattacaggcgtgagccaccgcacccagcccaattctaatttaataaatctttaatatctaatgtgcactttcctctcatagtctctttcttaccaagcaatttagagattaaggaagcttaattaaaagaaatttaaattagaccctagctaacttttttataattccaaaatgatatttatgttccacctccaaacgagaaattacggatgatcaaaacaataaagtcgattcagagagagcaaaatagtaataaactgtaagtataagaatttgcaaaccaaagaagaaagcaaatgacactctaccctttaaaaaaaaaaatcacaccatatagcttttggatagtgtttttctgttttgttttggtttttaattaactctgaagtcacttccaccatatcacttaaatcattattatctcaaatgttaaatgtatgttattcaataaaattacaagatatcttttatctaatttattatgttttgtttcctaccttttcaatgtcataaatttaagaaaagttacaataactataatctctacccaccccactcccccactcctaaaacgacctgctgcaacggccagccatgccttctcatcctaccttcgcatctgcttcaagagaagagaccagagccggctctgcagagaaggaagtcaattcttcttgttagagtaactgacgtatttctcttcccttcctgtcgggcacaggctgacgcagtgcaccctgtgtggccagccttacatgcctcggtggctactcccacatcactagggacccagggagcaaagccaccccaaaaccacatcaaggagctcttctatgccaacattttacatttttagctggaggaaagaccaggctgatgctggtgaaatgtttcacccttcctaaggaaactccctacagagactacagccttcaaatattcaaatgttctcacatttgtgaagggtttcacattgacttcagtgtaaatgactaaccacatctcaaagaacagctattaactcaagaataatttacaagaaagggggacagccaggccaagagcgatgaagattgtaatgaaatcaccaaggggaaccttcaaaatgctgtgcgtgtactaggtagtattactcagcaccgtgaagtgtccctgccctgctaactcaggcatggccaaggacttgctctggagagcaataagacaatgaagtgtgtgcaaaggtgccacgtgccacgtaggcttggcacctaccgagccagtactggggccaccattcattctctttcccttctctttcccttgatgactccagacacaggctgctccagcaacctcgtctcagcatggagaagacatgaagcagagccatggaagatccttgatggtcatggagtgtgagtggcaaataaatgtttgctgtcatcaaccactgagagtgtagggccatttgtttctgcagctaacctagcctattctgctgatgtagtgtgtagtgttttcacaaacacagaactgagcaccaaactatttaataactactatagcatgaatatttacccattggaacaaatgccagcggaggccctgctataccacgagttatcctttagttattggatcttggggatgaggtcccagggaaggggctgcagtcaccaggattgagaggaagagggacccaagaagctcagagcagccactgtttcatggggtacagaggtatttcagcacaactgtgcctccgcttcccagctcaatagcagatctaaatataggcacttcttagctaatctctttagcttttctcagcacaggactctcactttagatatgtgtcagccagagtttcttttcctttacaacattaaattcctcagccatgagtgtttcaacagcaccctcgtcctcatcgtcttcttctgttactattattttgactcagcatgatctcatagtaacacacttcttggcacaggggaagaaaggaaaaaatggaaaatccacaggatggcatttggactatgaagggctgcagattatagcagaacaacactgctggatattattattattattatttttttttttttttttttgagaccgagtctcgctctttcacccagtcgggactgcagtggcgcgatctcggctcactgcaagctccgcctcccgggttcacgctattctcctgcctcagcctcccgagtagctgggactacaggcgcccaccaccgcacccagctaattttttgtatttttagtagatacagggtttcaccgtgttagccaggatggtctcgatctcctgacctcgtgatccgcccgcctcggcctcccaaagtgctgggattacaggcgtgagccaccacgcctggcctattattttattttttgagacggagtttcgctcttgttacccgggctggagtgcaatggcgctatctcagctcaccgcaatctctgcctcctgggttcaagcgattctcctgcctcagcctcccaagtagctgggattacaagcatgcaccaccatgcctggctaattttgtatttttagtagagatagggtttctccatgttggtcaggctagtctcgaactcccgacctctggtgatctgcccacctcagcctcccaaagtactgggattacaggtgtgagccactgcgcccag

SEQ ID NO: 585879 - DNA, 4001 bp, Homo sapiens
gttgggcgagtcggggtggatgtagacgcagctgggcgcctgcggctccggcttgccccccggcacccattccccgttcacgtacttccagcggtggttgtccgccgccacgaagtccagcaggaaggagtacatggcgttggggtccaggccagacacgttcaccttcagcaccggaaacatcctcctggaaaacacggggcgggcgcaggaggaccccgacactgaccaggtaggccggaggcagaagctgggcacagaggcctcagttatttcggggcacagaggagccccctggggaacgtccgagggtgactcccaagctcccccttccccgagccctgccaggtccaggtggcctcctcaccatctccacggcctcgggagggaggggaggagaggacctggcgaagggtttcagtgcaggaggccacatcccgcggggacaggcggggaccagggcgcgcctcgcgggtcccgggatgcctccgaggtcgggacaccgaagtgcgcgttcctcctccccaagcttccgcggagaaagccccagaagaggggcttgtagaaatgcactcgagggagttaaccagagcgggaacaaacacaaagccctcctccaggagaaaaagggttcgacctccgggaacttgccaggtcccccaggctgcccaggcgctggagagcgcggcgcgcgcgggctccggacgcgcacccacctgccgttcttggtcacgatcatctcattggtgagctccttgaagcgcagccacagctcgctctcctccaggcccacgcgcagttcgcgctctgtggggtcgcccttctcgctgcccgcctgcagctcattctccacggcgctcagcaggtggtccactcggtactgcaggctctttcccgcgctctcggtgccaggggagctcatcctcccgtccggctcccctccccgccgtccccgaagcccagactcgctacctgagatccaccttccctgctcttggccgccgcccttccgagaaaaggggccccttggaccgagacctgcgacggctcccgggtcccgggtcccggcacagacccgggaggagggcgcggaccaagacttggggggaggggacgggggcagaggggtggggagaagttattccacttgaactccccaaggctctactagtgtaggtctctggggaccgaaattcagtgccctccccataaatagagccgcggcggcagcgctggggtgctcggcggattgggccgcgcacgctttgaagtgccgggcagcctcccattggccgagagcggccatatcagacccagccgggcgggtctgggaggccgggggccaacaatgggctcccgcacgcctgtttcatgtaaatccggggccccagccctgcgagccccggcccagcccctacacccccgcccttctccaaatgtttgcacctccatcaaagcggcggggcaagccccggaggaaggtaagctggacgccccggcctgccccagcccgccccagcccgccccagcccgcacttccgcgaggggctgcccggcagcctgcgatgctccctgattcccgcgcggggtcctcctcgctttcccagcgcgcccggatcccgcagccgcgccaggctggaacgttcgcgcggcctcacctgtccccgctccaggcgcgcctccctcccctcccagggacgagcgcatttggccgggctttgggatgcgccgcgctcgtctcgccgcagtagtagtgctgttctcgcgcctccgatgcctcaactctccagtctggcagtttccggtgcacctgtccccacacgtccctcgcccacggagccccaggcggcgttacgcacacccaggatcgtggatcagcctgccccggcgtcgggtgtccccgcggctctcaccatctggaaaaggaaggtccgcgcgcagagagggaaatggacggaaataagcaaaagcaaaacaaccccttctgagaagtgtcctcctcgctctcttataaaaacaggacttgttgccgaggtcagcgcgcgcatcgagtgtgccaggcgtgtgcgtggtttctgctgtgtcattgctttcacggaaggtgggagaaggtcggggctggcggggtggtccggactagtgggactcggggcgctttccccgcccggcccagcgccaagcggtgtcggcagcggttgttttattacctttcggtgagaacttacgcgaggagagcgaaggagaggtgacaatgagcaggaaatagttcagtggggtctctttaaacagtaacattcctcctaaaacgggagcccaggaagggggaaggaggcagaagctcccccttccaaggcctggctttgcgcttctgcacacctcgcccattcgctggacgagggcctgcctcgggtagcagcctctgtttcccggtctcctgagcgggcaccccagccccaacccctctagagaaagcctgcgcatcgggtggggcagcgagttcagaggagtcttgcgccctagcaagggggctttcccgcggacatggtatctgcgccccgcgctaagtctcccctgccccctgccccctgcccctcgcccctcgcccagccgggctcgctccggggtcgggaattgctggggaagccgaaggagggatccccgcccgggactcgagggatcgacccgcctcgcggtatgcggagggctgccaggagccagtcccggggaagggtgcctgccgcccgtgggggacagggctccttctctcccttctccaacttacaccgacgagtcaggaagccggagcgtctagtccctgtccgcatttctcagtgtcttttgatgtctgggatgcatggatattcccagggggctgacccgaggtggggaagtttccttctagaaagaggcaccaaaaggacctcatttgctcctgacgccggaccctcctgacacgccttcactggctcatcgggtcctgggctttgggggagagcgtggtgcgtgttactctccttactccgggtattaaaatgtctaagaggtcatcgctttggcccaaggcctcccgaggataagataaaagggaaaagtggaggggaggtgaaggaggaacgagggtgggtcccaggcaattgagggcctcggaaccctaggcacgggagcgaaacctctcctgcggcttcagggcaaaggagtcccgaaggctggatccctcccctgcgctcggacggcgtcgcggccgcttttcccacagtcgggaagcgccaaagaagactggagggtttaacagatcgctctaaaactgttccgaacaggaggggcacggccaaataagaatacaacttcagcaggaaagaatattccgtttctaacacgcgtaataaaatttctactctccagagagaatgtctgaagcattgaagagtacgacccaggaattgaaccacccaagtcggaggaggtagaggttggaagtcaccgactttggccagcacttgtgtagtgtcacctgtcttcactttctaacgtttatttttcctcccctttctgtggctgattttctgatctttgttcctcggttcccaggaccaggcccactccctccgccttttcagcgaaggctgcagtgcatgacagtttacagccaaaacttcctccagcccggctataaagaattcccagttaataacaatgcgcttccttgggaggaaagaggggctgaggcaccgccagctgtttcgctcccagggtctatctctccttggcaagcccagccattcagagaaaaacaagacaaagccttatggctgggcctcaggatgcaactgtcccaccgaaaacatgcttgaaacattttataagaaaacacacacacacaccccactcgactcccagagaggcagttttcctgggcccaatcccttctgaaaaagcaaagccatttatctttagaagcaggcaacaatgaagctgtaacaggctcaaggaggggtggagga

SEQ ID NO: 585880 - DNA, 4001 bp, Homo sapiens
atgccagatatgaccttaagacatggtaaaatccttctagacattttcatgacttcagtggcaggtaaaaagcaggaatttcatttaatttatattatttttagaaaagttagaaacaactggaattaacaatagggaatggttaaaaatatatttgtacatctgtgcagtcacgttatacagccacaaaaagggattactcatagctcaaacctcagcatcatgcattatatttagttaatatgtgcacatatgccccgactccaaaataaaagttgaaaaagagaaatattaatataaaataaagaattttagatgatataatccttaccaggaagtatactatgaataacatttttttaatttcatttggtttgtatatattttatttttatattttcctttatttttcaaatttcttagaagcatgagaatcagaaaaacataatttaaaaatgtgaagatcaagatatttaaggattggaatatatattaacaatacaaataaattatgtgtcaacaattatttagcggtaacatttaatgtgtgtacttttagttgattttactaaaagacttatacacatatgtgaccaggacatgtatacgtatatgacaaaatcattctgatttgcatcctcaaattcagccctatagtttccaccactgaacagctgactaaggtaccacagtaaactcatggcagttcttctaagggcaggaaaagttatataaaatgtaggcctttaaatactggatttgcaaagttccattatgtgtggtaagaatggaaaagcgtatacctactatgtcccaaataggaaattacctataagcatcataatttaactcaccatacatactttgactcaagtaactgatttaaaaaaaaatccatgtggttggtgcatgtggttcgttatgttgtgttcataaatatgatcatcaaccgatttgcaaaacagtaaaatataataattctatgaactcaattccaaaaataatttacacctggatgaatctttttggaaaattttaccaaacagcatcatcttcagtgcttttctaaaccaaggatagaaaaatgcataaaccattggattaaatgtagagttcaagtagccaaaccaaatcaatacatcattcaaagtaggtggaataatgtagtgaagaaaagggtccatgactgtacagataaagaaagggcaccagcatattaggaaaactcccatcacaatccccaatgtcttcacagctttcctttctttgctttgtgaaattccatttttcatttccaatccaatttggagcttctgattggcatcactaattaatcttgcctgttctttagcgataagatatattctgtaatagacacataacataatagatccaggtatataaaaagaagtcataaaggtcagtaccccagatattttgctaaagaagacagagcaacctcctctgcagtgaacatgtttgtaatatatctcttcagcgcctttgaagtttagctccagaaagatcattccaaatgcaaaaacagcagggacactccaactaatgaagatcatcacacaaataaccaagatattcatcttggctttatatctcagtggatcacacacagcatagtagcggtcaatggagatgaaagacaaatggaaaatggaggctgagctcagcataatgtcggtgcttgtgtgaattttacagaagacttctccaaaataccaacagtgctcagcagatctcaccatactgtaaggcatgaccagacaccccagaagaaagtccacagtggccatggaatgaatgagccaatttgttggggtatgaagttgtttgaagtgtgatatagaaacaataactatcagattgccaacgagtgtggtcagaattatgagcaccattaaactgtacagggaagcacggacatcatttgaccagttgtttttcacacaggaaatattaattatattgtggcaaaagggcatcattcctgagggctgtcaatcagtttacttttccctttgtgtgttgatttatctttttcccaaatccataatcaggttacagttccttctcatgtttattttttatttgcacatacttatcccagaaacctaggaggaaaaataaaagagtaaatcattggcaatttgagtcctctcacttctaaaacatttacctattactctctgttgaagaatagttattttggaagggactttatttccaagttccattcaatagttcagtacagcaatttttaaaaaacttttacctggagctggacattcttctagaaatatgaagctaaattattaggttgaactatatgaaactgccacatttgtaggtcagagaagatcaaatgatgattatgatcacacatcttaatctatggaaacaatctgtgtccataggaagccagtctagtgggggagacttacattgtaaagggtagaaagaaattgccagaaaatttggaattaaaatatgtttatgaaaaagacaagaagtcttttaaatgtgcctcttgtgcagaattaatacgcactatgcccacttctgcacttggtcatacgtaaattatatatttcttattttataattaattgtaataagaagaagcttacatatatttatttgcagcttgcaaagtacttctacatatattccatgcattatttcagttacagttttatttgacatttataagaccaacatcattttttgtaaggaagacatgacatgcttcattaacctcattttactggcaagaaattgaagtttaattcacaaatcattaaagcttgaatatgagctgtggtctcaattactagttcagtttctttgatatcagtccagtctttctctctattgcagaaagaaccaacttgaggtcaatttttaaaaattaagctttaaattttcatataagaatttatgatgtcttaaataatggcacctactagtgaagaatgatattgtggtcccacttattaaggatttttgatatacagactaaagtctatggtaagaagtgaagtggcatggtgcaaagagcactgaggtgagagcccagggaagctgagtttccatgtgggccgtgggcaaggcacacaacctttttagtttttaagttctgaaatccaataaatctcactttataaaacaggtaaaaaaaattattatgagtaggcatcttctactaggcctcctcttcttgtacttcactgaagaacctcaaagttccaggggactcagtttgaaactgtcccttttgtttctatatgaccctgtaattctgagctaaattctagaacttggacttacacacacacatacgcatgcacacacacacacacacacacacacacacacatatataacacatacacagacatgtacatatatataaagagaagaggggggagagagagagaaaggaagaaagaaaagagagagaaagaaaggaagaaggaagaaaggaagggagggagggaggaaaggagaggaggagggaaggaaggaagaaagaaaaaagaaaggaaggaaggaaggaaggagaaaggaaagaaagaaagagaaagaaaaaagaaagaaagaaaaaggaaagaaagaaagaaagaaagaaagaaagaaagaaagaaagaaagaaagaaagaaagaagaaagaaaggaaggaaggaaagaaggaaggaaggagaaagagcttggggaagagtacaaatttctggcaatgaagtcctatagtctatcactttggtaggaaaatgctagaaaacagcaacaattcctagaattccaggagtctgccttcctttttatctttttcccttccctctgggctgatggtttagaatgagagaaatgcaatatctaggtatgaaaatgtatattttaataaatttggaacatttttcccctaatctcctttggtcttctattcccagaaggaaacatatttataccaaataaatctgtaagattta

SEQ ID NO: 585881 - DNA, 4001 bp, Homo sapiens
acagaaccatgaccacaatgacaaagaattttctattttttctaattatttattattattattttttctttttttaaggggtagggaggaggaagcagaatgttctgatttttctttgtgatgtcttttctttttgcctagtctttatatttgatgattaatgcttcattggtaaataaatattcctctgctttagtaaccactttttttttttttttttttttttttgaggcggagtctccctctgtagcccaggctagagtgcaatggtgcaatctcggctcactgcaacctccatttcccaggttcaagtgattctcctgcctcagcttcctgagtagctgggactacaggcacgtgccaccacacctggctaatttttgtatttttagtagagacacggtttcactgtgttagccaggatggtctccatttcctgacctcatcattcgcccaccttggcctcccaaagttctggaattacaggcgtgagccaccacaccctgcctagtaaccacttttaagacttaatggatttcactatgtctttctgccagctaatcattgtttctcatttccttgaattattttgcccttacccaagctgttgatttcttttgattgttcaatttctatcaaatatttaaagttaatgaatcttaacatattaaatggatggtataatatataatatgaataggcttagcgtaatgcctgatatatagcacactatcaaaagaaagctactttctttccctccctccttccttccttttttccttccttctttgttgtaaataattagcaggttcaagtacacatttgaccagaaaagatttctcctaagaaaaagaggaaatgggattgtaaggaaaaaggccaggtaactgtcaatacttaagacagttataaatacttaatagttaagacagtgatagatcatttgctcagccacttataaggaggtaagcttttccaggattctaaatattcttcccaggaaacttgttacactgccagaaggcagcatgttatttcgttcacatgttaaaatgactgccttttattacaaattcatattaagtcctgcaccttccacaatcttccacatgcctacacattctctctgcacaggaccaaaattcaaaaaggaagacctaatgcaacagcaatcgacggcattatcaggatggcaatttacttcttaagaaaacctcaaggaagagaaaacacagatctttgtttcataatccctcatcttccacataccggcagaagattccattgttaactccttaccgaaggaacttttttctttgtttcttctctaactactgttaatgtgtatatggaaccagaagacctaaactatgtgagttgtgctgatttataacttaacaattcgtcttaaggggattaaatctgaaagtgaaaaaaaaaaaaaagaaagcaaaatccttgtcattcaaaagtttaacagctcaatgagcttaaaccactcctccatcctcccaggagtctctgcttacctaagattttatcacctacagcatttaaggctctaagtctgctattacataaaggctgtgaaaacaaatctgagcccttgagttatggggggacctaaggagcctgatctcaaccacacatggatgggacctctggttcaagcagaagaatgcgcatgtgtcctccatcatttcagaaagatctgacagtcacagtccatattttgtctcacatgctagtcactgaggctttacccattgtcttcctcattttttctttgataaatgtgattaaaagaacacatttcatcaacccttttagatctggaggaattgagcataattattatctttgtaaataattcacatgtttatgccaaaatcttctcagatgctactggtttaaacttagtcatatgtttaagggcctaccttttttgtctgtgttcttttgaaatgtgaaagttcatgttgctctgatgagacagccatgggaggcaagataccccagatgtagatgaaatataaccctggtcattagaagaaactggggtcctgcatgaataaaaattacagtgctctgtgtgatctccgttggctctgcctacggccactgcttgggcgtgcagattgtgccgtcataatggaagctgagctttgaagaagtcacgcttaatgctttgatgcgatctcttgaaattcttaataactttctaacaaggggctctacattttcattttgtactggaccttgtgaaaatacatagctagtcctggctgaacctcccttagtagttctttcttttcttttttagagacgaagtcttgttcttaaacccaagctgcaatgcacaggcatgatcacagctcactacagccttgaacttctgagctcaagcgatcctccagcctcagcctcccaagtagctgggactataggtgcatgccccaccacgcctggctagtagttcttgaagaagtgaaacaggagcagcaacaaaaaaatctcttttcatctcaaagcatattcatagttatactatgaatgagatgagataaaataatgatttatattatgaatgagataagataagatcatgtatatgaaagtattttaaaagaaatctttatacctattagccaaaagggtagaaatagcaaaacacattgctactcaaaaattgccagcaacttctatttcttctgggagagaccaaaaatcattttggacaaactttctggtttctgtaaagaattacttaagtgttctcttttaattatgtaggtgggagacgagtagcaggggaaggttagaacttaatgtgtatttttaacacgcaaaggaacttatgtggagcaaagggaatgagacttgtcaaacccaggagttcaaaaccagcctgggcaacatagtgagacctcatctctacaaaaaattttaaaaaattagctcaggacagaccatgacagatggcaggaggagaaccaggggtgaaaagttaaaatcaaagcctggagacaaacaatatacagctgagcctaagaaaagtcttcagaaccagtgtctccaatcctgaacacaagatttaagaataacagctctgcagtgatgcaaatgtaatgagtaccagctcattcctcttggttttttctaagcccttagaaaccacagcttcccccccataacctggtgtctccatgtcatggcagtcggaatggcatcaacagaaagggggaccacctattttcaacagtgacacctgctagcagcctgggaaaacagtctttggattcagtcctcagagaatataaccaaaagacaagaccctaagggaaatgggaaaaatgcagattaatttgaatattacaaagagatatgatcttattttgtaccttaagctgaagaaaaggggtatgtcacgaacataagttcacattttttaatgaaactcaggtacaaagaatttgaattaattacaataattatgccaagtatgtcttgcttgccttatttgtttgtttctaacaaaatgaacatacatgactgagaactagattaacaatagcttacatacatctctatggtattttctgcctatcacctcaggtagctactctcttaaattttgtgcttatcgtttttctatttatttaatagttgtgccatgtgtatttatataagtaaatcaaaacattgtttggcttgtttttagaactctttataaaatggatagcatgttgtcttttggaaaatgttttactgtcttttggaatttgttttgctcttattttttcatttaactgtatatgcatagatctaaaactttaagcatagatctaaaacataagaataaagaaaatttggaagtaaaaagattaaaaaagcatatatcagaaaaagcataaaccaaagaaagcatccatactcatactaatatcagaaaagaaatatgttgaggccaaaaacatggcaagttaaaaggatacatagta

SEQ ID NO: 585882 - DNA, 4001 bp, Homo sapiens
gacattacatttataggttaaaatcactcataaggaaagattttttaaatgtatataccatggaaatcatcaaactctacaaattaggactgttctttttagagcccagtgttgagcttaaaccaacacatcactggtcacagcccatcagttattaatgagtctcaacctaaagttaataattttcttctttatttcttcctctcattcctctgttattaaaaaatacatgtataaatatcaagcaaaaaggaatgatggattgaaaacaaaactttagtagatattccacatttattaaaacaccagaacaccaaatagcaatacaaaatgtggatgagcctacggaggaaaggaagacactggacagagttctactgtatgtaacatgggaactaaccagctgctgtgattaggatggctcctgaatgaaaacctgcctggagtctgtcgccccagttactcagtttgccatttcttcttttagttaagaaacgtttgttctcacaacagcagaatctagtaaaggcttaactctcagctaacacataactgactcctggaagaatatgagtttttgaaattgttatttccatatttacttacctatcatttttagttgctgatgcttcaaagtacatctggtaagatactgaggaacaaaaatgaaatgggaatatcacacaaagtgtctgtggtggggagggagacaagcagttcccaagctcagcctatgttttgaccccttttgaacagtataaaagcttttgtgtgtcctctttgttccatctctggctttcccccatgttctctttacttttctaattttctttcttttctctctaccaggaagtagtgggtgtgtaaagaattctgaaaactattggagggattcttggctcaaagagaagcttcctttttttattctcgtcttagaaaccaacagctttctatggtagctaaaataatacacacatgcacaaaaacacacatcttaaacaacttcattcttctaaattctagttttttgcttcaatttattcatgcagaaaaagcctactcactttctttttgcatacacaaaatagtattatggaaacatgagctgaaaattttacctagcaaaatgtacttcagtgctctgcgaaaccagggatagaagaaaccatatattaacggattacatgtggagttaaaatagccaaaccatgtcaaggcatcaaacaaaactacaggagtagagaagttcaaaaagggatccaataaaattgtgaagaaacaaggaaaccaacataataagaaaactcctatcactattcctaaagttttggcagcttttttgtctttcttcacttgattattttgattttctcgcaagttattgatggcatgagcatgttttctggatactgcaaaaattttgccataaatccccaccatcatagacccaggagtgaagaaacctgccataaacaaggtggtcccccatagcttgttgaacatcactgggcaggaactggaacaagcaaccaagatgtcatagccctctattccatctgcataggcctctgagaagaccaccccgaaggcaaatgctccagggaccgaccaacatagaagtagcaatcttttaatgactggaatagttattttggtggaataaagtaatgggtaacatatagcataaaatctatcaatggccactgagcaaagatgaaaaatggatgttatgctaagcatcaggtcaaaactataataaatcttgcaaaatgtaagcccaaaataccagcagttctccaccgatctgatcatactatatggcatgatggtgaatcccaggaggaaatcagtgatggccatggagaggatgaggaagttggttggtgtgtgaagctgcttgaagtaggaaatggaaattatcatggcaagattgccaaatattgtgatgaatatggatcctgccataaatgaatacatagccactcggacacccagagatctttcattttctgggcaagatctatttccatattcagagcaattgaatttttccttcaaaaaacaagaacagatagaattttgtcagaatataaatattctatgttttatatatgctttcatagaaaaactcaagaaaggcagagaagaatcaaggaagataatttatgctgtaatattactcatgatctttcccatttacttattttaatctttatttgtaattttgtagaattgtaacctaattggcttaaaagatcattattggccaggtgcggtggctcacgcctgtaatcccagcactttaggaggtcgaggcagggggagcactgaaggtcaggagtttgagactagcctggccaacatggtgaaaccccatctctactaaaaatacaaaaagtagccaggcatggtggcatgtgcctgtaatcccagctactcgggaggctgaggcagcagaatcgctggaacccaggaggtggaggttgcagtgagccgagattgtgccactgaactccaacttgggagacagagagagactccatctcgagaaaaaaaaaaaatcattatttactccatactttcctctatactaccaacatttaggaagctcttactttatgccaggctttgaaatttaaaagaagaaaaaacaaattattgagctgtatcttacgtgtgtaggaagaatagatatctattagacaatacatgtacttcttcctccaaggagtcagaaatatataatcagatttgatttgattgtgatctattacctgtgggatcaggaggttattatttgaaaacaatttcattcttgtgttctattattttcactgtgctgtgttttgttttattcatacgaatgttgttttaagggggaagaatcatctaatgacctctaattatctggtagagtcaatctataaggcaaatcatgaattcttaacaagcatggcatcagccaaagcagctaagtcagaggtgggcacagaccaaagctggaccaccctcagttacttgtgaagagcaagtgtaactcagagccctatgcaatgacagcttgacaagttgccatgcgtaggccacacacaaggctatgagcagagggctagagaacttttagaaagcaagccatctctactacaagaaaattaagcccatgccctccttgtgttgggccagaatgctcattttacatattaaaatctgcatgttattctttccatatatatttgaaatgtaacacgttcatgagttagaatgattttctttttaaaaagtacattaggtaaaaaagagctgcctatatgcaaagcataactcttaatattgaagaaatgcctttggccttcagtgacctcacacatatcagaccttaccagttaccaagagataaacaaataaattaccagcctctgtgatataagagtgtatcacaaagagagtaagacatttttcttgaatgtccacaatatgaaagatacaaggaaaggaagaagaaagcatgaaggtcaaccctgcagcagagattctacaatgcagctgaagagacaaagcacatcaacacttaaaacctacatgattctgcacctcagatgaaagcaacagcggcgatcacctgaccaaaaagagatccaggcaaaatgtacaatccaagatcaaaaatggacaagatcttttcaggctggactgcacaggaatgttccagcaaggatatgacttttgatctgggtctcaatgggtgagtaggatttgaacagaagagaaaaagcctgttctacacagaaggtatgatgaagaaaagacacaaggctgtatgtgttccgagaccttctaaaaggaattctcagggacccctaaaacaccgcagagagaatacaaggtggaggggagtatagagggagagaagaaagtgcttctagtttcattgttgttcctcaagccagtgttcttagccagcattagtcaaaagagatttcccattttgttcttaaatttgg

SEQ ID NO: 585883 - DNA, 4001 bp, Homo sapiens
atatgtgcacagtgttctggcttatccagtggatattaagatgatttcttgctctccttttcctccaatgtactataaaaaataacacttttacactgttggtgggactgtaaactagttcaaccattgtggaagtcagtgtggcgattcctcagggatctagaactagaaataccatttgactcagccatcccattactgggtatatacccaaaggaatataaatcatgctgctacaaagacacatgcacacgtatgtttattgcagcactattcacaagagcaaagacttggaaccaacccaaatgtccaacaatgacagactggattaagaaaatgtggcacatatacaccatggaatactatgcagccataaaaaaggatgagatcatgtcctttgtagggacatggatgaagctggaaaccatcattctcagcaaactatcgcaaggacaaaaaacgaaacaccgcatgttcttactcataggtgggaattgaacaatgagaacacttggacacaggaaggggaacatcacacaccgcggcctgttgtggggtggggggaggggggagggatagcattaggagatatacctaatgtaaatgacgttaatgggtgcagtgcaccaacatggcacatgcatacgtatgtaacaaacctgcacgttgtgcacatgtaccctagaacttaaagtataataaatatatatatacgtatatatatatatacgtgtatatacatacatatatataaaacattgaatgtggggagtgctttatccctttccaagttaaggagcttgtctttctcttctacttaacccatgctgtcctggaagcatgcccacaaactcaacaccacacagcccacggtcacagtgccacttatctttcctgtgaggtcctactccttgcctgcatttagtagaaggaatcattcttggtacaaatcaacagtgcgtgtctgcggtgagaagaccttctggctcagtgtgagtttcagtgccttccgaaaccactggtaggaaaagacatagatgatggggttgcaggctgagttgaagtaagcaaaccagataaagatgtcaaagaccagtgggggtgtgataaagtgaaggaggctgtcgaccatcgtgtctatggtgaagggcagccagcacaagaggtatatgcccacagcaatgcccagggtcttggcagcttttctctcatgcttggcagccccagccaggcttttgctcaatgtggtaatctgctgagcctgtctggtagcaaccacaaagatcttcacatacaagctgatcataatgaggcaggggacaaagaacaaagggaagtttaaccagccccaaaatttattgagcagcagctggcaactgcccacacaaggcatctcttccagccactggctgagccttgtctctaccacatctgtgtagaggaataacgaagtgtatgctgcgggcaccccccatcctgccaggatgtacctgagagccaccctcactgtgaacttggagggatagagcagggggtcacagatggcacagtggcggtcaatggaaatgaaacagagatggaagatggaggtgaggcagaagagggtgtccaggtaggtgtgcaggcggcagaggaagtccccgaagaaccagcagctctccactgagcgaatggtgctgaggggcagcaccagcagacccagaaacatgtcagccagggccagggagagcagcaggaagttggtgggcgtgtgaagcgctttgaagtaggacacagcaaatgccacaaatacattccctagcacgataatcagcatgcctgctgcacaggccaggtagatgaccaactggatgcccagagtatgtactgtcctggggcaagacccattcacctggtagcagaatgccgcagggtgctcttcagcaccttggatgaagacagctctcatttatgatttctactcttcctctgtctgagaactggccaccttctccactggagggcaaaaaaaaaaaaaaaaaaaaaaaaaaaaaaaaaatatgtctgctaaataatcacagagtgaaacgaagaggaagaaactaaagtacagtttggaacatagtacagtgcccctgggtactgaatcaaatgtgccctgaaaatcaaatgcagcatagtattcaaggtttcatgagagttacttctgctagctctagtttatatgactaggcactttaaaactagtgtaggtagtattcttaaagaaagaaaagaaggatgtaagctgaatgtttcctcaaagaaagcttgattatatccataggtagtattaaataatagagaatgtctcttacgttttgataaggtattttttgtcaaatgtaaagtgaaatttaaagcaaagatctgaaccaagtgaccaattaattcttgttaataaattattccttggaaaaagtgtaacttctagcttctctctttaagaattacatacattgacaataaagttagcagattaagatttttagctacatgccaactcttcccaagagaagaattcagcatgcaaatattaataattaaaagagtagaaaattgctctattttagctttaaatgctgcacattttatgatgataacacaaagtgtttacacatcttggtataactatttgataggcaaaatgattttatctatttaacatcttaatgtaagtctgtgaattattaaccaagtcctaatatattgaattcagagtttctaagttacttacacaggtaggaatcagaatcccttcctgggaaaaaatgtttcttggagcaggtggacacagggaatgtcagagtactcttctgttggccacaatgacaggtgtgcaattagttaacgattttatactctcaatagaaactactcctccatgtgctatgatacaaataagctgtgaagaggcaccatgggacctagtttgcactatttgcaagtctcagttgtttaaggttcctcctcaatacagaatcacttaccctgacaattaattagagataaaatttaaagacggtggatgtatatattcttttttaatttttcagttctgggatgttttgaaggtattcttgcctgctaatggctgctatatattttctaatttcatttttagtgagtttcttatttttcttctgctttagtattatttgtgtatatttctctcaacatgagaaatagttgagaataattgatcatgggttttttggttcatgaaggggtggtttgtgacttccacacaggattcatcattatgtgttttttgagcactatattttgtgatggtgaaagaaagcatggtagatgaagcagttcacctggaggaagaatagttaaattcctgtttcatcctttcttatgccatacctaacctctctctctgcttccccattggtaagagtaggtacaattatacctgtgtaacttgatttcacagggatattatcaaggtaaataacatgttgaatcgtattctgctctctgcctcttgatatcttagaagctggtatgcctctttatggttacagagaaaccatttcacagtatcagtcaaactaaagttgtaaaaatgacagaattctagaggtgacaccaaattacatctgccagaggggcctggaagaggaggtggggcaggtcaaaaagaaggaaggaggttggtatgcacctctcctttctctacaaatccatggctaaacccagtgtttcccaaggcaaagctccctatagcctggctaccgctggaatcttgccttatgccagcttcatatgtgtggaaatacatatctggctccagaacttaatcagacacaaggaaggatattgcattactaggtaccttgaaacccctttagcttaaaagtcataatccacatataattggccaaggagtcctatggctttatatttaatttgaccaagaacttgtgaaaaatacaaacaaatgtcctgtagctggaataaggctgaagaag

SEQ ID NO: 585884 - DNA, 4001 bp, Homo sapiens
aaggcatctagcactgatttccatacaatataggcacaggtttcatgtttggtaaatggaaaaaacatggatgaatacctgaatgcttctcattgatgtatattccacatggcttctaatcttgcaaattccttgctgtaattaagttttaatatagaaaaaaaaagaaaagaaagctagagactgcacttgaaagatatcctccctaaaggaacaagtaatattcaatgtgtatgaactgaataatgtaacacagggctctattcataccaactctttaaacagttttgtgcaatagcaagaacagcagccaaataatcatcctaacatcattctgggaagtacagtggcttctgcttcccactttgggggaggaaataattacaagaatgacagtaactggtttgacaattacaacagcctggtcaagatgatgtcttcatttgcaaattgccccatacaccctgagatctctcccaagattgaataaattaaattaatacctaaaaggactcctgtggtaaaataaccaaagcaaaagaaaccaataatttgataaaggctattcacaaatgaaatttttggcaggctgggaaagagtagaaagctttgtaaagaaaagaggaaagggaataaataaaaaaaaaaaaacaaatatttttaggaaaaataccagagcagagggaagagtcaatggattaaaagacaaaaagtgtctgcagggagtgggatatgctgagctctaaagcagttaacaaataggaatttaacatttgttagccaagtaaatacttttgcagaagggacaggaaagtgcacatcttaacaagactgaaaaacattgatttgtttttcatttgaagagcaatttatttgctattcattcatagtcttacttgatttttaaaaactcatttcgcttggtaattttaaaggtatcctgaacttcgtctatacaactgcttatatatgttcagaaaacaaattcatggttgctgaactgttctttaaaacctgaccagttacaataacttttattgctttcctaaaccatgggtaaaataaagcataaatcaaaggattcatggctgagttataataagcacaccaacagcaaatctcataaatacaggcaggggttataaagcccataaaggcatcaattaatgaatcaatgctatatggtaaccatgaaatcataaatgctaccactgtgacccccagggttttagctgcttttctctctctcctggccactctggctttgtaactctctgaggatgattctgtcttgctaccagtattttctatctttttcgcctgtcgtctagccacaagaaatatgttaccatacagaattatcataataaaggtaggtataaagaaggatagaaaatctgtcaacacccagttttgatttacaacggtctgacaacctcctatacagtttagggcatcagataattcctccagcccatcgtcatagacacctgtgtagaacacagcaccgctgtacatgaggggcaggatccaggacacgctgatgcaaattcctgacacagatacggtgaacttggtaggatagaccagggggtcagtaaccgcaatgtacctgtcgatggagatgaagcacaagtgaaagagagaagagtaacaaaatgccacatcacagcaggtgtggaaagtacaaaaactcctcccaaaataccagcagctctccaccgtcctgaccatgctgaagggcatcacagtcacacccaccaagaaatcagcgcaggccagagaggcaacgagaaaattggtcggagagtgcagctgcttgaaatggaggattgaaatcatcaccaggaggtttccaaacacagccagcacagccccaaagccaaacactatgtacagaatcacccgggatcccggcgagaaggggattttcacacaggacccattcacgttcgcgtagcacagctgcacagccaccagcagggatgaattgctgctcataacgctgttatttacatatggagaagttttgtccttgttgattatcacaaaaaatacaggattgttcctgattttcagtgctcctgcggaaaaaaacacatattcaccaggatgccagaggaaatgatcagatattatctctaatataatttttcaagtttccatttttattataaatcccaaatgtttatgacaaaataaaatttgacaaaaattatattgcacaagattattggagattgtttcaactgataaatgtctcatgctcttaatttgataaaattccttttgattttaaatatcctttcatattttatttttaccttttgagtttctctgtgcaacagtcgctgatatggaatgtaattatggagctgaaagatcacctcctgttatctttatctctgttatctgtcctgcattaccgccttaaagatgaagtccttttagctaaataaatgccttcaatgggaaaatccctcgatggaatccctgtagtgcgcggtgtgaactagtatgattattttcaacagtgattactaggaaagttattctacaaaacaggtctctactctatattaaattctattatcattattgttttaggccaaagatttgtttttccttagtgcatagacttgaaccattcccttgttcccaatcataacttagccacccgggtttttgttacaaagatacaatagggtgtaaatagtaagcatcaatacttggctctttctcttctgttaagaatcaattttccatctgcattggttaccaacaagcagaaattattataatacatagtgaggggaacttgagattgataaaatatattgcatgaaagcattaaagaacgacatgctgtttagacacaccggcatttctgagatgctggtggaaagaccagtcctcttctcaagacattgttactgggaacacatctgcaatgtgtctgcatccacatgacaaatgggcagtgagccctctctctctgactacgcatttgtttgcaattcctggtgactggcctttgtgctcccgatgctaaaagcagtcaaaaaaataagaataatgaacaggaaactggaaaatgggaagagaatcctcagtaatgttcccaaccctggaatgtaaagacactgcagagtgaagaaaatattgttattattatattattgtcttcctgaagaagggttcaactctctttccagtacagggctgtgactttagagacatttgtgaacttgcttttcaagttataaagagtgataagtattattattaatcaatctcgctatctgattcctactcaataaaattaacactcttaaccaagtagttttcagatgcttcttaatattttctgtatgtctgattttgtgaaatggtgtcaatttcttatatagacaaaaccccgtgcggggctttctcaacttgagcacaatggacttttgaattcagataactctttgatatgataaattattctgttaatcacgtggcttttagcagcacccctgctacgagatgtcagtaaaatccttctagttgagataccaaaaacgtctccagacattgccaaattcctcaagggacaaaatcaacccccttcctccattaagacaattgtcttaggcaataaaaaagtgtcaagtgatgcctcgatttcaaatagaaaaataactttatatcccttcatcattctgatattcatttattaattcatctattcaacacatatttattgaattccagtagctgtgtattcaagtaatgaacaaaactgttatgaccactatactcacgaagcttataatcttaagaggaaaacaaaacttaaggaaatagaaagacagatttacaatttcaaattgtgataagtactacacagacgaaagacaatagcgtctacagtaagcacaatgacaggcagatgagacaaaggggtccctaaaaacatgagaaaacaaaaattctactttaatatttatagaatt

SEQ ID NO: 585885 - DNA, 4001 bp, Homo sapiens
gactgcttatctttatgcgaagaggagtttaggacacacgcacacagagaaagaccaggtgaggacactaaaagaagacagccatctgcaagtcaaggaaagaggccctcaaaagaaattcaccctgctgacacctagaccttggacttccagacagtagaatcatgggaaaatacacttttgttgtttaagccatccagtctgtgatacttccttattgcacccctagccaaataatacaaaaaccacttaaagaatgcagctctagccaactaatacagtgttgcaaaagacacttaaagaatggccacttgtaattccaacactttgggaggctgaggtgggcagatcacctgaggtcaggagttcgagaccagcctggccaacatggtgaaactccatctgtactaaaaaatacaaaaagtagtcagacatggtggcatgtgcctgtaatcccagctactcaggaggctgaggcaggagaatcgcttgaacctgggaggcggaggttgcagtgagccgagatcacgccactgcactccagcctgggcaacaagagcaaaactccatctcaaaaaaaaaaaaaaaaagaaaagagaagaaaagaaaaaaagtccacttgaaaataaatgaaagttgagcattaaaaaaaaaagatgattcaaaatttcacatccaaaaatgcaattcagaattcagtaaatcggaaaaaacaagtgcatgtggcaaggatgtgtacaaaacatagagacaagtgacatgtgtgaaccactttatcatttattatttaatgtagtcaatatctttacaatagtttaatagtttaatcttcctgtgacctttttcctggttaatttgaaaagtgatatatttctccaattttgaaaagttttatttgtttcttatatttaatttccttataaattcataattttaaaaatattcttaattttctcaacttagtgcttaaacttattctaaaaataaactaatggttgatgaactagcctttaaaacatctccacttaaaataagttttatggctttcctaaaccaaggataaaatagagcataaatcaaaggattcatggctgagttataataagcactccaacagcaaatttcatagatataggcaggggtcaggaagcccataaaggcatcaattaatatatcaactgtatacggtaaccatgaaataacaaatgctagtaccgtgacccccagggttttagctgctttcctctctctcttggccactctgattttataactctctgaggatgattctactttgctactagtagtttcaatttttatagcttgttgtttagctataagaaaaatcttactgtaaagaattatcataacaagggtaggtatgaagaataacagaaaatctatcaacacccagccttgacttacaataatttgacagccacctacgcagttgagagcacttactaattcctccagcccatcatcattgacacctgtgtagaacacagcaccgctgtacgtgagaggcagaatccaggacacgctgatgcaaattcccgacacagacacggtgaacttggtagcatagaccaggggatcagtaaccacaatgtacctgtcgatgcagatgaagcacaagtggaggacagaagagtaacaaaatgccacatcacagcaactgtgaagagtacaaaatttggctccaaaataccagcagctctccaccgtcctgaccatgctgaaaagcatcacagtcacacctaccaagaagtcagcacaggccagagaggcaatgagaaaattggttggagagtgcagctgcttaaaatgaagaacagaagtcattactaagagatttccaaatacagccagcaaagacccaaagctaaacgccgtgtacagaattacccgggacccaggagaatagggagtttcaatacaagatccattcacatcctcatagcaaagctgcacaacaggttgggaaaaattgctggtcatggttctgctgtttgttgtttgctatttctgtccttccttgtgatagggaattataattttgaattctgaaaattaaaacaaaaacaaactgcatatgtgagtacttacaaattttgtttcatattatattctttttcaattttaattataaagagaaattaaattcaaaaacataaaagataattctgtctttaatctcataattatttctgtcgctatgtctaaacctcgtcattaaccccaagcaaatctactatgaattttcatcagctgagtaatcacattaaccaagtaattgaagaaatgtaatttaaatacctggttttatatacatgtgaatccttcttttcaaaggacgatcatgtataatataattacatatttgagaagtcaccttttaataagcttccatctcctaggacattttaggaagccagccaatccattgtacccattataaattcttcacaaggaatccccatagtgtaaggtgtgaatcatgaaatgaatcccacttttgataattataattaataagttcacctacaataggagaactgtttctctgtgctctgcaacttggtagaaacacttatgattttcataaccatgagatttctttaagttcaactgtcctgaaatagcctaacccaagatttgacaatagtattacctattccttatttacaagactatctatataatttgcagcatccagcacaaaataaaatgcagagacccttgttcaaaagtatggacaaaaagtgtcattaaaggtactgaaatagaaagcttttacctttcttttatggtctttcttggcctgtcatagtgttcgatatttgctatggaatgcccttggacaaagaggtatttgcagggcaagtgaggactctcacaggtgtctgcattccctgccttgcaactcagcttgcacatggtccacccactgccagattccccctcctaccagctgctgaagtaatatgccatagtcaggatgggggtgagaagctgagccagggatttgcccttctcacaggcctgctacctcaacaaaaggcagaccaatgacccccaagggattacaacctgcacagcagaaagcacttgatacctggattggggttcatgaggggcttggccctgctgaggagctcatcaaacgtgctgtgacgctgccagcgggagatggaggcaacagtctatgcctagccctgagactgtggaggatgtgcctggctgcaactctccctgtgatgcatccagtcctctgcagggatgaaaagaggatggcagtggtccctggtcagagcgggtaggaggagactggatggagcccaaggtgccagggggcaggggaacatgaggctgaatacccctcccagggaagaaggaacaaggtgtaatgcaagactactagtggtctgaagttccaagcacccagcacatgctccattgtctcttcacttaacaacacacacatttgaatttcaaagacagaaattcaagacagcaactatgagcatgaaaccctaatagtaggtctctgcactgctgccccagtcatatgcccatggaataactgcctgtttcatttcagatattaaattatctctttgtaatagcagctcaatgatgaggcaaagaataccccatgtggaggtaactgcgaaatttccagacaagagggtgtagaagctgaggtccaggcagttctgaaaataacagcctttcttgacatacaggcttgtccccataatactaacagtaatttaggggattaagaagcgagattaaggaatgaagctccataaaaagaatttcaggcctgggggaaaaaaatagctaattttgatcctatatggcacctactaagtaggaaatgataaagacctttttcctccacagcagtatatataggacttgaaaatacagatatgatatgccagttaggataaaggtactaaaaatatatagaaataaattaatacatgtat

SEQ ID NO: 585886 - DNA, 4001 bp, Homo sapiens
agaattaaaatttatattgattgagaaatgtataatcagatgggaaaactgaagctgttcctagagtgtataataccaatttggatatttgctattttgaaacaatcctttgttatatttggattactcagctttatacaatttcaatgccaaatacaatatctggttcaaagtaagacctcaaaagtgaaaaactgctcatttgaattggcttttaaaaattcttattttatttaaaattactaaaaaaagaactacagaaaccatcgttttgttcacatgcttattccacaataataaattatattctccaaaagtaagatgtagtgtgtattcacataatcattaaacattttctttgctaacacagtctttgtaaaatgagcaggaagaactgccagggttcagaaaataaaagtgctcaagcatttttcagatgatctctgagcactagaaagttctgcattccagctctctataaagtctttttacattaaaataaagtttcaagaatttataatactgtgtctacttctcaagcaagatatacgtcaaagatttttgtcctcagagaatctaacttataagtaaagcaggagctttactttcccctttgtgtattttggacagctgaacactgatcatgagtgtgggagaaactacaaaacttgaaaatatttgaagatacgagtaggaatctcagagaagaaagtaaggaaccagaaaaccataaaagaatgctaaatggaaaagaatcagcaaatcttattcacttatcactaaatctaaaatatgtcaaaatacatgaagacaacaaatgctttagaacaactgttgaatgtattgtcctacaacttggcatatgatcatgcttgcctctctatgtccaagtgtttatttttgcagttgaccttaatttcaagttagttttgaggtctctacagtaatgtttttaatctgtctctacttcttcagaaaataaattagttgttgacgaatcagtccttaagaccttgccgcttacaataagttttattgccttcccaaaccattggtaaaagaaagcataaatcaaggggttcatagctgaattataataaacacaccaaactaaaatctcataaacataaggaggagttataaaattcatataagcatcaatcactgcatcaacgaggtatggtagccaagagacaagaaatgctgccatagcaattcccaaggttttggcagcctttctctctctttttgctactctttccttgtaactctctgaggaggactgagcttggctggctgtactttctatcttcctagcctgatgcttggccaccaaaaatatcttactgtatataaacaccatggcgacattgggtataaagaatagaagaaaacaaagtaggacccagttttgattcagtggagcctggcagcctcctacacaggttagagcaactactaattcctcaattccttcttcgttggctcccgtgtaaaagatcgaaaagctgtatgtgacagaaaagaaccaggaaagaacaatgcatatccctgaaactgacacagtaaacttggttggataggtcagaggatcagtaacagcaatgtatctatcaacagagatacagcataaatgaaataaagaagcaaaacagaaggatgtgtcaaaacatgtatggaatttacagtaactgtccccaaagtaccaacagctctccacagacctcactgtgctgaagggcatcacagtgactcccaccaagaagtcagcacaggccagcgacgcaatcagaaagtttgtaggtgtgtgcagttgtttgaagtgaaggatagcaatcatgaccagtaagtttccaaacgctgccagcacagccccaaaaccaaggacggcgtagaggatagatcgaggacctggcgagtaaggagttttaatgcaggattcgttcacgttcttgtaacacagctccacagcctcagcttgggagaaattgttcaccattgctttcttgtttgaactattttaaagttctcaaattcctgctttcaaaaatttttttaaaaggaagcaatttcaaagtcttctaggaggggaaaatatctccagttaaaatgataaaagtttgtgatttttctaccagtgcttttccatattaactataacgtcttgatctttctaaaaagtgttcccacattcacattttaatatatttagagtggaaatatgttgcagaaagccattaaaaatatagtcaaatatattcctaattaaatggctggcaatacacttagtccaatgagatatatatataaaatttactaatcattaaaaaattattttcttgtgtgttagtttatcttctgaaaaatctcatctataaccaccacagttgagaagtaattaggctatcaaaggctgagctttatttcttacattatctcccctgagcagcactttagcagtaatgacaaactatgcttcatttattcatgaaggaagaggtaaattacatctccttcaaactataccttcaaaatccctatggtatggagtgtgaagattaaggaaaagtttcctcataatagctttaaacttactttaggaacacatttcttctactacttatgttttcagaatttgtattttttttcttttcatattctttcacgattcagacagcttgagatgatttagagaaaaaatcttattgaactgatattagtcagtgtaaaagtattttccaggctaataggcagtgttaggtgtctaaaattaataattaaaataagcaataactcacctaacatcttaccttcccatccttagaaaaacggtgtagttttaaacctatcacagaagaatagacaaaaactggggtggaccggagggatgtttttaaataagccatatccttgaagaatagattcatgctgagtcatccaaggtgcaaatagagaccaacttgatttctctaggtgtatgagtctgttcgtatactgaagcttagggtcttaagaaggtttaaagagttcacctaacaacagtgaatggttttacttcatttaaccatgaataagtgcaaccttgcattggaatcttaatctttgagctagagactgaactacttttattggcattaaccctatgccatgggtctgggctctgttgaaagtacagattcctagaaaaggttacatgcatacacataagtcaaatatattcctaaataaatggctactctttccttgtaactctctgaggaggactgagcttttctttataaggctacagtttttaggtaataggcttcactagtctgtgaattttaaattttgtgtgtgtgtgtttgtgtgtatacaggtgtgtgtacaggtattttcaggtttctctagtattttctggcttcactgatctatgagttttaaatcaatttatttttacttttatttcccagttctttcttaccagagccctcactagtttgatggcacaagacttaatctcctccttgcaaaatgtctccttgttactcctaggattcctcagaaaagtgcatctgtgtgcacacaagtcagtctacccaataaaatcacattccatacccccatgttctcctcttcttccccaggtctcctaaggtccactgcatctcttgttttactctcaaaatggctaaaaaaattccaccactgccacatacgtggtgccctgcctgagattctgaatgtctatttaaagaatgctattttcctaaactttaaaaatccccacttccctaacacccaattgaggatgctgttgtgcaaaaagatagtgaccactttcctcagttttttatacttgagccctaaaatagcagcctttagtctcgtagagtgtcttaaaactggcccattcctggaagccaagacacttgagtagcaaggtgcatccctaagccccacatcttggtgtttaatacctttatccagtaagagcaactagggcttctttattattcaaa

SEQ ID NO: 585887 - DNA, 4001 bp, Homo sapiens
tgatgaggttctgaccattttatccacttcttaatgagtcactaaagcacacgttctactatgaaatagttaactaaagggggttcaatagtagcatttcatcagtgtccttaagagaatacttttaaactcaggaaaagtaactcgatgcacacaaaagaaaaaagaaataatggagtatattcaggggataacttattcatctataattgacgtattcaactttcagtttgattcttgaaagatttaaaacttaagcaccctctattagaaactgattagacctatgggggaaaaacccaaacagaagttctgaatcactggaatttttgttctatttcctgttaacacattgatagtacatcatattcgttccatacatgtttttttaaagcagcagaatccttaaactaactgtaccctaatttagcctatagctcatgtatctaacaattcttcccattgtttctaattaaaatgctcagccaaagcctacaacaaaagaaaagcaagtcttcctttattacaaactgccatggtttcaaaatttacagtttcaaaccgtcaaaagtttaaaatcgtgatttcattgttacaaagaatgtaaagatattttttaaaaggtgtcaatactctgctactgtatgaacagtgtagtaagcagaagtgaaaaaactgaaagcaaatattctattccatgcccactaaaattcccggccaaatctggaattgcataatgatcatcataacctttagagtatgctaaagcggaaacgaaattccttttctaaaatgtgaatcaatctgaccccaaaattagacactttacaaacttacctaaaacagacaaaatggatgcaaaattatattgccgtacagttgctctgaatacgatcttagcgttcaagaactttccaatgaataagggtactcaacagcctgcactgggggcctaaatttcgtgaactacggagaaacccctgtgaggctgcaaattccctccgctctcctggaaaaccctcttatcagaaacatttgaagaatttatccacaacaattaagctgacttgaagaatggaaacctaacatctcaaatatactatatatggaatgaaacatggccaaacacataaatacaaactcacacggtctctgacactttggtgtacgactgtgcctgaacatctcacagcatcagcaacagaaagatccacctgtcacctgttcagcaccgccaagagacccttgcagcctccctgactcaaccacaatcgtagggtttgaggttgatgggaccgaaaaccagaaacatccagtgaaatttaaggggccacatattcatagtagggcttgccccccacttcaaagacggctgcagaaaaccaagatccgcaaaggaacgatgttctccctcccgcccgacccccacataactgccccgtgtctgtccccaaaacccccgcccctgagtcatctttaactagacctcggctccccaaaaggagatttttcctcccccgcccccacctcacacatgcctgggggcgggtcaggggcgccgacgcagggaggggccctcccgagccccttgcgccctcccccacccggggctctcctaggcgctcgattccaatgaagctccccctccccccccgcacggacgccccggagcccaggcccggcccgatgctccccacccccaccggactgggggactcggggggcctccctctccgccacgccactgggggaaggaaagaggcggagggaggaagagtgcaagttagaagcgaacgccccgcacgggcctcgcgaggcggcagagccccttccagacggaggggggtgcggggcgatgaggggagagccaggttggggatcccgccgaggcccggcagcgctgtccgcttaccctttgccgccgccgcttccccctcctcctcctcggccgccgccgccgccgcctctcccactagggcagccgtctccaccgtcgcctccgccaccacggccgccgccagcgccgccgccgcctccggttccacccggcaggggggacacctcagccctccctccctccccgctcagccccctccgctcgcccgccgccgccaactccctccggccgccgccgccgccaccgctcctggctgagggggaggggagggggtcgggctgggtcgccccgccggcggctgcagcagatcaaaaacgacggctgggcggcgtcgccgctccccaatcctcagctccggctcgctcggcctccccacctccctctgcccccacccccctcgcgctcgcctgccctccccccacccccccagctctcgctcgctctcgccgcggctccgccagcccagtccaaatcaaaatactgtcacacaatatggcggcgcggcggccggcaaacaccgcgagatctgcagccgcggctgaggcggcggctgtgacgaggcctcccctagccgaacggcgggggagcagcaggcggcggcggcggcggcggctgcggctgcggcccggggatgctcttcctccgacctgtacccctcccccgacactcgcagtctctacgcctgtcttgctagggctggagggaggacgcgggccgccgctggggccgtgcgaggggggtgccggtgcgggcagcccggggagggctgggaccccctttctccgcctgggccccccatccttgggggtaggttgcgggttccacctcccgccacgggggccgctagcagtttgggctgagggaagaaaggaactgagctcgcgtcccagctgcacctagcggaggggctggccgggtccggaagtgggtggcgggacttgccgggcggccggcggcgccgcgcgggtggggtccgggggcccggccggaccccggggcgctgcggcggccgagaggagcaggtgggcccgcggcggaggctggcgccgggtcgctgcggtccgggacacacccccttggagccggatcgcaccgccggctaacgggagggacccgtgcagaatcgtccctagggtgtgcgggagacgtcttgggagcctcacaactggcaacttcgagacttggaaaaagtgtcggcttctgacttttcttgagcagttgagggggaaaaaagaaatctaaatgctgcgagggtttcgttgtttcgattttattttaattgcacgttcctagaagtcctagaagcagagccaaagactagctttgcgggaagagggggggccttcaagtttctacctccttaaataaatatttgtttagtgtccccctagggaaaaaaaaagcgtgtttaatactcagacgtttctcacaatgtgaaatatttatttaaaaattctagcgcttccatggtgtccaaaacactagggcatttttctgcccctgtccaaaatgtccatatccctggcagtttcttccttgaaacaattcttactccagagaaaaatcctaaaggaccatttttatacttttatttccagtgtgagcactgtagctacagtgagaattttttttaaaccatcttttaaatagtagagccttcctcacagttaaaagttctttctccccacttcctttttcctcattcatcctttgaaaatacctgaagtctgggctatagcaccaattcaaatactttgccacttcaaaagctgaaagtacttatgatttacaatatcggaatttaattattctccattggtgataccattaagagaagcaaaagtaaaattaggatttacaaaattgggaagattctagttttactggcgagaagaaatcattaactttaacgctttacagcagttctctgaggaattatttccatactcaatgataaaataattgattaaataattttagataaactgaatccattaagtaaatttcacttgtctttgaaaccattataaagtacagaggcaacaattgcttttgaaatggtaggatgatgtattttatgcaaatttttaaaaaaatttatgga

SEQ ID NO: 585888 - DNA, 4001 bp, Homo sapiens
ataaacaaaagttctttggggttttcgataatttttaagagcgtaaagaggtcctgacattgaaaaaaattgagaattgcttgtctacagagtacggtaagggtctcttgggactttcaggtctatcagaaacacactgggaactatcaaaagtaatgaaagaatctggccagtcaggatatggagaataatttctttgaaacaagagtaaactgtttctaggataccacatcaatgcataaggtgcagcgggtgaatcagagccactgattaaaaataaaggcaacataaagtactgggtaactttgaaaacaaaacagcacagacttctctgactttagttggtcataagaaattttctccagctcttcatttttaaaaaagagaaataatttaaagagcaggtttgaatgaacaataactcagttggtatctcaataaggccactttactagcgggcaatctgggcaaactagtctcttaagtttgaccttagtttccttatctgtaaaatggggtaataacacatacagttgttagttataaagtgtgacactgtttacttatatacttgtcccagtacacacacacacacacacacacacacacacacacacaaatgttaaaatatgaaacacttggtaagcaaaagttaaccctggaagcggatttggcacaactatgggaaatggtggccttgcctcattgagaacagagattttctaactgtgaagcttctgggctctgcagtggtttgaattttgggaagtgttctgtatgtcctttaactatctggttgtcactgaacgctcccagcccaatcatccccagagactattgtaattagtaactgagtaagtgacaatgaaagagggtttataaagaaaatatatgccatccaaacagaaagttcacaagtttcctggacacagctctttcttttctaaatctgttttttgctggcaggatgcaagcagtctctttcctttacagtcacagatttcaatggcattttaaaaagtactaggtctcctttctttactcacagtgtgcatttcccaggcatttctacagaagttcaaacagacttcagacacaagatcacagaagatcctttctccagaaacaatgactgtttcctgccttacctgcattctcagttggtttgctttggaggaataaacttagtctcaaatccttcttcatccaggcagtcatattgaaactggatcagatggtgtttagatctttacagcctgtggccctgaaggagttcacctcactgagcattagtcttctcatctgtaagaatataagagtgtctttcaacccctaccctgaccctgtcccactggagggcttgcttctaagaggacagctccttttggaagcatgagccagagacccaacttgaaccagtgtcagtccaagacttggattctcttttcaggcttaatgccactcttcttttgcttgttctttcatcttcttttaaatcttaattccaaatgagtctcttttttgtccctgattaagccttttaataaatctttttttccttgaatgagtattaatccttttccctgaataaacataaaacatgtgcagtgttcttttggccttctgcaagaatacattgttctgtgtggccaagaaccaacctatccgagtacaaaatttactgcaaagaatttttaggtagtgtcaaacaagagccattgagggctaactaacaataagctttctactcttctttaaagatttgtctagtatattttttaagactaacaaatcatcactgagtgcagaaagcccaaaattgctcaaataagatgcataccaggttagtatgcagttctgcagctcagggacctaggctcctcttgtctcgtagttctgctatgaatggcctccattctcatggttgttgtcatattctgagactgttgctccagcttcagcttttgcctccatacttaacatttcagactccagaaaggaggaaaaggaagtcctataagaattttattttcccccaagaaaaaatgcataaagtagttaaaattacatcccattggccaggactcagtcacatggctgtatctagtagcaagggagtctgggaaatgcagtctttattccaggcatcatgtgcaggctaaaaaggggagaggattctattactatacaggaagagaaaactgggtattgggaggcaactaacagcctctgtcaccagtggtttttatgctggtctcaccatctggccaggaaggagagatacaacaggctaaacccagagttgccaaactttttctgtaaagggccagctagttaatattttaggctttgtggccatgctgtctctgtttcaatcactcaactctgctattgtagtgaaaacatgcattgacaatatgtaaatgaatgtgtgtggtaggatttgacacttgggccttaatttgcttactcctgagctaaacagtaatactaatactaaaattaagacatattctttacttactgtgaatgtgcgaggcactgtgctgagctgagcacctcacagacattttcttaatttcctacaaaaactctgtgatgtaggtaacatcatcatgatcatcaccagttttatctatgaggaaacggaggcatggagaaatgaaatgatttgccgaaggtcaatagtttgtaagtggcagatgggttttaagtggagacatcaactctgggacccattcctacctttctctctgagaaagtctgggcaagggggcaaccagaggttcatgaccagggatttgctccaaggcagtgaatttaggaggcacaaaagacttaaataatgactttaaaagtttagtacctagttagcaaaaatagttggttgaagctgttagacagagcgttggtaagaaacctcgctgtgggccgcatcaagaactactttgttgatttaagggcttaagtgatcttctgagaaccttaatgtctccaaatcaaggtaactggctgtgtgtcggtattggtggggcttttagggtgagggccccactgcaggtagctgtgactaggtcggggctgctgtgtactagcatgtgactatgaagagagcaggaagtgacatgtgtagctccatagggctgctcaggtcacggtctgaatttccatatgaggtggtctagtggccggagaaggcagaaggagacagaattccaggaactggggaaagcctggatgaatgagagaggtgagagccccagggagctttcttttcttttgttttttaagacaggctggaatgcagtggcacgaactcagctcactgcagcctcaacctcccaagctcaagccatcctcccttgtagcagggactacaggcaagtgccaccacacctggctgagtgtttttcctttcttttttttttttttttttttttttttttgcagagatggggctctgccttgttacccaggctggtctcaaactcctgagcttaagtgattcacctacctcagcctcccaaagtgctgggagagctttattttcaaataaagggcaagacatttgattcggaggagagataaaagagaaggtgcccccagatcttgctgctagagtaatgcttgaacccagcagaaaaccctccttctctgtaggaaactggcaagtctatatttttagcacctagcaaccttgtatgacatactaagattgccctccaatgatgctatctccagggagggccgtttagctaagcagagcatgggcctccttggctggagcactgactttgccaccacaaggcctaaagttcctttccagctcttcataatttctggaaagccacctgatttctcaaatcagggataatttattatcaataatctgaacattacatatggtttgcagagcagctgcatgtgtattatttcatttgattttcataacaactctgaagagaagtggtgagcaaaatgaaattaacacatatggctct

SEQ ID NO: 585889 - DNA, 4001 bp, Homo sapiens
gttcgagaccagccaggccatcatggtgaaactccatctctactaaaagtacaaaaattagccgggcgtggtggcaagcgcctgtaatcccagctactgggaaggctgaggcgggagaatcccttgaacccgggaggcagaggttgcaatgagtcaagatcgcactactgcactccagcctgggtgacagagcgagactgtctcaaaacaaaaaacaaagaaaacaaaaacaaaattaaaaaaaaattgtttcccagtcttagcaatacccttagctgaaggcaagcgcttttttccactagaggaccaagcataggtgtgatttcaatcaaacgggattaagttaaaatttatttttcaaaaaacatgtatttgatgaggttctgaccattttatccacttcttaatgagtcactaaagcacacgttctactatgaaatagttaactaaagggggttcaatagtagcatttcatcagtgtccttaagagaatacttttaaactcaggaaaagtaactcgatgcacacaaaagaaaaaagaaataatggagtatattcaggggataacttattcatctataattgacgtattcaactttcagtttgattcttgaaagatttaaaacttaagcaccctctattagaaactgattagacctatgggggaaaaacccaaacagaagttctgaatcactggaatttttgttctatttcctgttaacacattgatagtacatcatattcgttccatacatgtttttttaaagcagcagaatccttaaactaactgtaccctaatttagcctatagctcatgtatctaacaattcttcccattgtttctaattaaaatgctcagccaaagcctacaacaaaagaaaagcaagtcttcctttattacaaactgccatggtttcaaaatttacagtttcaaaccgtcaaaagtttaaaatcgtgatttcattgttacaaagaatgtaaagatattttttaaaaggtgtcaatactctgctactgtatgaacagtgtagtaagcagaagtgaaaaaactgaaagcaaatattctattccatgcccactaaaattcccggccaaatctggaattgcataatgatcatcataacctttagagtatgctaaagcggaaacgaaattccttttctaaaatgtgaatcaatctgaccccaaaattagacactttacaaacttacctaaaacagacaaaatggatgcaaaattatattgccgtacagttgctctgaatacgatcttagcgttcaagaactttccaatgaataagggtactcaacagcctgcactgggggcctaaatttcgtgaactacggagaaacccctgtgaggctgcaaattccctccgctctcctggaaaaccctcttatcagaaacatttgaagaatttatccacaacaattaagctgacttgaagaatggaaacctaacatctcaaatatactatatatggaatgaaacatggccaaacacataaatacaaactcacacggtctctgacactttggtgtacgactgtgcctgaacatctcacagcatcagcaacagaaagatccacctgtcacctgttcagcaccgccaagagacccttgcagcctccctgactcaaccacaatcgtagggtttgaggttgatgggaccgaaaaccagaaacatccagtgaaatttaaggggccacatattcatagtagggcttgccccccacttcaaagacggctgcagaaaaccaagatccgcaaaggaacgatgttctccctcccgcccgacccccacataactgccccgtgtctgtccccaaaacccccgcccctgagtcatctttaactagacctcggctccccaaaaggagatttttcctcccccgcccccacctcacacatgcctgggggcgggtcaggggcgccgacgcagggaggggccctcccgagccccttgcgccctcccccacccggggctctcctaggcgctcgattccaatgaagctccccctccccccccgcacggacgccccggagcccaggcccggcccgatgctccccacccccaccggactgggggactcggggggcctccctctccgccacgccactgggggaaggaaagaggcggagggaggaagagtgcaagttagaagcgaacgccccgcacgggcctcgcgaggcggcagagccccttccagacggaggggggtgcggggcgatgaggggagagccaggttggggatcccgccgaggcccggcagcgctgtccgcttaccctttgccgccgccgcttccccctcctcctcctcggccgccgccgccgccgcctctcccactagggcagccgtctccaccgtcgcctccgccaccacggccgccgccagcgccgccgccgcctccggttccacccggcaggggggacacctcagccctccctccctccccgctcagccccctccgctcgcccgccgccgccaactccctccggccgccgccgccgccaccgctcctggctgagggggaggggagggggtcgggctgggtcgccccgccggcggctgcagcagatcaaaaacgacggctgggcggcgtcgccgctccccaatcctcagctccggctcgctcggcctccccacctccctctgcccccacccccctcgcgctcgcctgccctccccccacccccccagctctcgctcgctctcgccgcggctccgccagcccagtccaaatcaaaatactgtcacacaatatggcggcgcggcggccggcaaacaccgcgagatctgcagccgcggctgaggcggcggctgtgacgaggcctcccctagccgaacggcgggggagcagcaggcggcggcggcggcggcggctgcggctgcggcccggggatgctcttcctccgacctgtacccctcccccgacactcgcagtctctacgcctgtcttgctagggctggagggaggacgcgggccgccgctggggccgtgcgaggggggtgccggtgcgggcagcccggggagggctgggaccccctttctccgcctgggccccccatccttgggggtaggttgcgggttccacctcccgccacgggggccgctagcagtttgggctgagggaagaaaggaactgagctcgcgtcccagctgcacctagcggaggggctggccgggtccggaagtgggtggcgggacttgccgggcggccggcggcgccgcgcgggtggggtccgggggcccggccggaccccggggcgctgcggcggccgagaggagcaggtgggcccgcggcggaggctggcgccgggtcgctgcggtccgggacacacccccttggagccggatcgcaccgccggctaacgggagggacccgtgcagaatcgtccctagggtgtgcgggagacgtcttgggagcctcacaactggcaacttcgagacttggaaaaagtgtcggcttctgacttttcttgagcagttgagggggaaaaaagaaatctaaatgctgcgagggtttcgttgtttcgattttattttaattgcacgttcctagaagtcctagaagcagagccaaagactagctttgcgggaagagggggggccttcaagtttctacctccttaaataaatatttgtttagtgtccccctagggaaaaaaaaagcgtgtttaatactcagacgtttctcacaatgtgaaatatttatttaaaaattctagcgcttccatggtgtccaaaacactagggcatttttctgcccctgtccaaaatgtccatatccctggcagtttcttccttgaaacaattcttactccagagaaaaatcctaaaggaccatttttatacttttatttccagtgtgagcactgtagctacagtgagaattttttttaaaccatcttttaaatagtagagccttcctcacagttaaaagttctttctccccacttcctttttcctcattcatcctttgaaaatacctgaagtctgg

SEQ ID NO: 585890 - DNA, 4001 bp, Homo sapiens
gagccgagattgcgccattgcactccagcctgggcggcagagcgagactctgtctcaaaaacgaaacaaaacaaaacaaaaactttagatgagcgtggtgcagcatgcctgcagtcccagttactggggaggctgggataagaggattgcttgagcccaggaggcagagactgtgccactgcactccaggctgggtgacagagtgagaccttgtctcaacaaacaaaaactgccttaaaggagcttgcagtgagccaagatcacgccactgcacactccagcctgggcaacagagcgagactcggtctcaaaacaaaaaacaaaaaacaaaaaacaaacaaaaaacctgccttaaaatacttttgtcaaatgttctcttttcctttttctttcttttcttttctttttttttttccgagacggagtctctggtacccaagctggagtgcagtggtgcgatctcggctcactgcaatctccgcctcccaggttcaagcgattcttgtgcctcagcctcctaagtagccgggattacaggcgcccgccaccatgcccagctaatttttgtatttttagtagagacggggtttcgccatgttggccaggctggtctcaaactcctgacatcaggcgatccacccacctcggcctcccaaagtgctgggattacaggcgtgagccactacgcccagacaaattttctctttttctaaaagtttgtactttatacattttgatgcaactttatgctctgaaaggctatttccatctaatctactgttcacccacgatctcttaaatcccttctagctgtaagaccccaagattctacttctagaaatgtaatcctgagaacgatgagtttctggtcctgaccgatactcagctaggcaacactgctgaactctctgtagcataaaaacaccagacccaattgatgggtccctgatcaccgggtgcggtggctcacgcctgtaatcctagcactttgggaggccgaggcgggcggatcacgaggtcaggagttccagaccagcctggccaacatggtaaaaccccgtctctactaaaaatacaaaaattagctgggcatggtggtgtgcgcctgtaatcctagctactcgggaggctgaagcaggagaatcgcgtgaacccaggaggcgcaggttgcagtgggccagagatcgcgccattgttctccagcccgggcgactctcaggttaaatcgtgttcgatataaaagtctatatcgatatagacttttcgatataaaagtctatctccctttgacaggtctgatcgaccctccttcctataaagacaaaagttgtcttaacatctaagaggaaccatattgcggtgaaaggggtgctacgaatcctgggttttagctcttgcactacgtctcagtgtgacattggatcccaatttcctcaccaccaaagccaacgggctattataactcccttagaagtagctttaatccctaaagacaagactaaaaatattaacagtgcttgagcctctggaaccgaaccagcactggagttttgtttggtcgtcccctctcttccccctcaagattaacgatctggagggaattctggtgagttcgagttctcgtaacttgttagggactaaccagaagcccggcgagcagccagtaacacaatctctgggtattccttcagcctcatcagtacatctcttcctacctcgccttcctccgctgcagcttctttcaagtccacatctgcgtctccgtcagtttcctctgggattccatcggtgtcggtagcccccgggtccccgggcacagcggccgtctcatccgactcccctgtctctccacctttgtcggagggcgactcgtgggcatcgtccatcacggataggattggaggggagaggagatcgcggagatgcctgaggcagaagctcggaaacccgagctgcacaggccaggatcttacttcctgtcgtcgcgcagcgatgacatcacccctaccgctctcctgaggggtcattttgaggcgcgcgtagaggactagaggactcattttaactttggtttggcgacagtgggaagcgggaaaattggacgtaaagagctcagactatggatcctcctcgctaggaaaccagcacttgtgaaggagcgcagttttgtttactaaataactttttccttttcgcctgtctaaaaatgcaatgtcagttaatcccttcgttaacccctcagagtaaagttgggggactgggagaaaactcagttccgttgtatggcggtgtcgtggaatgaggctccccgggactggtaaactttcaggcaaggactcaaccttgtatatttcaactggcccgaaaccgcgggcctgtgtgtacatagaattgctagcatttcccctccattccgcaagcaccttaacaacaaaaagtcatatagctcgagcagaatttatccaattcatttattcatccacaactattgactgcctacttcgatttagaaacagtgctagtaccagggaacaaaacacacatagtttctacccaattaaatgatttttttcagttcgccagtactgaagattgaggtttgtttttacaagtctgacacttttctatcagtttggttaatctcattaaaactaagaggaaagcctaaagagaggaaggtgtctcctttgaacgtttcactttaatgaactagttcacgtactgggaggatgaagtggtgaggatatttctgttttaaaattttcttctcttccctcattgagatacgagggggagggcgttttattcacctgggtatgactaggtccccgcacctattacatatttaatttatgcgtgctgaaagaatggacttggaaatgtaggtgcgcgttacatttatctctttgtttctacgctgcctggacgaattaccgtatttcctgtcccaggagctcccaaaacctttggggaaggagcgcacttcgggaggcgcgtacaggtgggcctgtttgtccctttccacctgcataatgggggcccacaaggcgctgtccccatgccccgagaggcgtgtctcggcacagcaaagtccacctgcgctggtccgcggagccccgcccagctaggtgagctagggggcggggcgcgggggcgcggtgacgcgtgacgccggatcccggaagtgacgcgctcgtggggaaaaggcagggagggggtggtgtccccagccggtttggggggtgcgttgcccggagacggaaagtttgggagcccgagcaggctcggctgcagcctcggggagggggtccagcgggtggcggccctggggatggggaaggagcaggagctgctggaggcggcccgcaccgggcacctcccggcggtggagaagctgctgtccgggaagcggctctcctcaggctttgggggcggcggcggcggtggctctgggggcggcggcggcggcagcggcggcggcggcggcggcctcggctcttccagccaccccctctccagtctgctcaggtgggtacgcgccagggccgggccgctgcctgcagaccctttctcccccacccgtctcttgggtccccagagagatcgggggtcctgagactcgggcggggtgggcttgtggcgtgcccggggcgaggcaggcggcccgcgggccagggtaccggagggcgcgcaggtccgagtccacgctgctccgggctcgcctggtctcccgttctgacccggctgcgaagaatggtgggagtgcccaggtggcagcctccgccgcatggcacagccagggttcactctcgctcgctacagggtgccagctatcgtagctcacaaaagccaattaagagcaaatatgtatatcttatatatatatatatgagatctccctcacctcctgcagaaactcctacgccttgtagaatctcgaggctcctctggaggaaattctattgattttcttctctgaggaacttggaaccttccaccag

SEQ ID NO: 585891 - DNA, 4001 bp, Homo sapiens
cctgtctctactaaaaatacaaaaattagccaggcgtggtggtgcacgcctatgatcccagctacttgggaggctgtggcaggagaattgcttgaacctgggaggcggaggctgcagtgagctgagattgtgccactgcaccccagcctgggcaacacagtgagactctgtctcaaaaaaaaaaagggggggggggcttttccccttcattctttgtatcacacaatctagcatttcattacataatgtgatgatatctattgcatggggaattagtcctgactccccaacaaaagtccttaagggcacccataactcaccaagagcttaaaatctccccagcactgaatgttttatatatacatctcacttacactcacaaatccatgaggtagaaactgttatcccatttcagaaatgaggaaattgaggttcaggagattcagtggcttgcccaagctattaagtgacagagtgatgatgtacaccaagtctatctgattctaaagcctgtaagtcacttcattatgctcttttctgtttttgttgttgttgttggagatggagcctcacaggctggagtgcagtggtgcgatctcagttcactgtaacctctgcctcccagattcaagcgattctcctgcctcagtctcccgagtggctgggattatagacacctgccaccacgcccagctaatttttttgtgtgttttttagtagagacggggtttcgccacgttggccaggctggtcttgaactcctgacttcaggtgatccacccgcctcagcctcctaaagtactgggattacaggcgtgagccaccacgctcggcccattgtgctgttttcttttctcaactttttacattaaaaaaaattttttttctcccctcttaagaaaaaagtttgtttcttaaatcctctcaaacactatcacaaagcagggcacagaactgatgttggggttgactccaaggccaagtgtttccatgtactcacagctctgcagcatctctgtcagcgtttccacggatgctttctcggcactctcaaaccctgcctctgtcagcaaggagctcacaaccacctgcagggttctcctccgggccagatgatagttatcggcagggttagtggactgtttacttcccgatctctgtgaatcagcagagagattttcatccacaggagaaggatgcaatcacatagttcatacgtggtcaacggcaagcaaagttattttactaaataattttattttaaaaatcagtgcttaatgtttagatttacagatcttggccaactgagtaaaaattgagcacccaaggtgctttaaatacagagaccacttctccgcttacctaaaacgtacagtcccaatgagataaaatagcaggtcttttactttctactttagcagattattagaatacatagctgaagaaacacgcatgatgggattaagacgtgtcccgcagaaaaaacaggatccctctcttgtgcctcccatcttcacaccatttcattgaaagggaaaatgaaaacagtaacaagaggtgaccgcgaggagaggagggcaaaagataaaagcacaaaaaagtaagaaagctaaatattttgaaacgggaatgcctttcaactttggccggccaataagaaggcgaaaacggcatcttcagaccaatcgggggtgttccgggctcccaacccccaacagcgaacgagccaatcaagacacaggtccgccaactccggaggccgcagccaagtcccaaggagggggcgcctacggcctgaaaacaccctccgccagtcggagctcatgatggggctgaatttctgggcattatcttgttgctcagtcgaggggaaagttgcaggatacccaaactctctcggctccgagcccgcgcttcctgcccttaccgttccggagccaccggccccagctgtggccgccgcgtcggccatcttgttctggcgtagtgtgcgcgagcgcggggcgcgatgggacttgtagtcgcggggcggggcggggcggggcggcgtgcgccccttggttttccgaagcccagtcggttgggggacgcctccggtgaccccggctcacgtgactttttttttttttttttggatacagagtcttgctccgtttcacaggctagagtgcaatggcgcgatctcggttcactgcaacctccacctcccaggctcaagcgatcctcccgcctcagcctccggagtagctgggattacaggcgggcaccaccacgccccgctagtttttgtatttttagtagagaccgagtttcgccatgttggccaggctggtctcgaacacctaagctcaagcagtccgcggcctcggcctcacaaggtgctgggattacaggcgtgagctaccgcgccagcctcacgtgaccttttgagagtgaagtgttctggggccttcagtggcttggttgtgggccaggaaaacgcgcccggtttcactgagttaaaagaaacctattttaatatgaaaatcggttcttataaagagcataccaggagatcatctacactcgcagggttttccaaacttgtcttattattagtaacacctggctgggcccagcccaatcccagtgacttcactctctggaagaggggcttgggaatctttctcattaaggagctccccagatgattcttctgagcgagtaatgttgggaaaccctggagcatccagcctggtgattttgtgctgagggccgccccgcctgtcaatggcccacttggaagtagagcctggaccacctagtccaagtctatcgctgcatcctgctgccttcgcgccctcgacccgcaagtatttgcgaggcaagtctagggggcgggagacttgtcccttgccgcctcactcccagggcgtggggtgcccgcggctaccagtggttttctccctagcctgtcagcccctctagctgcgccgtgttcgtccccatttgcaggtgcctggcaggacgcagattctgggcttggatcctaacactagccagctatggtacttcgggcacttgaccttaatcctcagtgtgtctcagtttcctcttctgtaaagctgggggaaagatgagatgatacacagaaagagtctgtcacagtgcctgacgtgtagtaagagtcaagaaatcggccgggcgcggtggctctcgcctgtaatcccagcactttgagaggccgaggcgggtggatcacctcaggtcaggagttcgagaccagcctgaccaacatggtgaaaccccgtgtctactaaaaatacacaaaattagccgggcgtggcggcgtgcgcctgtagtcctagctactcgggaggctgaggcaggagaatagcttgaatccgggaggcggaggttgcagtgagccgagatcgcgccactgcactccagcctgggcgacagagggagactccatctcaaaaaaaagaaaaagaaaaagaagtcgctcctcatgatgttgtttacttcctggatagcacgtggaggagttgccaacgccgggaggcagcggtccgggaacccgtgctgccccggccccgccgcccacacctgagcctccgtggcgccccgcccccgcacctatgccgcgtggggcgggggctgcgggcgggggtgcgcggcgccggatgagcctcctggcctcgccgagggtgtacagggggtgggagagtcaggccggggaccgaaacttggctgagcagagcaccagcccctttgtctcctccgccccctcttccccacttcctgcccagctctggatcggcggcgcggcgcggactttgtaaacacttcgccactgcaggggtggagactggctctgttcggatgccggccgggggggagaggtgcaatcctctcctcgcggctggtggttgcgaccacccccactccccaaaggcaggctccggaggcggcgggacagagcgcctgcgaccccagtcggtgctccggggaggtca

SEQ ID NO: 585892 - DNA, 4001 bp, Homo sapiens
tagcttaaagataatcccgaatttctacactttgctggtgagcctgtgttaaagttctcaggtctgattttatctcatacctttttgaacatcttacattttcagacttccctacctcttgggatttgtgaggattgaagttcgctttctactttttgaagaaatatttcatttggctaaaattaaaattcaaaagtccagggcaccctctggtttttgttctgggagtggacgagcaattccactcggattccctaaacatcacaattctcatggaacagggatcatgaagcatttagaaagctgtgtaaagaatcaaaagacggaggtgatgtggcctggcaatgaccgatgactttgatgacttactgtttcagggcctcgattctgtcctcctcgtcctgcatctccagagcacccatccactcctcaaagaggtcgcttgaaagtagcttccgggggatacttctgaggaagtcctgggggatgagagtgggctgttggcctattggtactgtatgatgtcccatgtccttgttttcacccggttttcgttccatcgcagggtgctctatgcttagcccatcatagattgtggcccttcattcctgcatttgatgaatccagggaaccctctctccaacacccttggcctctctgcaactttctaacatcaggcagagtcagaggcaccatccccaggtgggtgtgttctgaggggccactggattttgacgtatggattctgccacggaacaatcaaattgcccgtacttggcaaagttttgggagagcagaatgcatcactttctgttggaatctgaggtcacagaaacagaggtgcttactaaataaataaataaagggcttaatgaaaaaaattaaactccaagatcagtgtaccttgctgtgtggggagaagagcctatttcttgcatcctgagaatgagtgtgtcagggccccttggcaggttatttggcgcaagtgtgttgaactcaccttaaagaccacagcgaggaggtgcacggggagcctctccagatccaccgcatccccagagttgagctcctccttcagctccttacgggctttctcgttggctgctctcctgaatatcccttccgttgaagggcctttaaggcatagaatagtgagaatgtcctaaaggaaacagcaataggaacaggaaagggttacccttcttctttagtatactgagatagtcttaacaggaatattgatgtcagattttgctttcagtccagttgctgtcaatggccttcctcaaccctgctatttttctaagaggaggcaaattgtgaaagctctaattttgcactttctaaaatcactttggagctctctcctttcaaatacttccatatgaacattggatttcagatcacaaagtctatattctgtttcccccttttgacttttcagaagctacaaatcttcagcattctccactctgtgaagtcagaggaatggcgggaccatagctctgagctcattggcaaatacaactaatttcaatttctggaatggaagcagtcagatattcttctgactgcacgcgtatgtgggagtgccatgttgaagagtggaaaatatggaagatcagtccctacaaacttaataggagaatgacattcagatttcccgagtattttgcatgtccaactgaaaactgaagtaggtttatgagagaatgcacgcctacctggatgggtctggggagtgtgtcactgtcaccgcagataattgacaagggctgatcaaatagcgatgctttcaagtctgtctccaaagccccagaaaaatctgatgcaggggagagccttctcatgagaaagggccaggacagcaccttctttctcttcttaacttctacagccaagaaaacaaggcaacgagaaaaattagactacagtgttaagaagcaaagatccaggtaagaaaatgggtatcgttggccgcataatgtggtcaatagtatgcgatgtgagaaaaataattttgaaaacttgagaaagcaaagggcgtgaatcttaatctagaaaaaccaaccgataaacaaccacactgttaccagggcaaccagttccctaaacagcaacaccagagttcctcaaggcctccacctttcctgttttcactctttccagctgtttgctacagaaaattagcaaaacctaactgtgctgatcataaacaaccatcttaacctactggcctgaataactatagaggaaatttctgatatgaaatagattattttgatttcctcctttaactggcgaagaaaacgaaacttaaaaggtgaggaagtgacttgctgaatatcttttcgaaggcacatagcagggctggctccaaccctttgcagccacgcaggcactaaacagccactagagggagctaacaccatttttccttccaggtgactggtcaccttgggttttccaggttgctgctttaggacagaggcaaatacgaatcgctgcgggaagccttgaacctagatctggcaactgggaattatcagcaaaacgttatcaagatattctgtccttctgaaatccacaagatgtgtgtgcaatggatattgcaatctcaaacatttccttctttcttttcttttccttccttccttccttctcctttcttactaattataaaggctatattttctaaatgcattggcatctgtttctatacatttcagattggcaagtggaagcatgatgagaaagaagtggcctgtctttatggttcaggagaactgggtcagggttacgctataatgaaatgcattatgaaaaaagttgagagtgaatggtgggtcctttgggatttgagatcagcaacagttgcttcataggctcttggatgcattctccataagagaaggaagaaaatggaaaagacactgtgtgtttttcaaatgtgtgcatgctaattgtcgaaacatacatggccaggagattgaaccgcattaaaaacgcttggcagaactggggattctctatggagaggctctttcctttcccagcactccctgctctagtgagttggagcatacctgccatttaagggttaatgttctgcggtctttaacagaacaacttatacaaaaaaattcctagtagagtaaaagcgctgtggttttgcaaaccaagagcactggttgttagcacttacataaaagatcggtatgtttttaaaactcaccaatgagctggcaaatactgtcttcactctcacatgatgccaacaggggatgttccttgatatcaccctaaaaacatttttatttcagttaaatatagtgactgaagaaacctatcgagtctttccccacaaaacacacatacagcattttattcatattaaaaatgaagtcagtagagtgcattgatgttttttctagcttctagaagcaatattaaggtcttgattgtcatcatataagatcctaattaatgtgcttaatttactacatgtgtgatgttagtttactactcttataattactattcaacccaaataatattcaattaaaacaaagttttccaccttctcacagtacagataaaaagtcttaaaaattgctttcttacctctgattgacattcgattagtgtctccatattattggcgtttagtgtttttgactaaaagagaaaaaataaaattaggtaaatatcttttggcccttgcctgtaggaaacgtgaatgaatgaatgtgagaggggcactcacagcattgtggctgcttctcagcttcatcagtattgcggctgactgtccaggggtggatttcactcccgtgtggctgtgcctctgtctacaacgaatcacatggaaaggagttaggagggactcacacagtaggccactttcagcgccactttgccaaagcacagagtttgaaactatttatttatttttctcttttgctattttttcacttgcctttactttggaaaaaactatt

SEQ ID NO: 585893 - DNA, 4001 bp, Homo sapiens
acgctataatgaaatgcattatgaaaaaagttgagagtgaatggtgggtcctttgggatttgagatcagcaacagttgcttcataggctcttggatgcattctccataagagaaggaagaaaatggaaaagacactgtgtgtttttcaaatgtgtgcatgctaattgtcgaaacatacatggccaggagattgaaccgcattaaaaacgcttggcagaactggggattctctatggagaggctctttcctttcccagcactccctgctctagtgagttggagcatacctgccatttaagggttaatgttctgcggtctttaacagaacaacttatacaaaaaaattcctagtagagtaaaagcgctgtggttttgcaaaccaagagcactggttgttagcacttacataaaagatcggtatgtttttaaaactcaccaatgagctggcaaatactgtcttcactctcacatgatgccaacaggggatgttccttgatatcaccctaaaaacatttttatttcagttaaatatagtgactgaagaaacctatcgagtctttccccacaaaacacacatacagcattttattcatattaaaaatgaagtcagtagagtgcattgatgttttttctagcttctagaagcaatattaaggtcttgattgtcatcatataagatcctaattaatgtgcttaatttactacatgtgtgatgttagtttactactcttataattactattcaacccaaataatattcaattaaaacaaagttttccaccttctcacagtacagataaaaagtcttaaaaattgctttcttacctctgattgacattcgattagtgtctccatattattggcgtttagtgtttttgactaaaagagaaaaaataaaattaggtaaatatcttttggcccttgcctgtaggaaacgtgaatgaatgaatgtgagaggggcactcacagcattgtggctgcttctcagcttcatcagtattgcggctgactgtccaggggtggatttcactcccgtgtggctgtgcctctgtctacaacgaatcacatggaaaggagttaggagggactcacacagtaggccactttcagcgccactttgccaaagcacagagtttgaaactatttatttatttttctcttttgctattttttcacttgcctttactttggaaaaaactattacatagacaagttttcatttaaaatcagttctgttaccagatgttgtatgttgttaagagcagcatctgaacacaattatttctaaattatttaagtcaactatctttaccactctaaacgttgttaccaatttattccgttccatcaagagataatctggatatcaattacgttaacattttaaattaacatgaacattaacttttttggtggagtgctgactatatgccagctgtcgtagtaggtgctttgcatggattttctcatctaatccaaaaaggaaaaaaaaaaaaacatatccctaggatgctaaaatagtaaacatgaaacaaagataacatttacagaactcctacaccaaaaaggtgcagccttcacgttgaagcaaagctttgtcctgagactttataaagtgagagcatattccacgggatagctgttttctgttgcctgtgatctgagtgacctgtgacttgcgaggcagcttgtaatttctaggcatgttaatatatagtgtacttacccttggagggtctctagccagagttcttttacatccggtgagctgtaaagaatgggagaaacagcataactctctgctccttctagtccactgggagagagagagaccgagccggtctcccttcacatgctctgcattataagcgaaggggcgggcaggtggaaattcagaatattacagagaccggaaagaacatcatgggctgtcacacggacggagccagccagacactggagagctctcgcttcctcattccttttagggcagctatgtctttttttttttttttttttttttttttttttgtgtcttccacttcaaagtaaaaaatctgtaaactactaggagtggaaaacatgacattcagcccataggtgaaggctctgattaatgtcataggtgggatgtgtgaacaagaaattgtgttattctgtgcataaacatcactttattttctaaagtggtaatttcaagtgcctctttttgcatcctgtttgggtgctctttcccctcccacgtgccatctgctctgtccaccagcaccacacgttgattagcacccctggatgtgggacactgttacagaaccagaaagaaacccaagacagtcccttccttgaggaacaatcaccgtccaaagccaggttagtttcctttggaagtagaaagaaaactccctcgagtcagttgtcaatatagtaaccccctcctcctttctgtaactcctggtcaaaagtattgatacttaatttacagtcagagcagctgtcgttctgacacggaaggaaaacaaacaaaaaaattcctttgatcagaccaacttaaagtaggaaagagatggtgaatttcatttgtggatcactcttctgcataagagaatttctgatcttttctgtagatcaagggctatatatgaaaccactcaaatgcctcgacacgagaatggatgcataaattgtgatccattcacatagggaatgaatgttgtatagcactgataatgaacagcctatgactatagccaacaatatggttggatctcataatatgacgctgagcaaaagaagccagacgtgaaagtgtatatcctgccggctcccattaatgcaaagcacaaaattagcaaaagtcgtctgtgctgttggaagcaagagtagcagtttcccagaggggatggtaatgacttccaggggccagcggggggcttggtgatggtccattcttgatctgggtggtgctaggcttatgtgcacacttccctatttatgtaatttttcaataaaaagttttaaaataacttggcttcatttatcatcagcatctttaattttaagacttttccgcattgtcagttcttttgtcattttactgaaaggaggtgattatggggcagactttgggaaaccgaagcacagagaggtcgaaatttgctctgtaacttagcggctcggtggggacctagggacagatcctggttttcaggcttccagctgggggctccctctctgaaagccaccacagtgccagagttcacccagtgttcccagggcagctgtagaggccaccactctttcagcatccctctcctgcctttataaacctccaaagtgaactcactgatttttttaattgaaaaagggcatttacgctgtgcccagcctagtgctaggcatatagtaggtactaaataactaatttctgaatatatacatttccttataaaatagccaaaatagaatattactataatgttctatatatcatagaatatatatgtgatgtatattcattgctagtatgtattttctaaacttttttttttcccgacaaacggacttttcaaatttttgtaagaaacttaatgtacttactgttctttctttttttttttttttgagatggagtttcgctcttgtcacccaggctggagtgcaatggcgtgatctcggctcactgcaacctctgcctcctgggttcaagtgattctcctgtctcaacctcctgagtagttggaattacaggcacgcgccaccatacctggctaatttttgtatttttagtagagatggggtttcgccatgttggccaggctggtctggaaatcctgacctcaggtgatccacccatcttggcctcccaaagtgctgggattacagatgtgagccactgtgcccagcctcagcatcttttaaaaatacataacatgaatggtttgatgacctgcagaaatggttacatcgacggacttttctttttcttctgggacctaccatgc

SEQ ID NO: 585894 - DNA, 4001 bp, Homo sapiens
agggtatatcaagaatgagaaggaacaatgtgtgtatgtgtgtgtgagagagagagagcggggaggggggagatcaaagcagatgtatgaggatatgaacagtacatggcgtataatgaaagagtttcaggagaaacctgtctggttctgttggaaaaactccgtctcctggcgcaggacagccccaaacacctctccctgcaagtggctgtgcacgtggcccatggtgttgttatagatcccgtcacccacgaactccagcactgcactataaagaacccggaaaaaaaggggatcagggtgtgttcagggaacagactgaaggtcccaggtatccccatataagtgcatttcggacagcagccccaacttccaactccctcatttgcagggtgccccattttcagcccccagacctggctatggtgagaatggacatgagagttaagtttcgagtgaaggtatcggctgagccatcttgtagaatccagtcagtgaggcggcccgtaaagaatggaatggccatctcccctggagaaagagaagagaggtcacgcacaaatattaagtctaagtaggtcagttccagtcagactggccccaccacgcctcctccccctcaccattatcctggagggcatcagcagaaaggaaacactgacgtctcaatcccgaacctaaataggctgccctggaactcactaccctgtggttgctctaccagaactttcaggattttattaggaaggctggagatcatgaagtagaaaagcctcctgttagagatgaggatgccccgcccttcggccccagagcaaaggatttccccgcttccggcgtggcccaaagaatcaagacccggtcagcaatggagcccagaacctctggcccccgccagtccagtgccgtttcttctacaccgaagtggtgttccaagacccacgctaggagtccttctcctgctccacatttcccagaacccacgctactctaccttactgacaattacctttgattcctgtcccagtccccttgtgtcctcccctcttgccctgcgttccccttaccaagagaggagaggaccaccaggaccaggaacagcgagaggcggcgcgtctccgagcccaggcagcctagaagccgacgcacagggtttccagagccgccctgaccgccgggcacccagaggctcccgagtttgtgccacagggctgctgcgggcagtgccgctgcataactgacaacgaaggcggtagggtgacttccccagtgcagtagcctggtgctatccgcggacccgggggctccccatgagatcagctctcggaacaaggcaagtcccggcagggccaagcccagtgccgcagctaatggcttcaaagcagccagccagccctgggcacctgcgttttcgctcttggagccaaccgttgccctgaggaccccgcaggcccccagccagagcacggcccagcggctcaggcccaccgcccagacccggagcagtggcagcgcggtgggcaccagcagggagaatatgcggggcagcgcggtccggagcagcacccagtcggcgagaagtagcagtactgtccccagccatgcgagagaagctccggggaggcagcggcacccgcggggagcgggacacctagagctagccattggcactcggacgccgtcccggtcccggccgggcctgggactctccgcgccccggtggggcctgaagctccgggtaccgccgagtcctcccctactggcggctgggggagggaacgagggcggggctctcggaaagtcccaggaacaggctgatcctgcgctggcgagaagctcagccatttaggggaaagcgaaatcgaaagcggccgcctgctcactagataacgcctacttccaaaagtggcctgcccagactattttggtagcaagcgtggaaatcagatctgagaatctcgggagcagccctggtgcccaattttctccatcacgcacacccttctcgcctctccctgcctcctgcctttccacttgcaccagttttcccaccccagcctcagggcggggctgcctcgtcacttgtctcggggcagatctgccctacacacgttagcgccgcgcgcaaagcagccccgcagcacccaggcgcctcctggcggcgccgcgaaggggcggggctgtcggctgcgcgttgtgcgctgtcccaggttggaaaccagtgccccaggcggcgaggagagcggtgccttgcagggatgctgcgggcgggagcaccaaccggggacttaccccgggcgggagaagtccacaccggggtaatgggtctgggcttgagggttggcagaggggtggaggagatgcagcggccaggggaccctggaagcgcgcgcggagaagtgaatgcagagaccaacgggagcgcagggaggtcgcctgtagcagccagcgcttgcaacccgcaatgagcatagagtatttcttttctgaggggggtcgtctagagtgtccgtgaagggaacaggcacgcgaggctggtggaaaaagcgggtgctttgactcttagctggaagcgtcaacgggaagctactctaaagcgctttcgctttcactctggtcccggacagtgggggctggttaaatcaagaaagggggttggggatggtgcaaagagatgaggaaatggtgccctgggtgaagtagaacagcacttgggagaaggaaatataggcacttattgagaaggaccaactcatcacacagacttttgataaacttgccactgggcaactcttagcccaagcactgataatgggcgttctgtgttaactagtgatgcccttccctagcttgacccaggaaggcctctccttggcccagatgctgccttactcccttccctgtgtcttccctgcccactcccatgtgcccactggggggactttgcttaggatgggcgcctggggcagatggcagccccaagactggctggctggcttctgctctggactactgccaccactcgtggcttgggggcggctttgttagagaggaatagcctctaacttgaagttaaccctgttctttgaccctctattcatgataagtcggtccgtcggaaagcatactcagaggagcgtcctttggggccagagtaacttacggcctggtaagaaagacacagtgaaaccacttataatttgggaaatctcccctcactgccaaatgagcagtggcaagtaggaagtagaagtggaaacaagggataagagttagacctgaattttagtcccaggtctactattaactctgtgtgactttgcataagtcgtttgcattttctgtgacttggtttcctcatttgaaccgaggatctttaaggctccttccaactcaatagtagaataaatgtagctttatcttccctcacttcttcttgattcttttcttgacctggaaaagtcagcttaaacttctcagtcaaattatctcttggtacaaatttacctccctggctgctgagatatgtatttacctcttgatcggaaattccataactgaaacttttattttcaaccatctgtatgtgttccttgctgcttctctcctgccttgcccctggccatgctaaccactgccctcctcgattttttccaatgttcagtaaattggaagagctcacttctgatgaaatggggggtgagagtggaggattgtggaccaaaaaaaaaaaaatagactgaccttgtttcccaagatcatagtcaattactctgtgttgggtctacaccacatctgcacatactatgagcccttccgttggagataattttcacttgcggagctgcttcacttctacctgtaggagcctcatctccacctctctacagtggagaggattccactaggcaagttggaacttagggacacagttctttctgtgttgtatcacagctgggctgtggcattcccctgcagccggatgaagcaatagagaaagt

SEQ ID NO: 585895 - DNA, 4001 bp, Homo sapiens
ctgggaacatggaccacagggacagggtgttccatgaagatggagaatcagtaagggtgccaggaaagctggactgaaagcaatgtgagaggaactgagtctgccaagtctgggagatgagggtctgtgtagagcgggccaactccatgaacatacctggtaccattttcccaccttcttgggcagaaggaaaagcagaggcagggtgatcagggtgaccatggtgagggacactgatccccagagcatgatccccaagagacataggcctcgcaccaggtaccacagaaataagctcagattctcactcagagaatcactcagggtggacgtgtcctctgttacccgagacatgatgttacctgcagggttggggagaagagagtgaggtgaatcagacaggttccaagtgatgagacgaactaacaatgagccaggatgccagggtcaggggtgtcaacatggggttctaaggaggctgcaggaaacaaggttagggttctccagaggtctgcaaatctcagtgcagggaagatgagtgttaaagaggaaaggcctgaccttcattttaattataaagtcattaatgcacatgtgaatttccattttcctgaaagctttctgttccctagagaacctgtatgtcccatgctatacacacaggcaggaagagcttaaactggtcacataacagagatggaggaggagggtgctgctaggaagcatgccaaagtctgtggagcactcactgggactagggttctaaccccaggtctatctctagccatatgtaactgtacagcttctagtgctgctagaaagcatgccgaagtctgtggagcactcaagagaccagggttctaaccccaagtgtgtctctagccatatgtaactgtgcagtttcagcatttagggtcttggcctcagtttccttctctgtcagatgaggcagttggtctctatgagctcaaaatttccaggtttgaaattctatggtttctatctaaggatacataggaatagatttataagaaaatgctagatgaaaactctaggtttttcttaaggtaaggaggacaatattttgctcctgaggtatatcaagaatgagaaaaacaattgtgtgtgtgtgtgtgtgagagagagagagagagagacagagacagagagagagagacagggagagggtatatcaagaatgagaaggaacaatgtgtgtatgtgtgtgtgagagagagagagcggggaggggggagatcaaagcagatgtatgaggatatgaacagtacatggcgtataatgaaagagtttcaggagaaacctgtctggttctgttggaaaaactccgtctcctggcgcaggacagccccaaacacctctccctgcaagtggctgtgcacgtggcccatggtgttgttatagatcccgtcacccacgaactccagcactgcactataaagaacccggaaaaaaaggggatcagggtgtgttcagggaacagactgaaggtcccaggtatccccatataagtgcatttcggacagcagccccaacttccaactccctcatttgcagggtgccccattttcagcccccagacctggctatggtgagaatggacatgagagttaagtttcgagtgaaggtatcggctgagccatcttgtagaatccagtcagtgaggcggcccgtaaagaatggaatggccatctcccctggagaaagagaagagaggtcacgcacaaatattaagtctaagtaggtcagttccagtcagactggccccaccacgcctcctccccctcaccattatcctggagggcatcagcagaaaggaaacactgacgtctcaatcccgaacctaaataggctgccctggaactcactaccctgtggttgctctaccagaactttcaggattttattaggaaggctggagatcatgaagtagaaaagcctcctgttagagatgaggatgccccgcccttcggccccagagcaaaggatttccccgcttccggcgtggcccaaagaatcaagacccggtcagcaatggagcccagaacctctggcccccgccagtccagtgccgtttcttctacaccgaagtggtgttccaagacccacgctaggagtccttctcctgctccacatttcccagaacccacgctactctaccttactgacaattacctttgattcctgtcccagtccccttgtgtcctcccctcttgccctgcgttccccttaccaagagaggagaggaccaccaggaccaggaacagcgagaggcggcgcgtctccgagcccaggcagcctagaagccgacgcacagggtttccagagccgccctgaccgccgggcacccagaggctcccgagtttgtgccacagggctgctgcgggcagtgccgctgcataactgacaacgaaggcggtagggtgacttccccagtgcagtagcctggtgctatccgcggacccgggggctccccatgagatcagctctcggaacaaggcaagtcccggcagggccaagcccagtgccgcagctaatggcttcaaagcagccagccagccctgggcacctgcgttttcgctcttggagccaaccgttgccctgaggaccccgcaggcccccagccagagcacggcccagcggctcaggcccaccgcccagacccggagcagtggcagcgcggtgggcaccagcagggagaatatgcggggcagcgcggtccggagcagcacccagtcggcgagaagtagcagtactgtccccagccatgcgagagaagctccggggaggcagcggcacccgcggggagcgggacacctagagctagccattggcactcggacgccgtcccggtcccggccgggcctgggactctccgcgccccggtggggcctgaagctccgggtaccgccgagtcctcccctactggcggctgggggagggaacgagggcggggctctcggaaagtcccaggaacaggctgatcctgcgctggcgagaagctcagccatttaggggaaagcgaaatcgaaagcggccgcctgctcactagataacgcctacttccaaaagtggcctgcccagactattttggtagcaagcgtggaaatcagatctgagaatctcgggagcagccctggtgcccaattttctccatcacgcacacccttctcgcctctccctgcctcctgcctttccacttgcaccagttttcccaccccagcctcagggcggggctgcctcgtcacttgtctcggggcagatctgccctacacacgttagcgccgcgcgcaaagcagccccgcagcacccaggcgcctcctggcggcgccgcgaaggggcggggctgtcggctgcgcgttgtgcgctgtcccaggttggaaaccagtgccccaggcggcgaggagagcggtgccttgcagggatgctgcgggcgggagcaccaaccggggacttaccccgggcgggagaagtccacaccggggtaatgggtctgggcttgagggttggcagaggggtggaggagatgcagcggccaggggaccctggaagcgcgcgcggagaagtgaatgcagagaccaacgggagcgcagggaggtcgcctgtagcagccagcgcttgcaacccgcaatgagcatagagtatttcttttctgaggggggtcgtctagagtgtccgtgaagggaacaggcacgcgaggctggtggaaaaagcgggtgctttgactcttagctggaagcgtcaacgggaagctactctaaagcgctttcgctttcactctggtcccggacagtgggggctggttaaatcaagaaagggggttggggatggtgcaaagagatgaggaaatggtgccctgggtgaagtagaacagcacttgggagaaggaaatataggcacttattgagaaggaccaactcatcacacagacttttgataaacttgccactgggcaactcttagcccaagcactgataatgggc

SEQ ID NO: 585896 - DNA, 4001 bp, Homo sapiens
taaacttcgttatgcagtgcacgactgtagtttcagcagaaagcagccaggatggaatgaaggcacaatgaaatggttttcgagggtactctaaattaagtatgaccataaaaatagagacaatcaggccggctgggatttgggtaaggtgagtgcacacctccttaaactttgcaccccaggtgcctcgctcacctcatcccagtcccagccttatcaaacagtttgtttgtttgagtatgtctagaaagagaaaggaaagcaagtgaagggaaaagagtaatgattctggaaagaaaggtgataagcctcagagtaagatcttcagggactggcaagatgagctgggaaagaagagtgaaagggagaagcatacccatcctgagggagtgaccctggagagatactttggagacagacttaggggtaggaggtaggaggcagaaagaaatggaatttcatggacctaggaatgttgagagacaactgagagacattccatctgagacttaaattccttttgtactaccttcactcataacttgttcctataataagatcagataaactttgaagatattggatgaatatgaacgaaggaagaaatgaatggatagatgaaacagaatggtgactacattcaccatattttagtttaagtatttttgtgttttgcgcctgaaagggcctagaaatggagttagggaagtgaagacccctataaagatttggggctagcaaatggacccagctgcccaccacctacctgccaaaggagaagaggcacatgaagaagatggcactggcaaaggcatgggggtcaaaatcacctcccaggatgtcaatcacacgaccagaatagtgagggattaatgtctcacctgaaagaggcatgaaaaataacacaagaatgtgctggtgcccaggcccttttaccacctccaactcacaacgtcctctcctgactcacccaaaacagcaaggacaaggaagaagaaggcggcaacgaggagaggcaggtccggcctggagagcttcagcagcctccacatcaagactttgttgttcacctggtcctgctccttctcctgggctccaggagggctcagaacagcccacagtgaccagctgagccccgcagccccgtaccccaccagcagccagctccaaggggctgaagcgactctggctgggggagcacgtgaggcccccgcgaccagggctctcagggagacagtcaggggggtggccagacagagcgggagcagcagtgtccccacaaatcccagcagccctcttagctttagcagcccccacagccctcccagccgcagggtcccctccagccatagtcctggcagcccttgaggaagcaaagtccccagagggccctgaagcagccacagtaaagccgcgtccaccagcagcagggaggtccagggtctcaggtcagggagccgcatggctctgtcaacggatacgagatgagaaatcatgggggtggagtcccaatccttgtccctgccctcctacccgcccggctccgcctaacccgtccatcggcttctcattttatcctattcaaccctgagagctctcctgagtaaccggtgctcatccgtacacccctcctacgacagacagctttcggccttctggggagctggaagcatgaccatcaggagcctcgtgcttaaaaaaaaaaaaaaaaaatccccggacccccacccccacccccgcctgccgcggcgagctaagtggtccgggctccgctccctcctatcgccgggtgcagagggactgggaagcaggagcgtggagtgggtagtcacttgggctgcgtccctgttggcgctccaggttcccctccgcaccaactcaccagccgcggcggggagaccgcagctccggggacttctgcttcagcgctgaggtccgctccgtctctcccaacctcgctaccggctctggtccgccagctacgctcggccagggcgggcgtcagggctcgggcagctttcgctttcgcttccccagccaaggccttcattctgggctgggccgccgggagggggcgcgcgagacccgcagacagcggaactggagcccgaactctggttcgcactgtacaggcctgcaatgagtctcactcgcctttagtggcggttactctgggatataaaactgcaaaaatgtttctttatcattaagtaaaatacagttgtctcaagggcaactttatctgttgtccttgctttgtaattggagaatgctttgtaattggagaatcactgaattttctcaaagttactacttcaagctctgagcctactattaagaagtgccttctttctggtccggcgcggtggctcacgcctgtaatcacagcactttgggaggccgaggcgggcggatcgcctgaggtcaggggttcgagaccagcctggccaacatggtgaaaccctgtctctactaaaaatacaaaaattagccagggcgtggtggcggacgcctgtaatcccagctactcgggaggctgaggcaggggaatcgcttgaactcaggaggcagaggtttcagtgagccgagatcgggtcattgcactccagcctgggcgacaagagtgagacttcgtctaaaaaaaaaaaaagtgccctcttccatgcaagctccagttttaggcgagcgagccgggctctcctaaatagaaggttccaaccaatctcaccaggccaaaggggattttcacgtacagactttgaatttagtaggccctgagcgttcatcttcatccgtccttctcagccggagcaccttgagctggcgcgtgttcaggtgcctctgagtctgtactccaaattatgttgggcgcaccttcagcctatgagggaaatgccccgtactgagctttggttcttgttctattttaacactgtttagaacagtaattaggtttttaaatatccttcctgacccagagccttcctatgcaacagaaagattcgtttattccagaaaggactcttcagattgaaaccacctcccaaactaaaaacaaacaaacaaacaaattccccaaaggaagggtcgcttggattccagatcaccattttgaaatgttacctgtgtgactaccaaggagtcacttaaagtttaaaatagtggtggtggggaggagggattttaagtaggggctcgctaaagttttacaactctattcattctggcattttaagaatctctctctaatgaaaaaagctccatgctcaagctcatgctcctactttcaagcatttgtttcctttattttctggaaagtgacatggtccatagttccagcatgattccgaaaatctcatgatgtgtgtctctttcttctaacctggatcttttacattttccccacactcctcacttaggggagtcctcctgatctcttcttcctctaaaattatagtcctgccatcttgcaattcagcatgacacatcatgaaattagacccttaatgtctgtctttatattcaatatccaatatctccaaagtgttatttgggataaatggtatggtgtttatatgattaccatattaaagtgaagtggaagctttttcatcctactctataaagtcaaaaacagttatcctaggtgccctactccctgttcctcaaaccattaacaatggaacacacaggagtccccaggtgcctctctatggaaaggaccctaacctatgtgaaattgcaaacaagtgtccatggacagcaatgagcagccttcctgaggtcttggagagatgagtgtggaaggaaaccccaggaagaactatgtggtgaggccacatttcttagataggggtctgagccccttctccagaaaaagcgtctctttactttctgccccacccaacaaccacaggcccaaccccattcagccacaagacagaggtatttataaccgtttttctttattctacttagtggggcacccagaaacttccctg

SEQ ID NO: 585897 - DNA, 4001 bp, Homo sapiens
ggaatgaaggcacaatgaaatggttttcgagggtactctaaattaagtatgaccataaaaatagagacaatcaggccggctgggatttgggtaaggtgagtgcacacctccttaaactttgcaccccaggtgcctcgctcacctcatcccagtcccagccttatcaaacagtttgtttgtttgagtatgtctagaaagagaaaggaaagcaagtgaagggaaaagagtaatgattctggaaagaaaggtgataagcctcagagtaagatcttcagggactggcaagatgagctgggaaagaagagtgaaagggagaagcatacccatcctgagggagtgaccctggagagatactttggagacagacttaggggtaggaggtaggaggcagaaagaaatggaatttcatggacctaggaatgttgagagacaactgagagacattccatctgagacttaaattccttttgtactaccttcactcataacttgttcctataataagatcagataaactttgaagatattggatgaatatgaacgaaggaagaaatgaatggatagatgaaacagaatggtgactacattcaccatattttagtttaagtatttttgtgttttgcgcctgaaagggcctagaaatggagttagggaagtgaagacccctataaagatttggggctagcaaatggacccagctgcccaccacctacctgccaaaggagaagaggcacatgaagaagatggcactggcaaaggcatgggggtcaaaatcacctcccaggatgtcaatcacacgaccagaatagtgagggattaatgtctcacctgaaagaggcatgaaaaataacacaagaatgtgctggtgcccaggcccttttaccacctccaactcacaacgtcctctcctgactcacccaaaacagcaaggacaaggaagaagaaggcggcaacgaggagaggcaggtccggcctggagagcttcagcagcctccacatcaagactttgttgttcacctggtcctgctccttctcctgggctccaggagggctcagaacagcccacagtgaccagctgagccccgcagccccgtaccccaccagcagccagctccaaggggctgaagcgactctggctgggggagcacgtgaggcccccgcgaccagggctctcagggagacagtcaggggggtggccagacagagcgggagcagcagtgtccccacaaatcccagcagccctcttagctttagcagcccccacagccctcccagccgcagggtcccctccagccatagtcctggcagcccttgaggaagcaaagtccccagagggccctgaagcagccacagtaaagccgcgtccaccagcagcagggaggtccagggtctcaggtcagggagccgcatggctctgtcaacggatacgagatgagaaatcatgggggtggagtcccaatccttgtccctgccctcctacccgcccggctccgcctaacccgtccatcggcttctcattttatcctattcaaccctgagagctctcctgagtaaccggtgctcatccgtacacccctcctacgacagacagctttcggccttctggggagctggaagcatgaccatcaggagcctcgtgcttaaaaaaaaaaaaaaaaaatccccggacccccacccccacccccgcctgccgcggcgagctaagtggtccgggctccgctccctcctatcgccgggtgcagagggactgggaagcaggagcgtggagtgggtagtcacttgggctgcgtccctgttggcgctccaggttcccctccgcaccaactcaccagccgcggcggggagaccgcagctccggggacttctgcttcagcgctgaggtccgctccgtctctcccaacctcgctaccggctctggtccgccagctacgctcggccagggcgggcgtcagggctcgggcagctttcgctttcgcttccccagccaaggccttcattctgggctgggccgccgggagggggcgcgcgagacccgcagacagcggaactggagcccgaactctggttcgcactgtacaggcctgcaatgagtctcactcgcctttagtggcggttactctgggatataaaactgcaaaaatgtttctttatcattaagtaaaatacagttgtctcaagggcaactttatctgttgtccttgctttgtaattggagaatgctttgtaattggagaatcactgaattttctcaaagttactacttcaagctctgagcctactattaagaagtgccttctttctggtccggcgcggtggctcacgcctgtaatcacagcactttgggaggccgaggcgggcggatcgcctgaggtcaggggttcgagaccagcctggccaacatggtgaaaccctgtctctactaaaaatacaaaaattagccagggcgtggtggcggacgcctgtaatcccagctactcgggaggctgaggcaggggaatcgcttgaactcaggaggcagaggtttcagtgagccgagatcgggtcattgcactccagcctgggcgacaagagtgagacttcgtctaaaaaaaaaaaaagtgccctcttccatgcaagctccagttttaggcgagcgagccgggctctcctaaatagaaggttccaaccaatctcaccaggccaaaggggattttcacgtacagactttgaatttagtaggccctgagcgttcatcttcatccgtccttctcagccggagcaccttgagctggcgcgtgttcaggtgcctctgagtctgtactccaaattatgttgggcgcaccttcagcctatgagggaaatgccccgtactgagctttggttcttgttctattttaacactgtttagaacagtaattaggtttttaaatatccttcctgacccagagccttcctatgcaacagaaagattcgtttattccagaaaggactcttcagattgaaaccacctcccaaactaaaaacaaacaaacaaacaaattccccaaaggaagggtcgcttggattccagatcaccattttgaaatgttacctgtgtgactaccaaggagtcacttaaagtttaaaatagtggtggtggggaggagggattttaagtaggggctcgctaaagttttacaactctattcattctggcattttaagaatctctctctaatgaaaaaagctccatgctcaagctcatgctcctactttcaagcatttgtttcctttattttctggaaagtgacatggtccatagttccagcatgattccgaaaatctcatgatgtgtgtctctttcttctaacctggatcttttacattttccccacactcctcacttaggggagtcctcctgatctcttcttcctctaaaattatagtcctgccatcttgcaattcagcatgacacatcatgaaattagacccttaatgtctgtctttatattcaatatccaatatctccaaagtgttatttgggataaatggtatggtgtttatatgattaccatattaaagtgaagtggaagctttttcatcctactctataaagtcaaaaacagttatcctaggtgccctactccctgttcctcaaaccattaacaatggaacacacaggagtccccaggtgcctctctatggaaaggaccctaacctatgtgaaattgcaaacaagtgtccatggacagcaatgagcagccttcctgaggtcttggagagatgagtgtggaaggaaaccccaggaagaactatgtggtgaggccacatttcttagataggggtctgagccccttctccagaaaaagcgtctctttactttctgccccacccaacaaccacaggcccaaccccattcagccacaagacagaggtatttataaccgtttttctttattctacttagtggggcacccagaaacttccctgggggaaatgcttgttcaaatagagaacacgcagaagatgcacttcaccggcct

SEQ ID NO: 585898 - DNA, 4001 bp, Homo sapiens
cataaaatccagatagaaaagctaagaactctaccggtattctaccccggaataccccgcctccgctgccaggagggagagctcccagatatccaggtcagactctcctcattcttgaattatctgcacagtccctcccacgtcccagcctagaaaagcttctgactcctgggcctcaaactgcaatgcacctttcagtgcaataggagctatccaatctccagccgcgtccatccgcccactcgagcccacctgtttgcggaccacagagcggcagcacatccctacacggggctgtcaggcaaggtcaacgcgctagagtgcaagagcctttgctttgcggattgccgcagcgccgggtgtgggcgcaggtggggatagagtgctgggttttgaaagagtgacccgcaaagctgagggtgcagagcaagacacagatctgggaagagcagagaaaaaacgctcctgcttctgaacccctcccacctcgcatcacctgacaagtctctcaaggtctggtgtcgggaaaccccacctcttcaaagccccgcccttcgaaacaccagaaagtaacccccctgcccggccctgctttccccctaccccctgccaagctgcagttttttttttgttttttttttttaactgggtgagggctagaaggagcggtagagattgattcattctagccaaaccacctctcttaacaaaaaaaggaaactgaaccccgattggcgaaatgtcttgctcaagtccataaagcgagaccaccggctgatctggacccttagaatctacccacccttctccacctcccctccccagctacctgttgccatggtgatgagaacaggctcctgctgaggctctggctgtggtcgcaagaggctggagaggctgaggactgggctggatatgctgaccatcagccaagccccatccagggcccgcgggcagttctgcgcgggggtcaggccgctggcccatttcgcagaggcggggagaggcacgaagcggctcatctcgcagtgtggtgcgggggcgccccggggataccgcctgaaggcagcctggagggcgcccgcggggtctgagtgtagagaaggaagttgcagctgtagagtcaccgccgggaaaggggctggaagggcagcgttcggggaacttcaaatgcacagactaccccgtagtgagactcactttacaaaggggaagctgaggcctgaggtcactgccggatctaaagaggagggggtttcggtggaggcgacagaggtaggggggcggcgagtccctagagactcaccgtgtacactgagatagagctcagggtcgaggtccggccggggcggcggttcccccggtccctggcgcaacagcagtgcaccgggtctcttggccaggccctttccgctcgcatcctccacgaaccaacactcgatcaccgcgggtcctgctgagacggcggtcgccaggcctggcgtatagggacgcgagtgaggagcggtttgtatgtctggtgacctgccccactcccaccctggcatcggctccagtggggccacctccctccgcttccctctagttcttgggcgatgagtcgcggggttcgctcacccaaagccacagcgaggagcagagacagggacttcatggcgctgcgacctcctcagccatgaagcctcctcttcctcctttcactttcactttcctccaaagggcggcatgaggggcggtggaaatccccgctctggttaggtgaaggtgcctgggggaccggtgtttccccactggccaggcagggacccgggtagatcctctccagttctcaccaggacaccccagccttaccgcgccctcctggactacccagcagccccgagttcgagccctccccaaccccaggccctcccccgccccccaactcctgtgtgtgctctccaacatccacttgcccgaaaaccattactccggcttccccctatctgtgccgcgtccccagcaaacacacgggttatcgggaagccaagtaaatgaccaataaatattttaatcactgttaaaaaaaataaaaaccttgtactcctacgacttactccctccttgtctccacccactcctccatgagaaccgagttgggaatttccacgggaagtcgggggtggcggggagagacagggtagaaataaagagcgcatccttgagagggggtaggttctaggacaagggtggggctcaaaggccttgtctccacgacaacacaaacacagacttcaggcacagactacaaccacctgacccctgaccctgtgactgcaggatgttcaacacgccccctctccctccctccatgtgcaatctactctgtggagcaggggcttcagtgtacccatcagagggaaaggaagggtttagttctggaaataccttgggggggaggggttgagtagtagaatgggcgggcgatggtgaaactgtggttccccttccagaatatatacaagtccacagagataaaggaagacagtaagtgtggtgggagatcacccgggggccacagcgcccttgcatcgtgctccttattccctttcccgaaagctaccccaccccagtagcctgccccttcagtttgctcctccacctccaccgaagcccatctccaccttgtggactctgggtggggaccagacacgtctgctggacgggggcgtggccgcactcgcttcgtcgccgctgcccccgcccactccgggagactctctcttggacggcaaggatggccccgtgggagtcccaggcccaggtacggccccgaccccgcccaggcggtgccggcgctcacagtgtcctcggtggcgcatgaagctgtctcgccacatgaacttcttggcgcagactccgcactcgtagggcttgagacctgtgtgcgtcttcatgtgctcagtcagatggtgcttcatcttgaactttttgttgcacacggggcagtcaaacggccgcagattgaggtgcatgttcacgtgccggtcccgcatgctcttgtgggagaaggccttcccacaatggcacagaaagatcttattcccgtccccactgccagtccctccagggaccccaccaacgctacccggcacacccaggctccccaccgacgtgccccccacggtcactgccccgtgttctgcttggttccctggtggttggccaggagcctgtgaggatgaggatgaagacgacgacgggaagaccaggatctggttgccctgcatgtccaagggaaggagcggtcgaggagggtgggagggggcataggaagagggagttggcccccctgagtcatcaagacctgccacaggacccccaccctcatatgggccaaagtcattggaggactcacagaagttgacctgctcctcccccttgtctgggggctcactcagggtacggacatcacttatgctgagggtagcctcaggccctccccccactggaaccctggagctaccccctagttcttcatcttcatcatcctcacaggtcaacaccagatcttcctcctcctcttcctcctccagatctgggtcttggggaaccaggggtgttggcgctgggcaattaccacctcgcttcacgtatacccagtgtttctgtggcatgatgctagggggtgtgtaggtgggtctccggagcccagccccaggaaccactgcccccctcccatccccaccatcatcgcacagctcatctgcctccagcagcagctttccagatgtggcccctccactgccaacgacaggggctgggaatacagggccacctcctcgacgctccccactgcccactgcagaagctgcaaatgcctcttgggaggaagatgagaaatcagtggactccctggggctgaagtagttgctgctgctgggagattgattctcactggcccggctggaggcatgggagcgcgcagagcccatggtagcaggggccacagtgcccccact

SEQ ID NO: 585899 - DNA, 4001 bp, Homo sapiens
tctctatttctctatattcttcaaaatgaaaaaggaatccagaaacttgaagaaactgaaaagacttctcttcctatctcagaaaagtagtgctttaaaaaagttgactgttcttatagccaaatacaggaaatataggaaaaaaagattgttaatagcaaccagcagtcagaaggcacagaagcccatgccacgtcccacatctcttacactgcttcctgatacaacagtcttcctattgattatgattataatcttaggatgtcaaaatttaatgatctcactacggaaaaccccagagaatagcagttagcacaactagagagctcactagaccaggaaggaaaaggaatcagttggcaggaagtgtgcttacctaaaaacacagaacatctttaacagtaatattaacactgttgagtccacagcactttaatctgaagttatctttgcattcctttctattactttaataagtattactaaaagctgatttccaccctattctccatatgtctactagaatccttaataaaataagactcttggtggggcatggtggctaacgcctgtaatcccaacactttgggaggccaaggcaagaggatcacttgaggccaggagtcagagaccagccctggcaacacagtcagaccttgtctctatttcatttaaaaaaaaaaaaaaaattaaggctcttacctagccactactgaccctcatctctctctcgcttaaaaaaaaaaagtcacgagttcaaaagattatcccagaaggaaaaaacctgaatccattagaaaaggtagcacaggggacacaaccaaacatgaatttcatcaccaagtagactgtagctggcagaaatcttaaatttacgactgaaatacacactcttccttatacttctcaggactttgcccaaaataaactgaaacagtaaaccaacagtagattgatggatggataatttgccaaaagtctcaacatacaccgaaaagagggtgggggtagtcttagggggtctgctctccagttaaacaactgaagaatgaacgaatttagtgcatttgcacaagaagtgcattacaatgcaggggaggaagaagtcacttggggttggacaaatccttagaaaatgccaaaggaataaccctgattctgtggtcgtcttgtaataattcctagtgggaaagggccaactcaagataaagtaaggtcagggttgagaatcgtcctcacttttcctgcctaaccctctcggcaggcggccccaaactcccaccggaatccttcgggtaagtgccgacctcagggatcaagggaaggggccatcctcgagcgaccaaccacctgtgcgtggtggagacccctgagagggagtcctaattagagtgggaagcagctctggggaggaacttccgagaccagggccgacactgactattcacccaactccactcccctttacgcccaatcttcggccaccttcccgctgaggtcacccctcctgaaacctccgcccccagaccccggtctacacccacatccagccgtccccaaagctcgctgttcgcttcgctgcctgacagctgccctgccgccaccaggcagtcccagcttccccaaaccagtcttctggcctctgtggcgccccaggcccgcgggattcagggattaggatctggaagggtttggtccaatcccctatccctctcagcgtcctgggctcacctccccggcagcttagcgctcctcttccaaaactgcttgctgttctcagcggccattgctctggccgggggaagtccttgtaggcgggccaagggtttgcccggcgagatgcccccagaccccgcaatctgagggccaacccaggccgcttccccgccgccggtcacccgctcccagctcctggggacgccatcttggatgtgggcacccctccacccagcaccgctgccattggtgagctgcgcaagccgtggacgggccgaccaattgggagccggaatcctgcaggccgctgaagccgaccggtaacgtcaggggctgggcacacaggtggacggggaaggcggagcttggacgagccgagaggcggggctcaaagttcctacccgcgagagggaagaagcaggtaaggtaagggacctatgggaaggaagaggggattatcttcttcgtgaggaatgaagttccttagtctaatatttcttggcaagagagaacatactatgtatttatatataggaatctttcacctaaaagtaagggcccatgtgttggttgtggcccatttttaacatctctcaattcaatgacactctggttattaccctcctttcctcattccgtttacatgtccattcgtttttctgaaggaaggtcagcagggacccgatagcccgggattgctaactgttcaacacgtgagcaacggttcatcagagtctccctctccctctgtttattgaaaacgattgaaggacttgtgctgtgggttaaaaattcaaatgatctaatccctatgtcaatccataactctcactttctgactatgctaacagtgtatataggaaatggtttatgatagctgtccaactcagattaccaaataccatttctttgaaggacacagtattgctccatcgtgtgaatcacaaagttaaggatgtatctcctcccggccccaccaacatccttaatttcccttgttaatctattataaatcttgcacccttgaatttattttcaatctaattttcccagacaatgagatttagtattagcattttgaatcctttgaatgtcttgtcagcgttttttgctggttttgagtttctgtggttgtattccgtggtgatttggggaaagagggaaggcgggcaccagtccagagtggtttttgtcccttcgaaggactgttgaggtgggctgcgtgtcccccacccccacccccaccctccatttacagctaccacatgtacttccacatattggagaatacttaaagacctgacccctggccccagccaaagaaggaccttcttttatatgtcctccaacgacggtttcttcattactcccattttcaagcttcttttgtcccctaatttaagaattataggattggatgacaagggctatttttacttcctctgagtctttcatgctataaaagcatcttatcttctttatgggcatttaacccagagaaaaaaagcccctctattcttttaattattttacttgcctttctctggcgcttctttttcttaggatgcagtgaccagcactgcacactaagcccaaagagggatgtactgaggctttgttaaggctgatgttttgtctttattctggacagccagaccttttgctggctgtttggactttagaagagttgatgtcttgaaagagtaatctaaaacaacttctagattccttaccttggtggcaaccagcagttcagagttcattgtcttaaaggtatcctctgaattgtctttccctatgtgagctgccatacactcatccatgtgacaagatacctgccactttccagcttatgcacatggctttagagatgttccagaagctgctccctattgatttgacattttactatgtggaaagcaaagtatgatttgtgtatctagacatatctcaaaatactcctttttcttaatcttctatgaaatgttaaatgacactgattcccagggggtgtagttaacagtgctcaacccagaaaagccctgttatttctacagtttgttttctatatcagtttcccctccaagattttttaaaaattcacatcagttaccttgtgatgactttttaaatagggaaattgagattgttggaacctttttcaccactaccacttggtcaccctaatcttcaccaaccacacacctgcttacagcagcctgctattcggctccctgcttccactcttagccccttagagtccattccccatataccaaccagag

SEQ ID NO: 585900 - DNA, 4001 bp, Homo sapiens
tattcatgaaaacctttttataaataagtttgaaaatctagatgaaatggccaaattcccagaatatgatactagcaaaaacttactcagtaatttacagatgacttaaacaactccatgtaaaataaaaaccagaaatgaaatcccaaacataatgctttatgtggatgtgtgtgaggtaaattattacatgagtttacaaaacattaatcacccagcctatatttgaaaaagttctaatttttctgtactccactgtttaataaatctgtagctaaccagtaaaagctagtctctggtagcaccaaaataaataacgttatcatctaataacaggtattagtagtgaatttaatgagaaaataaacaagaaaatcatggaaatacaaaagaaaaagaaaccgtaagtataatcgtaaataccaaagaaattagaaactccattattaatgaagattcctttcacactttttaaaactcaattgagaaggtagtgaaaactgtaaatactccccctataaaactgcaagtaaacacaaacttgtacatagaatttcaaagaactcaaaaataccctgatgcacatatatgatattgacaggagttccagataagtagaacttcagggtacccaagggtatccaagagacagtaaaggtagtataactagaaaaatttccagtgtcatctctgtcagatcaaaatgaaatgcaaacactgggttaaaaacattagtaataataatgaatggaagcacctggaggtagacttgtaaattcagaggcttaacttaaattatatgaaccaaaagaaaaacataagtctctaaagatcttcaagatctacctcaaatggcacttctatcattaaacctctttttcctactgctcccacacgcagagcactctgaccccccttctctgtctcttatatttctgacatgtatcacagacatttagttatgtggcttactcctctagacaaacttaagaaactattccagaggaaactaatgatctcacttcggtattccctttgcagtgctcagagtgagtaattcgtgcggccacttaaaatatcagcagatattttcaaggaacaaagatcgttggaactcattgcttttaagtactgtatactgacaggaatcccttgaaatcgtggaagtattctttcaaagaacatgaataatttataattaatattactgtgctgcccgggtgaggcgcgggggaatggattattaggatatgctggttgtggcagtaaaaatatagaggcggcggccgggcgcggtggctcacgcctgtgatcccagcactttgggaggccgagacgggcggatcacttgaggtagggagttcgagaccaacctagcccacatggtgaaacaccgtctctactaaaaacacaaaaattagccggccgcggtggcgggcacctgcaatcccagctactcgggaggctgaggctggagaatcgcttgaacccgggaggcggaggttgtagtgagcggagatcgagccattacattccggcctgggcgacagagcgagactccccctcaaaaaatatagagagaaagaggcggcagaagctttaggaaataagaataaatgttaaataaattcgacgttttggcaaataagagaaaaagtaaacctccaagttgggcactattttaaaaacaataaataaattaacactgttgacccttctctggaccctctctggatcgatggtttataggcttaaaacatcaaaagcaattttacttgtgaaaattttcatcagtttcctccagatgtaaaagaatctcttcggcacactccagggaaggggcacccgtgattttctccttcacgctctggaacaaccgcctcagcatcgcctgcagcatcgcctggtcctcgctggagaaatgggccatcctgttggaatcaaacgtccactctcattactccaggtccgagcaaaagccgcgcactgcgcacgcgcacgcgcacccccacccagccccggctacgtgcggcgtcgttcccagggataccgcggcgagcgcctgtgcctgcgccctcagctgccagtgcgtcatttcggaaaacgagtcaccttactttggggaagcaggggtccgcgaggtctcgcctctggtactcttagttgctagccttcagtaccagcagacctcaggctctcccgactaacaacaaaagagacatcaggaatgatctgatgggaggacccgacgacggaacgccacgatgcgcgtgacgtcagctcgctgatgtggcttccttggtgggagggagtgcaactggtgtcctgggggcgcccagagaatgttcgggtgagccactctccttcgccgccgcgttgtaggtgggagggaagagagtacgaagagaaagtgatcaataaaagaaagatagtaaaagtgaaactgaaagtagcctgacgagcctcagttgaagagtgaatggtattgaaaagttgcagtgttgttttcctctaacggctaacacctattgagctcctacgccctaccaaacactttccttaccaagcaccctgctaggagctatgaagaactccctcactaagtaacagagagaaaaataaattaacgattacaatacagtgcaattaaatgtcatgctagaaaaaaaagatatgccaagtcggtgctgtggagacccagaattagtttcaacccaatagaggagttgaggaaagaagcaaagagagtaaactggacatgcaaagaataggggcctcagagtgtaggatatactggcacttgaggtaatcgggttagaaagaggagatgaggaagctaaagaagtaaattggtcacatctggaagggtctaatcttttggcacgttaagggattcgagatttttctgcaagtaataggacgcaatgggattccagagagacaccatgtgatggtatcatatataaagatcgttctgcgggaagctgcagtggatattcatggtccctcatccagtttccagtctagatcaattccccagaccatggttatgtccaggctataaggaaccgtcccactgatgagtggttcaatgtcaatgaattctcctttatccagccttatattttactcccctagtatcaggtacacatcacatgttagacagaattaacgtcctctttgatgtttacgctattattttctgaagcaaaagtatgatacatctttgccagctctagcggcatgtaactccatgaaatgtctgctaattgtctaactactgcattaggggaaaaaaatattagcagagtaggcatatttgcaactttatttgtgggtgagggctaaaacccaatatgtatatgtacaagtatgtgtgtgcacatacatagagttaccagcaatgtgacagctgcatattcaaattaacagatggttgtattgacaactcagacacgaagactgagatagccattagtgatgtgattttctgaaatattgctattattggtaagattcagaacaaaattccttggtttacatggcttttgcattcctgaaaaattcagtgtgttaaaactgtgccaaatattccatttatgtttatataatattcatatttataatatgtatatttctaattccatgtttataagtattatatctatttatatacatggaattagatcctatttataaatattatatctatttatatacatggaattagatcctagactcaaatacttatcaagagtgttttttctgcatgaaatacccagaaagaccattgaaaccactgagagtcatggaagaaccagaacaatccttttgtgtaggtgactgtcctgggtgtattttaatttgtttaagtgtccctgtctcacactacagatgccagtaagtgccctgaagccactgtgatgacaaaatgtccccaaatatttcaaaaagccttctacgggagaatagaactggacagattaacaactactgttcta

SEQ ID NO: 585901 - DNA, 4001 bp, Homo sapiens
ttaagaaacctttcaaaaacttctgacgctcagtgaaatataaatttgaaaaatcttttctcaaaatacaccattctgcttcaccacatcactaaaaaatacagcaagtaaccaatgcttctggatgtcttttaagaaaatatttacttcagaacatgtggagtgattgagaaccaatgagattaatttttaaaagtactcacccagacggtcatcttttaggagaatttctaatgatttcttttcttcaactccacgaaaccccactttctcataatatactgaacgaaagtttctctgagagtcctcagtcatatttcattcttggaggagacacagaaagacagaaagggagagaaagacgaaggggaaaagtgagtctagaaacaaagagtcaagaattagaataattttcaatgatgttctccaccttttcaatatgatgtacccttgcataggacccaatattaaatttttcctttaactcagttctgcaactatctcacctatgcatcttggctaaaaaccaagatataagttaaaagttctctgagctgataaaatagatggcacaaggtttatgcactaggtttcccactatacctatgagtgcctagcacaatagaacattctgtagctattataaatgcgcaaagaaaaaaaataagtgaaatggaagccaggcaagatacgtcaagcaaattatactcaaacagtatacactatgatttcattttttgttttttacaaatttcatgtattttaaaacttaacactctattccaaaatgttagcaatggttatctttagatagtaggattctagatgattttaatttcctttcttttgcttagctacttttttttaaatgggcattttgtaaaatgaaaaattaagttatataaaagtaaaaagccacgagttcctcacttatctttcttttaaacacaattctattaagtgtagctatcgaaattcaaaacccacaacaaataaatcgcattaaattataactagaagagggtaaagaatgtagccaattgacagtgatcccaaagtcagagttgaagacggaaaaacgatttaaaatctaccgcaagaactcaaaaagttcagtggtctcaagttccttcacagtaaccttcataatactggcggtaattcatccaaaaaaagaccaagttagatttggcgtttcaagaacagaaaagatctgatgcatttcccaaaaagcactgcactgcctcacccaaatgcttccagcgtctgtgcacaaaagagtaaatctttaggtttaaaaaccctgcgacgtccccagtgagcaggggagggcttccttccttattgaaaagatatcctctgaaccgattcagtcacaggaaagattaggattcgtttagaaaatgaaatgctaaagggctctgagctttcgggagcagatgtcttaaaaataaaaaagtcagcagcataaaacgcgtaatgagtgtggggatttatttttttaaagcatccaaacagctgcatgacgatttggtcggtccctgttgtctaaggacacccattcttagattgcactacaatgacaaaggcgtcctctaggaggaaatgctgcaaataatatctcctgcccatgcgcgtccacctgatgggaaaagtaaaaacaccctggtccaagaccccaggtcccattctctctatgatggatgcttcacctctagtagtgcaaacacacccgggttgagactaagtggtccgggagaagcagaggaagccgtgccctgtgcgctgaccgaccgccgggcaggcgggcaccgttggggcccagggccaggagggacgagtcctgcgggaaggagggaggcggcggggtacctgggacacccgcgcgcgcccagacggcccgggagacaaaactcagcgccgctgccgctgccgctgccgccgccgccggacgtgacatcaactccaggtcgccgggcgggcgccgggcgggcgcatgcgcagagggcgcgggcaggaagctccaccctcactccaggaagctctggcttcgtttgtgaaacccgacgggatgaagggctaggctcgcctccagagtagtgtagtttctcccgccgtgggcacccggccccttgctaccccgcaaaatctcgcgaccatttactctggccatccgaaggcgcgtgcctgggttgcactcccgtgtccggccctcgaggttcttgcctagggaagacccgagccctagggccgtacttaagctgcctgcgtgcaggacccgggttttgcttttgctaatttcctccccaccccaggtatgtgggaatagatgaagaccatccgaatgagaagaaaaaaggcaggcagaggagtgcaagtctgatttagagcaggcaggctccctgggttggttattgtaggtaactgactggttttctgggcaggttgctgcaggttgtggattggaggtctatttttatattagatttggccattgtcttagtatattcagcctctcaggtaaaacactataacataggagaaaaatgaacgtgttttttttttaaaaaaagatgtgctaaatgcaagctcctaatttgttattagtaggtctaacagaacagagttactctttaaagtagctactaacacttacaaatgctttctatttctgtgcttgcctccctggtcctcgggctggctgagcagcagtgcccaagtaggtttttaaaccgccagggtttgagagaaatccccaatgatgggtatcgtccctttgaaagttcaaatctctaccaaataagccacacggatgccaagctttgaaggaaacttaggactatcaacagtgcagaagtccagttatagtgcagacaaatgtgtgtataatggctagacagaacttaaaaatgaagaaacgtgtggtggttgaactcaaacactgatgcccctccccactcccttaccaccaccatctttagttcctcagtactggggtactaaaccttccttgggtagtgttcacatgagtaagcagagttcttcaagttaccttacacaagttccatttacttcatctaaaccttgggccggtcactaacttttataattgccttttcttgtctttaaaatcatcaccagggctgggcacttactgtgtgcaggcgctgttctatggactcaggatacatcagctaccgaagcaaagatccctaaccttgtgaaactgacattctggtgggaggacagatccaataaaaactaaaataaataagtcaatgatgtagtgtgttaaaaagtgatcggtgctggctgggcgccgtggctcatgcctatgatcccaacactttgggaagccgaggcaggcggatcacctgaggtcaggagttcgagaccagcctggccaacatggtgaaaccctgtctctagtaaaaatacaaaattagctgggtgtgatggcacacacctgtaatcccagctactctggaggctgaggcaggagaatcgcttgaacccggaaggcagaggttgcagtgagctgagatggtgccgccgcactccagcctgggcaacgagagaaattccatttcaaaaaatattaataataaaataaaatcatcaccaatggtgattatatagaaggtgggaagggttaaatgagaaagtatgtaaagtgcttggcatggtgcctggcatgtggcacagtagggatatatgtgaattggctgtgtcaagatcaattaaaaatgcaaagatgagtctctaaatcattttatttgggaaaacagaattgcagttcagggcatacacacagactggggtggtcttcagaacaacaaagagatggttggaggtttcattagagaaatgttatgtattaccttgaaagatagctcattgaccctaagcaaagtttttaggaacaggcaagctctaatttgtgagagaaggtggtaagtaaaactagtcttagagttacagcaattcgtttcagcagctac

SEQ ID NO: 585902 - DNA, 4001 bp, Homo sapiens
actacaggtgtgaactatcatgcccggctaatttttgtgtttttagtagagacggggtttcacctggcaccgggtctccaactcttgacctcaagtgatctgcccacctcagcctcccaaagtgctgggattgcaggcgtgagcccccgggctcagctctggaatttattaaatatgtatctataccctgacactgctggttactgtctataatccgagtgttttgggaggctgaggcaggagaattgcttgaggtcaggagttcgaaaccagcctgggcaacataaggagagcccatctctttaaaaacaaaacacacacacacacacacacaccaaacaaacccatgtatttactgcagacctactttattatgcaccgtgatgtttcaagtatcacaaaccattacaaagcaatataatcaccctccttcccccttactgcttcaaactattgtggtaaaaataaataaataaagccctggcgtggtggctcacgcctgtaatgccagcactttgggaagctgaagcgggtggatcacctgaggtcaggagttcgagagcagcccggacaacatggcgaaaccccgtctctactaaaaatacaagttcgcgtggtggcgcgcgcctgtaatcccagcgcgccaccacgctgggggacggagtaagactcagtctcaaaggcatgacgaaaatagcaaaaatgctttagtgttatacctgttacgaatttaatggaaattacaagtaggagcccattacaatctctagccttaaaatgctgaaaacatacacagtgtgacaataagtaaacttcgagacccaataagggggaaagtccaacgtggaaagtatttggtaggagtgaagaacagagtgacaactgcttagtcccactggatatttcgctcctcttcaggaagaatactccagtttggggaggccatatcccgggccagccagttaaaatcgtcaacatcgttccagttatttttgctcctatctaaaccagagctctcgaagtccttgtcgatctccgggtagctccaggtgtaaggggcgaactggatcccactgcagtcctccacgatggccctgctggtcacctgcaggaagatgcgggtgtctttcgtactgtgtatgcggagctgttggcaggccactgccagcacgcagtcactgcagtcctccaggaaaacagaggtagacaccggaccgcagagcagcttgcagctgtgggccttggttagccgcagggtgttgggatttccatacagtctgaccgtgcagttgctcagttcggtcaaaagaacgtcgcgctggtgcaactcgctggctctcttctccaagacttgggactccaggttggagaaaccgcagacccagctggggccgaggtctccttccgccttcttgggcagcggggagtcctgtatgctttcaactgccggggggatgccaggagccgcgtctactttggtagacgaagcagcatcctttccccgggtcttgaaagcgaaacgcttcttgggctgcagcccccggcgccgctcggccaaggccgcctgcagccgcgccagcgcctcttgtccctgccgcaggtcgtaagcggctaggaaaaaaactgagtcgttgattagtttctgcagcccctggagccgagaggccgcctcctccagccgctcgaccgactccgcgcgctccagaagctcttccacggccgctcgctcccgaacaaaggtggcgacgaaaaagtggctgttctccttctctacctcctggttctgccgcttttgtttccgcctttcaacttccagctgccgttcttgttcgcgtctctgaagccgctcaggcaccaggctcaggtcccgctgggactccatgtctccggtcctgacagcagcagcggagcaactgacggactccatattggcttcaagcttcctctctcttgtcttccttcctccgggcgcgctgtccgtgaggcctcccaccaacgcgtccggtgattggcctaacatgatgatgtcagatccccggccttattttcttcgcctattggttcctctgcgtcggagggggcggggagatggggcggggccgactgactatgggggtgggaagacaaaggttcttgtggatgggtggggtgggaggcaggcgggggaatcttttttttcctcttaaaggggcaggacttatatccgggattgtggggtgagttgcagcagcggcagctgcacatgtgggtttgtttataagaacaaggttagaaactcgcaggcctccccctccccccagctcctccctactacccccttacaggccggagatccgctactaggggtgtgggtgggagggatgagtgcgtgtggtgggttggggggacaggtagtggtgagaaagatggagcgggggggaatattgcaccgcctggcccgcgccggaggaagcagcagctggaacagctggctggggagccgcttgcatgcctccggttttttcttttcccttccaccaccccttcccccaacccatttctgcctccccgtagccctcatccttaccgcccccctcccccctatccactgcagttcggcgcggcctgggggctcctggatccccgcaggcagttactagggcaggagaaggcaaggggcactgcgatgggagagactgggttcctcactgcaacctggttcgaggggccctgggggagtccataaaaggattactatttttttggccaattgctgcagtcggaggggtgggggcgggggaaggtgagatccacacccccttcctctttcttccctgccctccccgagctcggtcccggccactccctccgcagctgggcgtcgccggccgcgctggggtgagaccctagccccgggctccgtggctctctggggcggtcggtcttaggaaagcggtgggagaagcggtacattatttctaggggtggtgggagggatttgtcaccggaagtgaatggcctagcctaaagtcgggaccaacccgaggtgtgggtgggcagccaagacggcgcagtcactggcaaaaacccgaggcagcgggcagggcgagaacccgagacgcagccgctgcccgggcgcggcagcctcgcatgcttcgctcagatctgcggagctcccgaacctctttaaccctgcccgcccttccaaccctaggtttcctccttatatccccagttcccagcctccatcgtttaaattggggtatttaacgacccaagaaacttgaaatttcaccgatctacctgcattttgatgcagagaaagatgggaggaaacgcgaaccattgaattaaatctgagttaaaactgatctcccattttcacgccccactctcttcctttccttcccacttaaaacaaacaaaacacacataaattgctgggccagagtatttctccgctgagagcacagttcataccgtgtggcagattccccgcgcaggcggggcgcgggggcaggggagaggcttgtgtgtccgcgtgcctgcgtgcacccgatggaaaagggggtgccgaaaaacaatggtgcttactcttgtgcatagtcatcgttttcactagtcttgttttatgggcagattaggtgaggcttctgtttttgcttttttgttttattttgttttttttttttttttttgagacggagttatgctgttgttgcccaggctggagtgcaatggcgcgatctcggctcaccgctatccgcctcccgagttcaagtgattctcctgcctcagcctcccgagtagctgggactacaggcatgcgccaccatgtccggctaattttgtatttttagtagagacggggtttctccatgttggtcaggctcgtctcgaactcccgacctcaggtgatgcgcccgcctcggcctcccatagtgccgggattacaggcatgagccactgtgcctggccctttttttttttttttttttttccagaaaagcaggtttatttca

SEQ ID NO: 585903 - DNA, 4001 bp, Homo sapiens
aaatgtaataaccttacctctttagaacacattaatgcaaactgtgcctgttatctgacttttcttaaatcatcatcgctttactcactacacatctgaaatgagtttataacaacatattctcacatagaacttagaggtctcaaagttacaaattatatgtccaaagatccttcaggcatatgcacttcaagcatgtgctggtacagaacagacactcagatatttgctgaatgtatgaaagactctgacgatcactttgaaagggcaaaggcccccaaagactatctatcctacatactcatcactgaaaaacagaccaaaaaagaaagcaagctctgcttctggaaataaatatatcagagatattttttaaaatatactttttttttgacagttatcctataataacaataacagaagtcctgcagatgaggatataaagataggaggatatagtccttggcatcaaagtgttcaatatgaagggtatgcaaataactactgtaaaacatagtattataacagcaggtatggtctaagctaagttccttgaatgcagaaaccagcctacatgtctttgtgatctctgcatctagcactatgcctggaatacagtatgtgatcatgaatgagcccatatacacccctggaagagaagacaatatagactaacagccaatcactgtgaagagagcgcagtgttttcacaaagcagggaccatctaacttgggtctcacaaggtgagtaggaatttacacatcagggcttcagacaaaagagaaatcaagcagaaagagacagattgaaaaagcatgcagtatgcaggcaacaagcttagtatgactgtatagaaggtcactgcagcagatgagacagcacatattggtgggctcatactatcaggagttttcaatgttattgcataggcaataataacagttatggaatttcggaagtgcagtatgaacagatctaatttggcaagactagatgaatttgagaggagtaaaactggaggacggaagtttcgtttcaggaatctaaggttgaggcaagagataatgacggcaggatttaaagccattataagtatgattagagatttatccaggaccttcggtggcttcaggccactttttgcaagtaagtctacagaagaaaccgcacagtgattactgcactaatttatcctcagaaaagagttgtttgctgggtatcttcatctcctggaaattgaaacatcaaatccgatattttttggaggcaatcaaattaattctgcatagccttctagtgtctgtataactaaatgaagcacagtcttttcacagaaaagtctacctagagatttggaaaaccatgatggcctgaaccgagagacgggagaccctgcaaataaagtggtgtgtattatatcttaagcgctaccgtgcccgctgtctcaggcttctgacaaaatatttaagtctcaatgttggcagcaaaacaggcgggcacagatctgggtgaatctgcttctaacatggagaagaagcggatggcaggacagggcagggtaaacttagggtcttcgatgcaagggactgtcctgtcccgcctgccgccgcccagccagccagtagtaccctgagccccacaatcgtacgatgggaagctgcctgcgaaacacagcagagtagggcaccaggcgggagtggcggccgagtggccgttacaggccggaacggcggcagcacgaaagggaggaacgtcccccgaggggcctgcacgcgcgccaattcctagtctcttccccaccattgcccccaggcctcagtgcagtggtggccttcgcccgaaccgtcagaaaagagtacaatctgttacctgggtcactgcaaagatcactatgggccagcggaagcgaagttaaacagccggcggcccaggcgcccgccacagcgaacctgcccgacctcactgaacccctggcgcgcgttgataatgtcacttccgccagttctgccctcggcttcagcgagttgctcccactagggccgaggccatgagaagtgtgagcataggtcacttcctgtgtttccataggtaaggaggggcgaagctcttgaggagttccggggcggggccgccgtgccacagccatctctaattggcccttgctggacgtaggaaagatcgatttttaaatggcgtgtgtgtgtatatgtgtgagtgtgttttgttgttgttgttgttgttgtttaaagcaactagcggcgttaccttcgacaagttacctgacctctcccccgcattttttttctgtaaaattgaataatgataacagtgcttacccttgggctgtcgggagattgacagagattgacagaatcagtgcctgagcagtgcttggcactcagtaagcgcgtcctccttacctgtcagcaagaacgctagctgatcttcaagcgtgtagaatgacaaggaacactaagcaaaacaaacagcttgtgtttacacatgcatttatattcagttctgccactcccagttcatgcactgttgtcacatggctctttccgcagttgtttcttagtgggacttcagcacgccttgattttcccttctgtagttcattgtggcgtaatcatatgttatactgcttgttttctttgtactttttattatcagtgaggttgtgagctctttaaggataggaaatgttatatacattttttattagccaggacaattaacgttcccaccgttattcgagttgccgttgcgccatagttctgacaatttttttgtatggtcagacttaaatttttgtccattggggtgaattccaatgttttcttcgagggggaaaaaaacaaaaaacaaacaaaaaaaaccctttacatccctgtcagcgctttttggaatgggcgggattcaactaccaaagggacaagccgccgtgcagccctccaggagcaacgactagcgtgagatagagaggccgggagcgaacttcaggagaagccggaagtggcgtaacgtccggtcaaggcagccatctcgccgtgagacagcaagtgtcggatccgcaggcgcagccgtgcgatgttgtcctctacagccatgtattcggctcctggcagagacttggggatggaaccgcacagagccgcgggccctttgcagctgcgattttcgccctacgttttcaacggagggtaaaaaccccagagagctgcggctttcactttcgcccttcccccatctgctgaagcctatttaggagtcaccgccgtgatggcgctgccccgggctcctgcaggcctcagaaccctgagctgagggggtccgcacaaggccggtctccctgccgtcctctcatgccctgtgtttccctcttcaggctcgctttgctcaagtttacttggtgattgcgatacagccttggtttttagggtttcccattacagtcatgtcatttgagtttttatgtggaccgccactccgtgctccttgctgctgtaagacagtaaagtagaaattgaaacatagcctctgctctgtggaagaccattaaaactggacctcatgtacacgtttcttatgccagccggcgagggtagagggttagcgtctgaaacttaaaagttagggttgtttggtctgtgttgttagatgcatagctgggttggtagccgagatgtctaattgtagccgcctgatttctgttatttctaattgtagcagtttaatcattttgttttatttcaaatagaaggtgggattggctgagcaaacttagtttcatagataagtgctttttttttttaacgtttagcttaagttcaggaaaacaaaatactcagaagatggaccttttagtatgtgtgttcttgtatgttatgttcaagttttggtttttattttaattaccagctttatcttgagtagtataattttccgtggtggcacgccagagatttagggttatagaaagatgctctgtttaagactc

SEQ ID NO: 585904 - DNA, 4001 bp, Homo sapiens
cttattgcaatgagcacattgacagagcctgcagatgcacatctcggcaggagagattttctttttaagccctcatgccctattagatttacttttagggcttttattggctatttttatcacttatcccgactctcatccctgcttagccctacccacaattcattttctcttcttcagttctagatccttctccatcaatcctaattttggtcaaaaataataataaaataaagcgaggctgccggcattgccagaatcagaaaccgacgaagccgctttttgggagctattagagaagccgctgtaagttttctgagaagcaacggacccctagcatctttgcacggtccctcttcccctgggtgatggctccgagacagatgaggaatctcttttccccgtctttcccagtggtggcttaaacgaaagataacccttcttttcttatcctacaccaggctcggtaacgctcccaggtacggacgccccacccccaacccgttatccctaaagagatccccaaatatcgcccggtcctcttcagaactgagccctccctcggccaccggaccggtttcccccacctcagcggctgccctccagtcgcccgcccccacacatcccaccccaagtctggcccgggctccgcacatgcccaccccgcgcccagacgccccgcacccggtgctcaggccgctcagccgcccgcgctccctgtgcccagggtcgcctagggggttaccgtgggaagagggagcggtggctgaggacgcggcggcagcgctgctgccggttgcgtcggatgcgaaggagaagctggaggacaaggatgaggatgagacgggcgcgctccccagtctccatggaactcccgccccggcccgttgctaggagcccccgaggctcggactccgtcttccttgctttgttgttccgggtgcgaggcggccgcagcttccccgcgacaataaatagactagacgctggggagcatagagacagtgcgcgagggctagagcgccgccggacagggcgctcctgggtgcctcgctagccactcatttccggctctcactgctcccgtcactttccccgtcccccgcccccacccttccttcctccttcctggtccccaaatcaggcccctcctgcccacccgctgggctcggtgggaggtaagaggtgggatgggggcggcgctaatgggcatcggactagacttttttgtttaagaaccgcttgaaagggttctgaaaacaccgtgtatcctttgtatatttttagttgatatctaaacgtgtagtaatttctggcatacagtcgaatatttaggtggacttttttgtcaaaaccgtagaactttctcatcagctcattaaatttatacaaaaggtcctccccaccccccattatataattgctaaagctagtccttaccgtccagacgagacttgttttctgcctgaaaaaagtccttcgctttttcagtcaaaatgaacccgttaatttatgatgtcgcgataaattcccctagtgagattcctcactaggcgaattggaatcctggtcttagagcgaccggggatgacagatgacagacggagggaaggaagtggggagagatggagacacaaggtgtggcgagacggagggataacgcaggaccgtatgccacttctgtcgcctgtcccacattccttactctacgtgggtttgcggtcgggactgtccctcgggaaccgagaggcggatccaggaaggatgggagtgggagagggcggatgctggcgaggactcaggcagcccgggataggaggacctctaggaacggagaccctccgcggctctgcgcccaagtagccctgcaggggccgggggaccccgggggcgcacaatggcccgtttgaaccgtcgccctggggcccgagtgcgtcctcggggtccctcgggagtggcctgagaggcgctgcccgcgggagcgaaaatcgcgtaacggccctgagggcgccacgccacgccacgccacgccacgccgcgcggaagcccccggctcccggccccacgtttcccactctcaggccggcatcggcctttccaccagagctcggctgcagtcagaagcccctggcgttagttgaggtcaatggcagccctgatttaattattaaaagaccacgccgagccgggttcatgggtacctggcctctgattggtgggaatcagatgaaaaaaatgaaaatgccactgcctttttaaaagagaagacgtgggctgaattcttggggttttgacagtaggcaaccatttaggtattttattatttacgagatctccaaggatgcctcttgattttttgctttcccctctgagtgttcagaaacatattcgagcatttgaaagctccgtagaatgatggagtttgttttcatttctgtactaatttatttttcaagggatagtgattatagttgggtcaggtttaataaagaaagtgaacaagaagctgggttagaaagtaatgtctgtgtggtggtggggagaggacttttaggaggtaacatctcagccaatttctaaaagggatgggagtgggaagaatgtatgtagagtgttccagtcagagggaacaagatatgctgagtacttgctgtgctggggtattagtgtggctagggcatcaggaaacagtgcaaaggaagaatgacagtcattgaaattggagggaaattaaggtcttgaactttcagtgccttgtagaccatagaaggagtttggactttcttccaagtgctagggaaagtggagttttagcctggaaaataacatgatttgccaaggaaacggcaggggagactctctattccagtggctactgccactcctgaaaagtcaacgttacagcaatggcgacaagttctaaggtccttacgaggcattctccttcaaggggaccagccaaatacctagaagcaggaatgtcaattactttagactcccttttgtcatggatcagccaatagtttgcttccctacattagttccacattctggaatgggatttggttttgctgcaagcactattccctattaattatagacctattatactattccggtgatggttaacactaaaagcccagatttcaaccactatgcaacatatcaatgcatcaaaactgtacttgtacttccaaatttatacaaaataataataataataatagacctatcacattatcccatacaccattcctctaaccaaaggccatgggcttcactgctcttataatgtgacccattattcaggtgccagctaggagacaatgcattgtaaagttagaatatgcagtatatgttctcatccaagactattgatcagtacagaaattgataacctagaaataggaattgtgattgctgacccttgtattagggttttctagaaggacagaactaataggatatatatgtctatcctattaggatagacatatatatcctgttatgtatgtatataactactacttaataaaatatatatatgggagtttattaagtagtagttaactcacatgatcacaaggtcccacaataggctgtctgcaagctgaggagcaaggaagccagtctgagacccaaagctgaagaacttggagttcgatgttcaaggaagcatccagcatgggagaaagatgtaggctgggagatgtagactgtaagacagtctagccttttcaggtttttctgcctgctttttatatcctggccatactggcagctgattagatggtgcccactcaaattaaaggtgggtctacctttcccatcccactgattcaaatgttaatctcctttggcaacaccctcacagacacatccggaatcaatactttgcatccttcaatccaatcaagttgacactcagtattaaccatcacaaccctaaaatgtagaactggcctagtaaaggaagtggggacagtgaggagtcatccatc

SEQ ID NO: 585905 - DNA, 4001 bp, Homo sapiens
agataaccccaggactcaacatccacagcctcaagtatggctatcccagtatatccttcacagaactgctacaaagattaagcaacagtctttgattcattaatctatctttttcttcttaatgtcttaaaatgcaacttaagtttcccaatgttcacactttgcatcctgtccacttctttacacatgaatgaaattcctttaacagacactggacctcaattccatattaaaagcttaagatgaaaacgcctgagttgaagctatattctggctagccctcattcaggaacaagccagcccaatcaagggcacatagtaataggtcactagagtttctgatactgattttgagggcagagggtacgtaaagaggaggctggggaaaggatgacacctttttgcttaggagaagtcaggtttaacaaaaggggtggggaacaaacagaagctgtggttgacctaattgctcctatgatttatcaattttattttcatctttaatcttcaactttacataaagaactttgtatgtatatgtggccttttcattgtgctacaggaaaacctcatttactcacccaaaatgattttgtaaagtataaaaccattaagcagcttgtgatgtaagactaaagaggtaacataaactgatatttcactgggcataccaaactgtgaataatcctttcaaccagatagtgctaacagtcacttctcaataggaaggaactgccattttctcaaagagactgcgaaattatgccaggatggctgaaccttcttatgtctctttttatattttcccagagaatccacattgcttacacacacacacgcaaacctgctcccttttcttaagtcacagttttaaggcactgttctaaaccctaaatacagaagctcatgcacttactgccagtgtcgctttggaactgcaggtgacagatgcagtcagagagctcacagatgtggattgactgcagtttgagtcttattgcaatgagcacattgacagagcctgcagatgcacatctcggcaggagagattttctttttaagccctcatgccctattagatttacttttagggcttttattggctatttttatcacttatcccgactctcatccctgcttagccctacccacaattcattttctcttcttcagttctagatccttctccatcaatcctaattttggtcaaaaataataataaaataaagcgaggctgccggcattgccagaatcagaaaccgacgaagccgctttttgggagctattagagaagccgctgtaagttttctgagaagcaacggacccctagcatctttgcacggtccctcttcccctgggtgatggctccgagacagatgaggaatctcttttccccgtctttcccagtggtggcttaaacgaaagataacccttcttttcttatcctacaccaggctcggtaacgctcccaggtacggacgccccacccccaacccgttatccctaaagagatccccaaatatcgcccggtcctcttcagaactgagccctccctcggccaccggaccggtttcccccacctcagcggctgccctccagtcgcccgcccccacacatcccaccccaagtctggcccgggctccgcacatgcccaccccgcgcccagacgccccgcacccggtgctcaggccgctcagccgcccgcgctccctgtgcccagggtcgcctagggggttaccgtgggaagagggagcggtggctgaggacgcggcggcagcgctgctgccggttgcgtcggatgcgaaggagaagctggaggacaaggatgaggatgagacgggcgcgctccccagtctccatggaactcccgccccggcccgttgctaggagcccccgaggctcggactccgtcttccttgctttgttgttccgggtgcgaggcggccgcagcttccccgcgacaataaatagactagacgctggggagcatagagacagtgcgcgagggctagagcgccgccggacagggcgctcctgggtgcctcgctagccactcatttccggctctcactgctcccgtcactttccccgtcccccgcccccacccttccttcctccttcctggtccccaaatcaggcccctcctgcccacccgctgggctcggtgggaggtaagaggtgggatgggggcggcgctaatgggcatcggactagacttttttgtttaagaaccgcttgaaagggttctgaaaacaccgtgtatcctttgtatatttttagttgatatctaaacgtgtagtaatttctggcatacagtcgaatatttaggtggacttttttgtcaaaaccgtagaactttctcatcagctcattaaatttatacaaaaggtcctccccaccccccattatataattgctaaagctagtccttaccgtccagacgagacttgttttctgcctgaaaaaagtccttcgctttttcagtcaaaatgaacccgttaatttatgatgtcgcgataaattcccctagtgagattcctcactaggcgaattggaatcctggtcttagagcgaccggggatgacagatgacagacggagggaaggaagtggggagagatggagacacaaggtgtggcgagacggagggataacgcaggaccgtatgccacttctgtcgcctgtcccacattccttactctacgtgggtttgcggtcgggactgtccctcgggaaccgagaggcggatccaggaaggatgggagtgggagagggcggatgctggcgaggactcaggcagcccgggataggaggacctctaggaacggagaccctccgcggctctgcgcccaagtagccctgcaggggccgggggaccccgggggcgcacaatggcccgtttgaaccgtcgccctggggcccgagtgcgtcctcggggtccctcgggagtggcctgagaggcgctgcccgcgggagcgaaaatcgcgtaacggccctgagggcgccacgccacgccacgccacgccacgccgcgcggaagcccccggctcccggccccacgtttcccactctcaggccggcatcggcctttccaccagagctcggctgcagtcagaagcccctggcgttagttgaggtcaatggcagccctgatttaattattaaaagaccacgccgagccgggttcatgggtacctggcctctgattggtgggaatcagatgaaaaaaatgaaaatgccactgcctttttaaaagagaagacgtgggctgaattcttggggttttgacagtaggcaaccatttaggtattttattatttacgagatctccaaggatgcctcttgattttttgctttcccctctgagtgttcagaaacatattcgagcatttgaaagctccgtagaatgatggagtttgttttcatttctgtactaatttatttttcaagggatagtgattatagttgggtcaggtttaataaagaaagtgaacaagaagctgggttagaaagtaatgtctgtgtggtggtggggagaggacttttaggaggtaacatctcagccaatttctaaaagggatgggagtgggaagaatgtatgtagagtgttccagtcagagggaacaagatatgctgagtacttgctgtgctggggtattagtgtggctagggcatcaggaaacagtgcaaaggaagaatgacagtcattgaaattggagggaaattaaggtcttgaactttcagtgccttgtagaccatagaaggagtttggactttcttccaagtgctagggaaagtggagttttagcctggaaaataacatgatttgccaaggaaacggcaggggagactctctattccagtggctactgccactcctgaaaagtcaacgttacagcaatggcgacaagttctaaggtccttacgaggcattctccttcaaggggaccagccaaatacctagaagcaggaatgtcaattactttagactcccttttgtca

SEQ ID NO: 585906 - DNA, 4001 bp, Homo sapiens
tgacctcaaatttataaccgccctgaacgcagaacatcaaccgcgacagctgtggcatcagcggcgacagtaattttctccctggcattcaaccagagggcagttggactgtgcaccgactgcactagtggtgggtagccaaagctagcctccaaagtgaaccacggtctggggcctggtcccgtttgaccgaaaatgctatccagaacccccaccgagctgcaggcccttcttcctgattgagctagaggtgagtgaagacagggtctggggtagggaggggcgtccacgccagcttgcccattacctgccggccttggtgatgatcatctcagtgcctatctcatgaaagcgcttccagagctcggctccctgcagatccacccgcggggcctgcggcgagggcagaggggtcccgggccgggccagggagcgcgccggagaccccttgggggagcctcccggtgacgccagaggggaagctccctgctggaagccgtcctcacagccgcctggacagcaaaggacagagaaagggaactggtgagggaaacagaggggaagccagccgcggagacgggcccacctggtggctgagaagaggaaaatgaccgggagaaaaggggaagctttggtgccatcaggtcctcctaaagaacaagccagtcgatagacacccacattctgcctgtcgaaggggcgcattcagagctccagtgtggcctgcttggtccccaagtcccaagcccgggagaggcgcgcgggcagcgtccaccccacccgctgggcctccgcagggccaaggccccagcagaaaaggcttcacgccgccgccggggtctgggacgcttgcccgacggagtcagaggagctcccgggtccagagtccccagtgcaaactccgacgcaacctgcgcctcgaagcgcaagcagcaaaagcgcccggactctggtcccaagagcctgggcctccttaagccataagcgtctgcggcgcctcgctttgggccttcttttgggccgggccggaggcatcttctagaaggctcttcagaccccgctttcgccaaactcccggcgccctgcgcttccagcccagcagagaaaagtgtgaaaagcaagcccgcggtcgccgtcggccttggcagagaaatcaagaggagaagggaagggaaccgctcaactacccttcgggaaaccaagtttccaaatatgccgccctcttcctggtttgcacaaacggtttagggcattcgttccggtttcagggtggggtatgccgtcgctcccctcctccccgccctgtgcttttaaaagttaggaaacaaaaaagagcacccattggctggaaccccaagggaggcagatgcaggaagcacagagctgcaccgctaggcgcagcaaacagccgcggccgaaggcgcgggtcgccgagtgggcggcggccgcccgcgaggcgagcctggaagcagtatctgaaccgtctggagggtgaccaggttgcgcggcgagctttgcgactgacacggccaatgcgctagtggctgagtggccttggccatgtagggacgcggcgcgcacgcacacccacagactcgcagaagttcaggttcgcgccggagagaagttataggcaggaaggggcccactcacccgcggctccgcgctccaggtctgcgccactccgagccggcccagacgtcgccccagccggcggcgggagcgcagcgccttcgtctccctcagaagaacccttttcgcccgcgccgccgccgcggctgcagcctccgtcgtccacggcccccgccgcctcttcggcgcccagttttcgccgcttcttctgaagctgttgctgcttctcggcgccgatcagcgcctccaccgagaaagcgtgcgccttgaggcttagcatgctgcacggcgagccccttcgcttctcggccatcccccccgccccgcgcccgcccgcccctctctcatatacactcacgcgggcacacgcgcgctctcgctcttcccccaccaaaaactaaaaggctctcggggcctcccgagatctgcccccttccccaccgcgggcaaaaaacagatttggcgtttccgctttctcgcttgtgttgggatccaggaaccggcgacgcgccggccaagtctcctttcctgggtctctctcgcgcgctctctcactgatgcactcctttgctcccaccccttccacctcctcctgctgctccgaggtctgcctcaactgatgcgccagagaggactaacatgggtaaaaaacactctgtggacacaaattagggattgtaattgaaatttgttgccttgatctgtcagcacttccaggcaggagagcggtgggaagaacttgctcattagtgtcaataaagcggcgggggcggagcccgggtccctgtccatcacccagacggccggccaatcaggaggcgccgactccgcgcagcccgcgcccacttccttacaaggtagcgaaaaaccaggagtgaaaagcgccgctgtctggcttggatgtgccagccacacggacgctgaactctgtctctctgacgtccgtagctgagtccagccccgtagtctccagctttcctcaccaggacctggaaaggcggaagttcccggctttaaactagacgttcaacaagttagaaaatcaggaatctttcaaggttccgtaaattgccgtcccacttccgtatcgcttaatgttgctacaactcagaatattgggaagctgggaagaattcgcaggcccctcctttctcatttaaatgttcctgcactcagtctgcgccagatatggcttaggcttatttaaactttactccgtgatttttttcttaggggataccaggttaagaaatatgtaaatcctttaggagtgcaaaatgttacgttaacgctcagtccgtcatataaatgtcagaaaaagcacgccctttccgcagcccaccttttctttcaaagagtggtagttattttaaaacgtaggtcatgggattttcattctgtacgtctttaacgatatggacaactttaaaaccccttaaaacttcgcaaaatgaaataagtatgaagacgcaataaaattccccatttgaaaaacttctctgtgatttaagtaagtttatatttgtcctactgttgacaatttacaatcgttacttcaggcttttaaggagtccattgatgtatttaaaacaaatttaataaaatcagtgctttttaattaaatgacaccaaacatatatatttgtacaatttgttttgtagtttcaactcgactttttgttaggattaacaaatatatatatatatgtttggtataaatagagcaaatctcttgtggaataaaattaatcgtgcatattactccatcttttgtataaaatacacggcaggccgggcgcggtggctcacgcctgtattcccagcactttgagaggcctacgcgggcggatcacgaggtcaagagatcgagaccatcctggccaacatggtgaaacccccgtctctactaaataaataaataaatacaaatagtagctgggcgtggtggtgcacgcctgtagtcccagctactcgggaggctgaggcaggagaatcgcttgaactcgggaggcggaggttgcagtgagcccagatcgcgctactgtactccagcctggcgacgcagcaagactccgtctctgtctctctctctgtctccatatgtgtgtgtgtgtatatatatatatatatatatgacaaaggaattttttcctctccctcgtccctcgtttaattcaatctccgcaaccgttggctgcccttttatctctgacttctctgtaaactttcagtagagtagcatttgggggtagatccgccactgagactgatccttttattgtagaagagaacgcgcggttcctggaggccggacaccacagcgggagtaggaacctggcaggcgatgagcagaggcacgagcaagccgc

SEQ ID NO: 585907 - DNA, 4001 bp, Homo sapiens
atctcggcctcccaaagtgctgggattacaggcgtgagccaccgtgcccaggcttttttaaaaaaattaattaattttttggtagagacaggttttcaccatgttgcccaggctggtctcgaactcctgagctcaagtgatccaccctgccttagcctcccaaagtgctggattataggtgtaaaccaccatgcccagccctggacaagttccttaacctctttgtgcctcattttcctttactgtaaatgaggataatattagtaccacctacattcaatacacttaaaatagggcctggctcataacagtaagcactagatgaatgttggctactatagtctaataaccataacactcctacagctgactttaccaagaggcagtggcaaaactcaaatgtgaatctaggctttctgaggctaactgcctcaagtcacggagaaagacatgcccagattattaaaaacattattcaacatagaactgccctaacccaggaacagagtgcctcagcaaagctggaaactgaatcaagtctaaacttggcctctagtggcctcagaacatccccactgtgatatctttctgatgatatcccaggtcctgtatgagctaaacgggaccaaaaagggtcagtctggcagagagcttctgactgtgcacacttctggtgggaagatgaaggtctggaccacgaccatccatccaatctgatgggagtatgggaggcaggcagcagggtcttgtggagaccttactcattccagcctggcgcttcaaccacccaggggcaaagctgccctgcttaatgctcaccttggctgctgtggtcttccaggctgaccctccagtcatcaccccggggctcggcatgcagttcggcgtggatcccagagatgaggccaggctcctgctggggccgcagggccacatcacacaggtcggccctgtggcccaagcgataggtgcagccagccccggcgggggggtggaaggtgtagagatcaccgcccctgccgccccctatgcgcagcagttggaagcagggcagcatgggcggtgccccctctgcaccacctcttccacttcaggcatccatttcctttcccactcctgggccacgcaccgctggcttaagttcgcttcccagtctgatgcaaacttgagttgtgctgtatgcggtttcaactttgagcacactacctgaatagcccaaattcagagtgcaagcagcctaggactcaatgcaaaattggttaagccgacttgcaaatgaaaaattccaggaaggtctccgtgcaatgcaaactcaggaacacgtcctatggcacctcacttgagctggatcctcagatcgcaaaatatttggggagcctccaatctgcaaggcaaggatactttaggcagctcctgtgtgtgtcggggtggcggggcgcggggaaggaggtcctgttatacacacgtctacgtgcaatacgaacacatcacctctgtgtaattcggagaagagtagcttcttcctgtcaaacttgcttatcctaatagagcactcctgcttgcctgcgccccgatcttctggccaatccctcactcataactggttgaacctccgagggcaatgaatccactgtcatcccccaaaagaaagtgcaaacgagtccttaagtactccaacaaattggacctaaacccctacttcccggcttctctaggtgggataaaaacaggaaggagctccccgcgatcatgcaaggcatacccggccttttcccactccgccccagccccgtttcggatctacccgcgcggcgcagtctccgagtagcctcctcttcaagcagtgccagcctgtgcggcggatcccgggaccccttgggctcctcggcaggagccgacgttgctgcatctgtttgacagccaagaagccggggccaggaggggcgcggcctctgcgcgcgggcagcgcctacccctccttcggaattcccgggcccgaacttcgcgccgagcgagcccgcccccgtgccgttcccgattggccagctcatgtgttctcttccgcgccattggacagcgccccaagatctcccgccttccactttttctgattagttcacaagttttcccgggttgccgcagtgaggaggagccgcctgggcgcggagatgctccgacgcatttagtgggcccaaatttagacgccactgcgcctgcgtacacctttccccctcctcccaacagagtgaaataggactttagggcgcccgccttgcgcaggcgcggtcaggggcagaggcggggccgggagcgaggcgtagggggtgtggccaaagcgcagtagggggctctcgcggttggtaagggacgttcgggaagagtcggttgggggcgggaaggggctgagcgggggtcctgggagggttcaaggggtccaaaggggaagggggtacaggggccaggtgaagggacagatgaagagatcagaacagccttagagctcacgggctaactgggtgaagcctcgggtatctaggggagcagtggtgggagagtagagccggctagcgtacagggggcgagggcaggctattgagagatgggggtgagggtcaggaccagaataattccttcagaaaaaggtagattaggttgtaaaaagggacgggagtagggatcccagattcgggtaaaaaatagattaatgagggtgggagggtgggaggaagatcttaaagtgcccactatgtgttaggactcgagaaagaggaggcgggcagcaggcatggaagctaaggggatagtagagagaagctgagagaacagccgcaggaaagatttgaataagatgtcaggacgctggcttttctgcctggggatctaggcggcctggattcccaaggtcttggggagggtctagccctgcatgtggccacattcagctggggccaggccttgggccagcactttaacagggaaggacccaagagtcatggcctgctggtgtctggatgggcttccctcaggccttgctgagccatggagagaactctggagatggcgctcaagacccctgcactgtgtacctcctttctcacctctggccaggagcagcagggaccatagaaacttaaggaggagggtagaggcactgcccagaatcctgaaagtatgagtaaagcctcagagcccctctcagtctgtctctttcagtaaattctctccacttgatagttgcttgggttccatgaggaaccaggttgagacaagcaagtgaatttggggtatctcctactttggggaagtaggaaaagagctaagcatcgggtggacctggctataattcaaggattatgactttgttattgtaggggctttctctttggaaggtggcctgaaaattgaattggagtgtctttgtttctcctcttgtccaggggaacatagatggctggagacagaatctagagccttcaaataatgtggagatgtttccaccttcaggtcagtgggaccagacaaggggagtggtggttgtctctgcctgggaaactgaccatctttgtttttgtaattcttcaggttccactgggctgattcccccctcccactttcaagctcggcccctttcaactctgccaagaatggctcccacctggctctcagacattcccctggtccaacccccaggccatcaagatgtctcagagaggcggctagacacccagagacctcaagtgaccatgtgggaacgggatgtttccagtgacaggcaggagccagggcggagaggcaggtagggatccatccacgccgttttctcaggcttgcttgctagtgacccttcctcactggaataaactccttaccctatttcggccctagtttccagaacgtactcatttttatgtaagcaattagttcctacagtgcataaataataaagcagtgtgctaagtgctagggatgaggataacaatagtgaataagacaaatcctga

SEQ ID NO: 585908 - DNA, 4001 bp, Homo sapiens
atactacattgacttttaatttaagatcgtcttcatgctggactgagaaagtatgctttctcttcctttctccgggctgttttataataaagctcatttaagtttcttattcaaagatgaagagagtagcagttgtaaatattcgaggcaacactttcattttaggtggagattttaaaaagctatttactcattgggggggaaaaaccccaaactttcaattggagagaaaacatttttcatggtaaaatgtgggtttgcatcttcttctccagcaattccagaaaccaattcggtgagaagacaattcagacccctctcactactgctctagtgctagctgataagacttgccttttaaaaggaaaaatctctcattcttatcatatacaaacagagatcctagtaagttgttgttattgtttttctttagatcttagaagttttaaaataaaatcaaatgaaaaaaattaagatatatttcttaaacagtaaaatacatttgagaaaaaagtagactcaatgattatcagttttttgtgttaaaaaattaggctcaatgggcattactttttaagataaaaggtaacatttcttaaatcttgggtgagagtgacctattttagtatttattacactcatactagtgaggatttactgattttgctgatcattactagaacttctgggatttaaaaatattaatccacttataggagaagcacagaatatttaagcggttaagggcttacgtggacaatttggggggcatagatgtgtccttatccaatggtcctaaatatgcttgtgaaagaaacggagttgggtgtttttatttacaaggaaaggaaaatcaagttccactctctgctaaaagaagaaaaaaggattaacaaaatgcctgtccgctcgcagcgtcttgtcagtgttctcagttccgcagcagccactgcaccccagggaggatggcgatggagcgggagcgggggatccctcctctgtgccagctcaacacacttgcaaacttttaattgggctgccacgtcaaaccctcgcataaatcactcccgctccgggggctggtagggcagagagcgagggccgtgtctagaccgcccgcctccggtccctggaggctctaggcccgcggtggtcgagatgtgtaagtcaccgccgcgcccacacccccactcccagccccgcgcgcactcgcgcccaccgcaggcgggagtgcgggcgcgcctggactgcagctgcagccccgggagcactcaccaggttgaccgggtgaatgtacccgttctcgtatttgtcgttagccaggatctgcctcaagtgggcgatgtagctggacgccagcctgagcgtgtccagcttggagagcttggtgtcggggggcacccagggcagggtggtcttgagtctggagaaggccttgctcagcactcgcatgcgggcccgctctcgcgcgttggcggcgttgcgctggacctgcttcccctcctggctgaccccgctcagggggctcttcttggtgggcgccttcctcctcttgcccaggccgccgcggcccttctggggagacccattctcgcagttggagctctcctcggtgctctcgttggaagtcacaaattccttgttcgaatccattttcaacccgtcacattccaacatctccacctcttgaaggtcctccacatcgctgagggagccggtggacatgtttgggggagtggacgagggagagagagagagagagacagagagacagagaaagcgaggaagagggtgagagagagacagagagaccctgaaaccaagaggcctcccgagtgtggcgcagccacctcctgctgggagctggagttggggtctggttgggtctcacaaccctttccccttcgcagagttgtgagaaggaaccccgaggacttctgcagcagaggaaccggctctctgtttccccactcccagagtcgtggccgtagaggagggtgagcgagcgctgaggaatttggtggacactaggaatttatctggggaatagaggggcggatccttgcagcccagggaggggcctgccaggccccagcaaagcgcttagacccctttcacaaccggagggaaactcaatgcacagaccctgatttgcaacttgtaatgtaaatcaactcaactgcatcatgtacttaccagccaccttctcccaactgtggccggggccgagaagcagcatgttctgtccatctgtaaaaggccttctttctctcttaagacgtcacaactggttgttactgagaactttagaaaaacgactagatcgtttggctctttctgggccttccacctacactccatgccctctctcctcccaagaaaacacgaattaaaatacagggagtatcaaccgcatcctgccaacacctcataagactccaaggctttaccgagatcttccaccttccccgggataaatgaagacaagtgcttcctagaatctttatggtgatggaaaagtaagtataaaacatttcacctacacctggtcattttcaagacatcaaaggactgcctacgtgtacacaaacatacttgatttgcacactcaaacccaaccacacacagcttagtgggagtgggtagggaatgagagggcagtatgagtgtgtggaaaacattatgttagttgatcatcttttcctaataaatggaaactttcccctcggtttttttttcttttctagaaatgcatttaatattgccttgagagtctttgttgctctcagacatcaccttgcctggcactttttgtgatgcaccgtccctttcaatgctgctgtctttgtcttcttccagcctgttaggtgccagtgttcctcacatgaagctgacattacacaacacaaagcaagactatccttttgagaaaggttcttttccatctttaaccccagctcgaaccacctttcctagagaataagaaagtctcctgggaagtaggtagaaaaagcacagggaaacagaacctagggattggatgaaattggtgcaatgaaaccagggagactgaaggcataaatctctcttacaatttctttgccaggttttcttcccttgcaggtaggcattgaagttgaggggctggagcaaaatgtaagagtggtttctgagtggttggcttagggtctgaaggcttctcctacattaagatatcatatctctaatcctaggctcagctgggaattcactaacctctaacgttttgttttgctagcagggtcttgtttgctttccccctatgctgtaaactaaacaggttgtcagcaaatcagtctttattaatgaattagcgacccctcttccataatatcttcgctgaggatccaaaatttgttaatcaccagtgtagagatttatgagctctcttattttctgttgtttgtgcaggtggagatttaaatgaccacatccaccctaagatttattgtgagaatgattgatgttataaaccaggaaaaggactcttcccacagcagggatgacagaaatatcaagttgaagttgcctttgtcttcacatacgaatgacccagtactacaacacagaaagtataataatttaatctgaggttcaagacagcagtgagagaacacccagcaggcctgttaaaaatttcttcactaattcctcaactagtttcctttgatttgctctcccttttctcagtcttggtaaaacatgaaagttaaagttatttttagactaaagagctatgtgaaaatgggcattggccaatactttgtgaaatgtgtgtgtgtgtgtgtgtgtgtgtgtgtagctactaagatatctgcaaaataactacaaataattaatttgggctctggaatgtgataattattataaatccaaactatggccttactgcatacattaagctgtgatttttcttgttggagccatttttttttctttttggctctgggtctctgttacac

SEQ ID NO: 585909 - DNA, 4001 bp, Homo sapiens
tactacattgacttttaatttaagatcgtcttcatgctggactgagaaagtatgctttctcttcctttctccgggctgttttataataaagctcatttaagtttcttattcaaagatgaagagagtagcagttgtaaatattcgaggcaacactttcattttaggtggagattttaaaaagctatttactcattgggggggaaaaaccccaaactttcaattggagagaaaacatttttcatggtaaaatgtgggtttgcatcttcttctccagcaattccagaaaccaattcggtgagaagacaattcagacccctctcactactgctctagtgctagctgataagacttgccttttaaaaggaaaaatctctcattcttatcatatacaaacagagatcctagtaagttgttgttattgtttttctttagatcttagaagttttaaaataaaatcaaatgaaaaaaattaagatatatttcttaaacagtaaaatacatttgagaaaaaagtagactcaatgattatcagttttttgtgttaaaaaattaggctcaatgggcattactttttaagataaaaggtaacatttcttaaatcttgggtgagagtgacctattttagtatttattacactcatactagtgaggatttactgattttgctgatcattactagaacttctgggatttaaaaatattaatccacttataggagaagcacagaatatttaagcggttaagggcttacgtggacaatttggggggcatagatgtgtccttatccaatggtcctaaatatgcttgtgaaagaaacggagttgggtgtttttatttacaaggaaaggaaaatcaagttccactctctgctaaaagaagaaaaaaggattaacaaaatgcctgtccgctcgcagcgtcttgtcagtgttctcagttccgcagcagccactgcaccccagggaggatggcgatggagcgggagcgggggatccctcctctgtgccagctcaacacacttgcaaacttttaattgggctgccacgtcaaaccctcgcataaatcactcccgctccgggggctggtagggcagagagcgagggccgtgtctagaccgcccgcctccggtccctggaggctctaggcccgcggtggtcgagatgtgtaagtcaccgccgcgcccacacccccactcccagccccgcgcgcactcgcgcccaccgcaggcgggagtgcgggcgcgcctggactgcagctgcagccccgggagcactcaccaggttgaccgggtgaatgtacccgttctcgtatttgtcgttagccaggatctgcctcaagtgggcgatgtagctggacgccagcctgagcgtgtccagcttggagagcttggtgtcggggggcacccagggcagggtggtcttgagtctggagaaggccttgctcagcactcgcatgcgggcccgctctcgcgcgttggcggcgttgcgctggacctgcttcccctcctggctgaccccgctcagggggctcttcttggtgggcgccttcctcctcttgcccaggccgccgcggcccttctggggagacccattctcgcagttggagctctcctcggtgctctcgttggaagtcacaaattccttgttcgaatccattttcaacccgtcacattccaacatctccacctcttgaaggtcctccacatcgctgagggagccggtggacatgtttgggggagtggacgagggagagagagagagagagacagagagacagagaaagcgaggaagagggtgagagagagacagagagaccctgaaaccaagaggcctcccgagtgtggcgcagccacctcctgctgggagctggagttggggtctggttgggtctcacaaccctttccccttcgcagagttgtgagaaggaaccccgaggacttctgcagcagaggaaccggctctctgtttccccactcccagagtcgtggccgtagaggagggtgagcgagcgctgaggaatttggtggacactaggaatttatctggggaatagaggggcggatccttgcagcccagggaggggcctgccaggccccagcaaagcgcttagacccctttcacaaccggagggaaactcaatgcacagaccctgatttgcaacttgtaatgtaaatcaactcaactgcatcatgtacttaccagccaccttctcccaactgtggccggggccgagaagcagcatgttctgtccatctgtaaaaggccttctttctctcttaagacgtcacaactggttgttactgagaactttagaaaaacgactagatcgtttggctctttctgggccttccacctacactccatgccctctctcctcccaagaaaacacgaattaaaatacagggagtatcaaccgcatcctgccaacacctcataagactccaaggctttaccgagatcttccaccttccccgggataaatgaagacaagtgcttcctagaatctttatggtgatggaaaagtaagtataaaacatttcacctacacctggtcattttcaagacatcaaaggactgcctacgtgtacacaaacatacttgatttgcacactcaaacccaaccacacacagcttagtgggagtgggtagggaatgagagggcagtatgagtgtgtggaaaacattatgttagttgatcatcttttcctaataaatggaaactttcccctcggtttttttttcttttctagaaatgcatttaatattgccttgagagtctttgttgctctcagacatcaccttgcctggcactttttgtgatgcaccgtccctttcaatgctgctgtctttgtcttcttccagcctgttaggtgccagtgttcctcacatgaagctgacattacacaacacaaagcaagactatccttttgagaaaggttcttttccatctttaaccccagctcgaaccacctttcctagagaataagaaagtctcctgggaagtaggtagaaaaagcacagggaaacagaacctagggattggatgaaattggtgcaatgaaaccagggagactgaaggcataaatctctcttacaatttctttgccaggttttcttcccttgcaggtaggcattgaagttgaggggctggagcaaaatgtaagagtggtttctgagtggttggcttagggtctgaaggcttctcctacattaagatatcatatctctaatcctaggctcagctgggaattcactaacctctaacgttttgttttgctagcagggtcttgtttgctttccccctatgctgtaaactaaacaggttgtcagcaaatcagtctttattaatgaattagcgacccctcttccataatatcttcgctgaggatccaaaatttgttaatcaccagtgtagagatttatgagctctcttattttctgttgtttgtgcaggtggagatttaaatgaccacatccaccctaagatttattgtgagaatgattgatgttataaaccaggaaaaggactcttcccacagcagggatgacagaaatatcaagttgaagttgcctttgtcttcacatacgaatgacccagtactacaacacagaaagtataataatttaatctgaggttcaagacagcagtgagagaacacccagcaggcctgttaaaaatttcttcactaattcctcaactagtttcctttgatttgctctcccttttctcagtcttggtaaaacatgaaagttaaagttatttttagactaaagagctatgtgaaaatgggcattggccaatactttgtgaaatgtgtgtgtgtgtgtgtgtgtgtgtgtgtagctactaagatatctgcaaaataactacaaataattaatttgggctctggaatgtgataattattataaatccaaactatggccttactgcatacattaagctgtgatttttcttgttggagccatttttttttctttttggctctgggtctctgttacacc

SEQ ID NO: 585910 - DNA, 4001 bp, Homo sapiens
tttttagaaaaatgatcattctttagccagtctacctaccactgaagtagttccatctccaacttctttgtcttgcagatcagccagctcacaaagaactttagctgcaggatgttctacctccagtaacttcaggatggttgcaccatcgttagtaatggttacatcctaagaaattcgcaggaaaaaatatgaaccacttatagaaatcaacacagccccattataatacacgttcacctttaatatcaccttccagtacgtggattctgataaagtcaaagaaagaacatagcaaaacactgaagatagttttactttaaggaaactaacacaacagttatgtgtacttacaccaatatcatccaccaacattttatccaagccaactggaccaagagaactttttacaatattggcaatcgaagctgcagccataactgtagacaatcaattaaaaataaaaaagaaatgaggataagccacaactctgaaagacagtaatttcagcctaaaggtaaatgacatccaacagcccccgtatttcccaaatctacaaatctgtgttaattatttaaaaaccacctactaagagtgtaaatggggccagacactgtggctcacaggtgtaatcccaacactgcgaggccgaggcaggaggatcgcttgatgccaggagtttgagacccctttgggcaacatagcgaaacccatttctacaaaaaataaaaacaaagccggatgcggcggcgcggacctgtgcttggagaatgcagtgagctatgatggcactctcgtctgggcgacaggtgggaccctgtccctaaacaaagcgagcctatttggcacagctttgatgcggggtggaatctgatggcggggaaaaaaaaaaaaagtaataaccaccaatttcatgctctgccacttcgtacagctataccagccttttccttcagattctgcaagttttttgctcattaaaactctctttatctgtgaggagagaaatcggtagtcaacggggaaggtggtgactttcagatttgtttacgaaaaaaattaggaatctatcaagaaacagtaagctctgtaggtatccaaaggcctgacagcaaacgctctgctaagttagcgctgccgtctcctggggtcaatgcactcgagtggcgtttcctgggctaactctactgtaagaagctgtcaacccggatacggctggacgccggacgcccgacctcgactgcagctgcgggcggacagggcaccgggctcatccgagggcgcgcggatggacctactctttttctggtaaatggtcctaaaataaaacctggcgtttaacatggacactcagggggtcgccctgaaacaaaagggggtgcgaggcgtggcccgcacgtgcgagcccgggaggcccgctttcccgcggagggcgcgtttccaacgccgccccggacaccacatccacgcgttgccggtctcaaaaccctgccgcgcgcggcggggctcctcctcgctgtgggaaaagtggggccacagcgccctgccccagagaacggcgggtgggctgggtccggctgcggggccccgaggccctttctgcggaggtaaaggagagaaacgagggcagccggggtccggtcgcggtgggactcggccctccccggccgcaaacccgacccaggcccggcccgcccttaccgttttgggagcggatcgtttccccagtgctgcggtcaccgaacacggacaaaggcccctccatcttgacggcagcgatacacgtcgaattctgcttacaccgcgggcaaccagtatcgcggcccctcggccgaccggcgaccacagcagtggctgcgacggcgtggagcgtacccgagcgatgtcccaggagctactgggtaacacaccaccccacccgcttcccggctgccccggcccggccgcggggcacggcgggaaggaaaaagaggcagggacaacagggagagaaacaggactgtgacggaagtgaggctccggggaaggggcggggtcggcatttttgtccaattagatagccgatgggaagggcgcgaaagcggagaacggaagtcggatgttggaccgctgggaagaggttgaaccttcgcctcaaacgatgttgcgcagacgcagtgggccattctagtgccttctagaaaaggttgtaagaagggtggagcttggagctggggtgtaactggaggggcgggcccttctccaagttagagttggggttctgagcgagtcgtgcgttttaggtttagtgtcttttccttgtccctgctcggggagcgtgaggcagatcggccggctttgctccaggcctcaggagtgtaagtttaagggcgcgaacctgggtgggacggggcagtttttccagcgggccatacgggaaaatttttggttcgaggaagacaaccaccctttttaaggagaaaactgcatcttgccctgccttattcctacgcggtgcccaggtggggtgtgtgtggaccagtcgatgaccgcccaagctctccgagtagaaaacccaaacatggttttgtggggtgtgtgcctttgaccccggacttaagcaacaagcgtggtcttgggcgtagctacgaggtggttggtgggctccagggcctgcgtgcccctcgacgtgagcgatgattggcgatgaaggataacagatcgccttctcggccactcagtggcaggggacttgctacttccgggtcggtggcgtctggcgtggagagtttggggatctacagcagccaaaggcttgtccctgactttatatggctgctcctggcgagcgactgagtcgtccgtgaggaaaaagaggcgaggcttttccgagatcgtctcagcgatggcgcttcggtcgcggttttgggggttgttctcggtttgcaggaaccctggtaattagtcttgccccccttctcccagctcactcgcctgggcttgcacagtacattggaacgtgcgggttctattttgtattcgacgtgccggatcgaaatagagctcgcggcactgcgaagaccacagtaggaagttaaggacggggtcagtgctgactccaccctgtgggcatacgtatttttcgtcccctcgggcctaaagattgggggtgtaaaagcggatagacgttagagcgggttcgtgcgctgtccatatccgtcatttttaagccctgtgcggtttttcccgttgcccagggtgcaggttcgcagccctgtcaaccagctccgagccggcagcgaaacctgaagtggaccctgtggaaaatgaagctgtcgccccagaattcaccaaccggaacccccggaacctggagcttttatctgtagccaggaaagagcggggctggcggacggtgtttccctcccgtgagttctggcacaggtaattaaatctgcttgtgattgacaagggcagtgcaccctacagactattttcattcattcaactccaggcactctcccaggtagctgccatgcggcgggtagaggcagggttcgcggaggggctggaacaaacaacaaataggtgtgatgggggctatttaaagaggatgttacagtagcggacaggatacctgcctgtctgaggtgacatttaagaaggtgagatctgaaagaggaagaagcctagtcatctgccagaaagagcagtcctagcaaaggaaactgctggggtgaggaactgaagggcttgtggatctgaagctcaatgggcagaggatgaatggcccaagatgaacatggaggggtaaggaggcgacagatgattagctttgtaagtcaagatgagcactttagactttcttttcattatagtgggaaactacgagaggatttaaagcttgagcccgaattggtttttcaagatcattctggctgggcgcattgtctcatgcctgtaatcccagcactttagggagccagccgaagaagccggatcatctgaggtcaggagtttga

SEQ ID NO: 585911 - DNA, 4001 bp, Homo sapiens
accttctgattttcgttaatgaagtttttaaagtctggtgccttctcctggattagaggagaaaagctggaatgttaatattttctttaactccccatcctggctcccatccaccaagagagaaggttgcagaggggaaaagaaccacgtgcccctctgagaggaagttcagcatcagcgtcccagggtggcgcattcctacaggggtctggcgagggaaagtccaatgacagaccacagggacaggaatcagggtcccacctggtgggactaactctgtccccacagaggtcagctcaccggcatctccccggcattgctgtcctccctggggacctcggctgctgcaggtgtcttctccatggcagccccagctcccgggcacgggtcttctgggtgggtgccctccttgggctacccggcctcgagctgaccctccagcatcctggttgggaagggaagagctatggcaatgcctgaatgcagccccctaccccgtcagtgtgggctgaaggccccagcctcaacctaagggcgagcaggaaccacagcctctcttctcccccggggtcctgtacacattcccaagcccgaagctgaccaggtgaaaggacaccacagagggagggactgagaggtccacgcctggctctccaccatcctccatggaaaaaacttcagttcctagaagatcagcctgacaccttacacactgtcaccatccacagacggagggactgagcggtccacaccttgctctcaccatcctccatggaaaacacttcagtttctagaagaagatcagcctgacacctaacacattctcaccatccacagatggagggactgagtggtccatacctggctctgcaccatcctccatggaaaacacttcagctcctagaagatcagcctgacacctaacacactgtcaccatccacagacggagggactgagcggtccacacctggctgtccatcatcctccgtggaaaatgctttagatcctagaagatcagcctgacaccgaatgcactctggtcatccagagaagggtgtgagcggggtgtgagccggtgtgagtgggatgtgagtggggtgtgagcgggtgtgaggggaatgtgaatgggtgtgagcagatgtgagcaggatggtctcggggtgtgagtgggatgtgtgtggatggtcgcttgcggccctgagggaactcttagccctttaatcagcaccactggatcaacacccacttggaggtgcacaggcagaccccatactgtgttgagtctgagtcttgaaccatcgggatgacatttgtgaattcatggtgaagacgtggaaaggaaacacctttttataggtacagcatttatgccagttctaggaagctcacagcaatcagaaaactaaaacaaaagagaaaacgcaaagcttcctgcaagcctgcagggtcctctctgaaagccgctcccaaccctgcctcaccctctcggttttaggaagcgaatggcccccaacgaaaccccagctgtttattcataaacttctcactgtatacaaacctgagaatgaacagtttaaccacagtgattggagaaatgctgtttaaaagagagtctcctgatgaaggcaaatcgaaggtcaagagcaagacctaccagtaaccggatccctggctgttccttccccgcggggattgggacagtttctgtggaagtgggcaagggtccgcggtcctcacagccctgagaaagcttcttctttcccgctcctccgaggggataccccagtgtcctcggccccaaacttgtgaccccctcagtctggggaagaccccttccctcagccccactaacagacctcatcacctcacctggtccccgccagtcacttctgctgggaccagagcatctgggccgtgtccccacagctgtccccaagtcctcccgcctcatctccagagaccagagagcagccgacggttccaacggactttctgtcttaaaggggcatgagcgtcccactcagcatcaccactggaccagctcagataataattaaacatcccaaacccgcaattctaacataggagctcattgtcagtggagtccatccatccacaaaggacactggagagagtcaaactgctcctccccattgacaaaaaccatgtgtttaatatcaagtcttcaatacccaacgtgtagtaagagctcatttctctgagcatacattcttgaagaaatataaactctctttggatgtcaaattacttactagaaaaaacatttttatgaagggaaaataatatatgtgagtttaaataggagacaggattcaaattttcatcatttcacagaatgcatctccatctgaattgtcgtgtgatttttgtgatagagaagagaatgaggcgcaagcgagagtccatgttcctgttaagccctggccatccttctcatccacggtgctgcctgtggagagcacacctggggctcccctgaggctgcttgtgctgtgtgtcactcggatagttcctcaagcgactcgcttgcaataggcagtaaacaccgacgtcgtgaatgaacgaagaaactaccacaaagaggaaacgaagcacttttgtccctgcgcgtcattctaaccatggattgtgggtcctgaggtgtgtgaggggctgtggtgtgtgtgtcctgagatgtgtgagaggctgtatatgtgtcctgaggtgtgtgaggtgttgtgtgtgtgtcctgaggtgtgtgaggggctgtggtgtgtgtgtcctgaggtgtgtgaggtgttgtgagtcctgaggtatgtgaggggttgtgtgtgtgtcctgaggtgagggttgtgtgtattctgaggtgcgtttggggttgtgtgtgtcctgaggtgtgtgaggtgttgtgtgtgtgtcctgaggtgtgtgagaggttgtgtgtgtcctgaggtgtgtgaggtttgtgtgtgtcctgaggtgtgtgagatgttgtgtatgtgtcctgaagtgtgtgagaggttgtgtgtgtcctgaggtgtgtgaggtgttgtgggtgtgtcccgaggtgagggttgtgtgtatcctgaggtgtgtggggtgttgtgtgtgtgtcctgaggtgtgtgaggggttgtgtgtgtgtgttctgaggtgcgtgaggggttgtgtgtgtcctgaggtgtgtgaggtgttgtgcgtgtgtcctgaggtgtgtgagaggtgttgtgtaggttcttgaggtgtgtgagaggttgtgtgtgtgtcgtgaggtgtgtgaggtttgtgtgtgtcctgaggtgtgtgagatgttgtgtgtgtgtcctgaggtatgtgagggttgtgtgtgtgtcctgagttgtgtgaaagttgtgtgtgtcctgaggtgtgtgaggtgttatgtgtgtgccctgaggtgtgtgagggttgtgtgtgtgtcctgaggtgtgtgagggttgtgtgtttcttgaggtatgtgagagttgtgtgtgtcctgaggtgtgtgaggggttatgtgtgtgtcctgaggtgtgtgagagttgtgtgtgtgtcctgaggtatgtgagggttgtgtgtgtgtcctgagttgtgtgaaagttgtgtgtgtcctgaggtgtgtgaggtgttatgtgtgtgccctgagggttgtgtgtgtttcctgaggtgtgtgaggggttatgtgtgtgtcctgaggtgagagttgtgtgtgtgtcctgaggtgtgtgaggtgttgtgtgtgtgtcctgagatatgtgagggttgtgtgtgtgtcctgagttgtgtgaaagttgtgtgtgtcctgaggtgtgtgaggtgttatgtgtgtgccctgaggtgtgtgagggttgtgtgtgtgccctgaggtgtgtgagggttgtgtttgtgtcctgaggtgtgtgaggtgttgtgtgtgtgtcctgaggtgtgtgagaggtgttgtgtaggttcttgaggtgtgtgagaggttgtgtgtgtgtgtcctgaggtgtgtgaggtgttgt

SEQ ID NO: 585912 - DNA, 4001 bp, Homo sapiens
ggcatgtcaacctgattttctttaatgaagtttttaaagtctggtgccttctcctggattagaagagaaaagctggaatgttaatattttctttaactctgtgtcctgcctcccatcaacaaagagagaaggttgcagaggggaaaagagccacgtgcccctctgagaggaagtttagcatcagcgtcccagggtggcgcattcctacaggggtctggcgagggaagtccaatgacaggcctcagggacaggaatcagggtcccgcctggtgggactaactctatccccacagagatcagctcaccggcatctccccggcattgctgtcctccctggggacctcggctgctgcaggtgtcttctccatggcagccccagctcccgggcacgggtcctctgggtgggtgccctccttgggctccctggcctcgagctgaccctccagcatcctggttgggaagggaagagctatggcaatgcctgaatgcagccccctaccccgtcagtgtgggctgaaggccccagcctcaacctaagggcgagcagaaaccacagcctctcttctcccccggggtcctgtacacattcccaagcccgaagctgaccaggtgaaaggacaccacagagggagggactgagaggtccacacctggctctccaccatcctccaagaaaacacttcagctcctagaagatcagcctgacacctaacacactgtcaccatccacagatggagggactgagcggtccacaccaggctctccaccatcctccatggaaaacacttcagttcctagaagatcagcctgacacctaacacactgtcaccatccacagacggagggactgagcggtccacacctggctctccaccatcctccatggaaaacacttcagttcctagaagatcagcctgacacctaacacactgtcaccatccacagacggagggactgagcggtccacacctggctctccatcatcctccgtggaaaatgctttagatcctagaagatcagcctgacaccgaatgcactctggtcatccagagaagggtgtgagcggggtgtgagccggtgtgagtggggtgtgagcaggtgtgaggggaatgtgaatgggtgtgagcagatgtgagcaggatggtctcggggtgtgagtgggatgtgtgtggatggtcgcgtgcggccctgagggaactcttagccctttaatcagcaacactggatcaacacccacttggaggtgcacaggcagaccccacactgtgttgagtcgtgttgagtctgagtcttgaaccatcgggatgacatttgtgaattcatggtgaagacgtggaaaggaaacacctttttataggtacagcatttatgccagttctaggaagctcacagcaatcagaaaactaaaacaaaagagaaaacgcaaagcttcctgcaagcctgcagggtcctctctgaaagccgctcccaaccctgcctcaccctctcggttttaggaagcgaatggcccccaacgaaaccccagctgtttattcataaacttctcactgtatacaaacctgagaatgaacagtttaaccacagtgattggagaaatgctgtttaaaagagagtctcctgatgaaggcaaatcgaaggtcaagagcaagacctaccagtaaccggatccctggctgttccttccccgcggggattgggacagtttctgtggaagtgggcaagggtccgcggtcctcacagccctgagaaagcttcttctttcccgctcctccgaggggataccccagtgtcctcggccccaaacttgtgaccccctcagtctggggaagaccccttccctcagccccactaccagacctcatcacctcacctggtccccgccagtcacttctgctgggaccagaacatctgggccgtgtccccacagctgtccccaagtcctcccgcctcatctccagagaccagagagcagccgacggttccaacggactttctgtcttaaaggggcatgagcgtcccactcagcatcaccactggaccagctcagataataattaaacatcccaaacccgcaattctaacataggagctcattgtcagtggagtccatccatccacaaaggacactggagagagtcaaactgctcctccccattgacaaaaaccatgtgtttaatatcaagtcttcaatacccaacgtgtagtaagagctcatttctctgagcatacattcttgaagaaatataaactctctttggatgtcaaattatttactagaaaaaacatttttatgaagggaaaataatatatgtgagtttaaataggagacaggattcaaattttcatcatttcacagaatgcatctccatctgaattgtcgtgtgatttttgtgatagagaagagaatgaggcacaagcgagggtccatgttcctgttaagccctggccatccttctcatccacggtgctgcctgtggagagcacacctggggctcccctgaggctgcttgtgctgtgtgtcactcggatagttcctcaagcgactcgcttgcaataggcagtaaacaccgacgtcgtgaatgaacgaagaaactaccacaaagaggaaacgaagcacttttgtccctgcgcgtcattctaaccatggattgtgggtcctgaggtgtgtgaggggctgtggtgtgtgtgtcctgagatgtgtgagaggctgtatatgtgtcctgagatgtgtgaggtgttgtgtgtgtgtcctgaggtgtgtgagggttgtgtgtgtcctgaggtgtgtgaggtgttgtgagtcctgaggtatgtgaggggttgtgtgtgtgtcctgaggtgtgtgagggttgtgtgtattctgaggtgcatgaggggttgtgtgtgtcctgaggtgtgtgagatgttgtgtgtgtgtcctgaggtgtgtgagaggttgtgtgtgtcctgaggtgtgtgaaagttgtgtgtgtcctgaggtgtgtgagggttgtgtgtgtgtgtcctgaggtgtgtgaggtgttaagttgtgtgtgtcctgaggtgtgtgaggtgttaagttgtgtgtgtcctgaggtgtgtgagggttgtgtgtgtgtcctgaggtgtgtgagggttgtgtgtcctgaggtgtgagagggttgtgtgtgtgtcctgaggtgtgtgaggggttatgtgtgtcctgaggtgtgtgagggttgtgtgtgtgtcctgaagtgtgtgaggtgttgtgtgtgtgtcctgaggcgtgtgagggttgtgcgtttcttgaggtatgtgagggttgtgtgtgtcctgaggtgtgtgagggttgtgtgtgtttcctgaggtgtgtgagggttgtgtgtatttcctgaggtgtgtgagggttatgtgtgtatttcctgaggtgtgtgagggttatgtgtgtgtcctgaggtgtgtgagagttgtgtgtgtgtcctgaggtgtgtgagggttgtgtgtgtgtcctgaggtgtgtgaggtgttgtgtgtgtgtcctgaggtgtgtgagggttgtgtttgtttctttgctcctctcaggttccacccggtttttgttcgaggggtgagagtggccggccccctcccctctccatggggcaggcagcttccatccccatcttcatggtgtctccttcctccagagactccgccatccctgggaaaccctgggggtctctctgcccaggcctcacagcaccctgagtttgacccagctggaagttgtgatgtcctcgagtttctggaagcttttctcagtcatctctacaagttggggaatgagggcccagtgtctcatgtccatttccacagagttttatttgttttcccgaggatgtgtgagctcagacctgtccatctcgccatcaaagcaggtccacccacatgttttcatcaccagccatcatcgatgggtttcaggcttcgcagctcccctcctgagcctcagccggggtggctcccagggcaggctccccgcatccctctctgtgctgcg

SEQ ID NO: 585913 - DNA, 4001 bp, Homo sapiens
aaaatccactgagtctctgcttaggtaaacatgaaggtgaactggaccttaagtggacgcttgaggttccctttatttctgcagcctctctgaagtctttagtttcagccaaaatggcaaaacacaatcaaatatgtaaacagactcactgctaattcactaatgctaaatgagagctaagagaaaatcttcagaaggggattgaactacagcagcttattgagggacggagggaaatatacacagaaacactttccaactacaacaaatcaaagttcatagcctgccttgataagacttctgttgctcaaaagttacacagcactaagcaattccaaaacagctctaaaattcaggaatgaggagagctcaaagagaaattagagataaaatttaaccgaaatagattttaaaaatccagatcccaaggacaaagacattttcaagtaatataacaaccaagtcaacctaatacacaaaatttcaaatttttttaaaaaggaatttgattattcattttactgagagttgttttatatatggactcatttaaatagacacctcaaaaacttaaattgtgtgtacaaaaaaacggatttttcatcctacctcaggttcatagctgttggaaatgaccccaatatgccttttggtgccattcagttaaccagcagcgacctcatgtggccacaagaaaaaccaatctaattcagccgcaaagcctcaatctaatttttcgcatttcaatagtcaagaattttatcttgagttgttgcacacggacagctcctcagtttgatgactagttacgttctctggagattaagagaaatacagcatgagtcccagtgagactggacctaccacgaagcgcggagaagaccttgtgccccaacaagaacacaaaagaacacccactacagaaccgagctagagactgggcccaggacactactatttcttgagttagcaaagcgctgagaaaacccaattcccgtctgggatcatttgggttctttaaaatcaatcccagatctatctgccaatcccccctacatattcaaaatacaatacaaaggagggctttgaaccgactcagtctcaaatcttgtcagattcaagtaatcacgcttgggtcacttctttctctagaaccaaaaactctttgaagacctctgccctcgggcctgtaagtaaaggcgggtgggggagaaacggagaaagacaaacgagagagggatagtgaagagagaaaacttgggggatgggggggcctgcggaccccccacactaagcaccccctagggggccacagggactgccgagctggacctacagggaggggggtcctcggagccgctcttgtcttcctgggggggtcctgaggtttcgggcttacaggacctgccctctgagtcgccaggatatttcgggggcacactctccttgacgtctggcattttgctgatggtatctgggtgagggagaaaggcgtgttgttggcgtcggggaaggggcctccccaattgccaagggggtccctgggggcggcgggaaggggggtagcggcctcagggtcttgggggtgctgaggggcagaaaggggcaaaggagcgtggaggagcggaagtcgagagtgggacagaagtggagcgctgggcggcaacgaggaaactaaagccacagaagcccggcgcagggcgggaagcgtgggaaggccccttccttcgcggcgaggtgcccccctcgcccgaaacgccggcccaggcccgcctccggctcccaggccgtcacctcctcctcccccgccgcgggtcatccactggcgtccgctcggtgggcctcgcggcctggcggcctggagcgtaccaccgcggcggagcggcgggttggggcgtcgcacggtgagaaaggccggggcctgagaacaaaccgccgcggtcgccggggcaacgggacggggcacgtgccccccccgccagagccggaagcggcaggctcgtgcgtccctcctgagctcgaagccaaccaggcctcgagcggctcgctgcggccggttcatgccggtcagctcccgcccctcgagaaggatggcctggaactgctgagacgaggccagagcatgcatggggcttttcttcaggctgtttggacagccgagaagccgagccacacccaggagggttgtttcacagcgtgtgccgcaggggcgcaggggccgcgctctttcctcacatgtgggagaagcggaggagccgccagggctggggccaggctctgcccactggggttccgcccgttgtcgccctccgcctcctgggctctagcccttgcctttcttgactctaagtctactctgtcgcccttgcagtgatgtgaagacctggagtgcccctgcctgagaaaatagaaaggaagcgtttcctcttcacctgctcccgtctctctttattactgtgtcatgacttcttaccataaaagtgtacagtaacaaaacaaaacaaaagatgaaagtattatggtaagaatccgggcgcggtggctgacacctgagtccagcagatctcctgtcaggagttcgagtccagcctggccaacatggtgaaaccccgactctactaaaaatacaaaaattagccgggcgtggtggcgggcgcctgcattcccagctattcgggaggctgaggcagagaattgcttgaatccgggaggccgtggttgcagtgagctgagattgcgccactgcactccagcctgggcaacagagcgagactctgtctcaaaaaaacaaaacaaggccaggcgcggtggctcgagcctgtcatcccagggctttgggaagccgaggcgggtggatcacctgaggtcaggagtttgagaccagcctgaccaacatggagaaaccccgtctctactaaaaatacaaaattagctgggcgtggtggctcatgcctgtaatcccagctactcaggaggctgcagcaggagaaccgcttaaacctgggaggcagaggttgcggtgagccgagatcacgccattgcactccggactgggcaacaagagcaaaactccgtctcaaaaaaaaaaaaacaaaaacaacctttgccttgttagtgtggagtgtggatgtttcttgcacaactcttgggtttggagggggaaattataaagacacccaaaagcatttgtgcttaaaaaaagtccattccaccttgaggcccaggcatataccaggggagtggcctagccaagttactgtttatccagagcatctcagactcatccataccaaacctaccccttcctcctcctcgccctctcctgctatttccctcagggatgccaactgtgaagcaggccagccttcaccctaaaaccaccagaagtgggaggaagttgcatgatgacttcagcaaagagttcaatgaaatatgatgcttccttattacatagggagatatttaggctgggttattgatttctctttaaaaatgcaaatcaggaattccatttggcatttttacttctgggaaagtttccagaataacaccagttcgtttcccccacaaaaattgcattgctgtaaaactccctactgatgtctgaaattcctctaacaattctttcatatatgttaaattgtctgtttaaatattctcttaatattcgaattgtctgggagggtcagtgggaagaaatagcagtccaggagcacatggtagtgtgagaggggggtgggggagggtggagagtggggaggggaccgaagccagaacaggaggaaaaggaggtagcagagaaagacaaaattagttttcccagggtcagcccaggtacagcatttcatgatctttatcattaatagtcatcagaaccaaccaagcaaaagttagaggttgaggggagtagaaagatcaagtaagagatatgcacttcttccctttggggtcttagttaataactgatttctctgtaatgatttacagaatgcttttacatc

SEQ ID NO: 585914 - DNA, 4001 bp, Homo sapiens
ggacagcagctggctaagtactcaggagttgtgctgctgcctcaagtcaaatctccacggtgccccccactatctgtgcaaccttgggcaggtccccacttgcctcagtttcttcatctataacgtggggacagtacttaatagtatctatttcataggattactcagaagattaaggagctaatgtgtgtgagacatttcatatagtgctgggcccagagccagcactcaagatgtgtgttagatattgtagtgaagatgctagataccttactacataattttattaaaatctcaaattaattattgaggattattatttaacactattgtccccatttcacaaatgaggaaactgaaacttagaaagcttaagtaacttactaaatgtcactagctagtaagtggagaagctgaggttttagtttgtgtctgtctaatgctcttacttccatgagatgctggggttgcttataaattgctcccaactcagtcattcatagcacttttccagtgggtctcccactttctccagctcatgagctctcttgttcaccaatatggagcccagggttatacccttggtgctgacctaaatagtccaggctccctcttccagttcactgctgggtataggagacttccgcaaggctggaccactgcctgcatcctttggagggtgcaaggagcccaacagagtgctgcagagtggtgctctcctgcccctggcatattccctccacaggaagtctcaggtcttctccatccttcctcaggtccccagctaaatctaaccattctgggtaggagctccttccacctgccctaatgggaacacgaggaagatgctgtaggtttgcattctcaccttcttgtgcatcacagttctggtcctcaactgtcccctcctcccttcctcttagtggagaagtggagacacccggccctctttgggcagacagcgcctctgtgcccgggacacttccccaggagctggctttgcacccactgctctgactgccttctctgccttctcagccgctcccaccccagatcccctcaggagagccctcctctgttctcagggctctgggcttttgtctacagccacctccatatccttcatgcccaccatgtcttactttggggtaagtcactcccaagttgggaattccacttgtggaagggcaaaaaactttctccaactgagcctcggcccgtgtgcttggacttgggctgggtgaaaccgccagttcacttaccacagcccctgggctggcctcctcccaactcctgaccactcaggtctgttgtctcaaaagtgactccagcggctctggagtctcccacccctcctccctaccttcagctcagacaccccagcagagaagctcagctccaaaggccaggagtccctcccccatcctacctggggtgtagaggcgctggcttctccttggtaacccagggaaaccggcagtgcagtgggaggtagggagatgaggaagcttccgcacccgcgggagggattacagccctcgggtgatgggaacggacggcctttcggagaagcctagggccccagggcttgggaccgctctcctccacgccctacggatgccccactttccccctcttcttcccagtccctcccctcgcctcactcggatccccagccccgggccagacggtttgcagacagtgactgtggtggggaggaggcgcggggcgtcctcgcgtggagggcgtggggtctcccgtgggtacggaccggcgcttccccgccacggaaaacgcaacccaggcaatggccgcccgtgggcttcgggccggtgtgggcagaggacgctagaggggctcccgggcccagccggccagagggggccccgataagggagaccggggctgggtgtccccactcccggaggtcgcctcacccgctccgggagccccggcgctcgcctcacgcagagtcccgcgcgccggcgcaggtctttgtcgttggggacgccccgcgttgctaggagcgggccgggccgggaggacgagcgcgccgctgcttcctccgctgccgctgccgctgcgcgccaggcacgcggcttactcgcgcgcagggtggccaggcccggcctcgggacggttccgtggaagcggccgctttgcgggtagtgggactgtggccttgcgctatgccctgtgcttccgtgggacgtgtctaggaacgggtgggctttctgcgggaggcgggggtcgggcagggctgctggtctggagtgcttgtgctctcttggtagcttttgtgtggcaatggatagggagctggtccaggaaaagcgtctgtggaagaagaggagggtggacgcaccttctccaaggcacctgtagaagtcactggaactcccgtgaggcctcctgttgaccttaggccctgcgggagggagggcaccttccacctttcccccagctgaaggtctggtaccagacgcaggaaggttccaggccaacacagcgctccttcacacagtccatgccctgtgccaaactctcttccagccctggcgcgacaagatgtggttggggccccagatctcctggagggcgagagggacagaccagagggacggctagtaaaaaaaaagaaattggccttcaggaagggagaggcagccagggtggcggggctttcaaagggtagctttgacttcagctctgccgaggactactagttggttaccctggatgaacatctcgaagctctgttaactcatcaataaatcaggggtgccaaaactcatcttggcgctcgcggaggagcttgaacctgggcctgtggtgagcactgctaaacaggctactgccccagtggccaggatgctgctttgcaagcagtgaggggccaggcacccgggattgggtcccttcaagccctcagcagtgccttaccagcaaatcatcagtgccttaattagaatgagaaactgcagaaaatgatgccaggcgggcccacgctgctcgaataatttttactagacagaatttggtagccagggagcccttgatttgaagatggatcccctgaggccctttccttcatctagcaacagagatctaggaacaaaggcagaggtccaaagtctggctgtctgaggtggactcattctggtagggaaggagggctttcctccatctctgcttcctcctgctttgaagtgccaattttcagcttcagctcaggcttgaggcaggtgctgtacaacttgttttaataagcatattgtttgtctgaccccgctctccagcctcctcacctgcccctatcccagctcactgctcagtggcactggccacctcacggcctctgcattggctgttccctcaggctggaatgcttttccctgatttccacacgggtcacaccctcacctcccagctccctgctcacatgtcacctcttggtgagggaatatcaccatccacactcctgatccccattctctatttcccccccagacctcatcaccatctgacactttctcccttcttttttttaagacagggtctcactctgttgcctggagtgcagtggtgcaatcatagctcactgcggccttgaattcctgggcaaagtgattttcccacctcagcctcccaagtagctgggaccaaggtgtgggtagtctcagctacctgggaggctgaggcataaagattacttttttttttttttgtagacagggtcttgctgtttgcgcaggctggtcttgcacttctggcctcaagcgattctccaacctcagcctcctaaaatgccaggattataggcatgagccaccaagcctgaccctcttcttttgctttatttcctgtttcctccacatgaagcaggctccatgaaggaaggaactgtcagtttagtgcccgccacgttctcagttgctcaattcatcaacaaaccagcagggcccaatttaaattagaggtcattgttaatgaaagaagta

SEQ ID NO: 585915 - DNA, 4001 bp, Homo sapiens
cagtttacataacagcagagaaggctgatgaaccagattcagaaagacacagggaacactttagcttctcatcttcaatgtgaataaacctcaatcattttctttgcattatttcaaagaattcatctaattagcttagtttgggtctcatccttattaaaaagttaagggaagtagctgacaatctcaccaaagctctatacaattgcagatgagttaattctctaaaagttaactgaggtgctaccactagaaaaaaagaaatggaggcaagacagataaaatcaagagatggtcatattgatgaaacagtatgtcttaaattttcctatgctccaaaatagggaaattaacagctaccttaaattagaaataactaagtgaacagtttcctcaggtacatttagtgagcatttgtagagtcctttctcaatttcttcccaattattgttctattcaaatttctcacctctaaaagaatcaactttaaagatagctataattgatcacatccatatcaaatactaataattactttggtccatgtcccctcactcccagattttaacctatataccaggtgcacctatgtgtctcctcattttgagttcaggctcattgaattttaaagaccacttcagacctcagataggcagtaagtttataaaagccacccttgtctgcctcaatatatagaaatttttctttactgttggtgacctgttactcagactcattgccaagaaatacagcatagtgtttgggagtgtgaagttttaagtccaactgatttaggtttctagccctgctctgctctttttcttagctgtgtaaacttggcctgtttgcttttcctcctttatttagttcgttctttcctctgtaaaatgtagacaccagggaaacaagaacctgaaatttcgccattattttgagaattctctttttaagagtaatcttaaaatgttttagggtcttcaaaaaattgttttgcctgtcatctctatcttcatcctattataggtccacgaagtaagtacgaagagaaaccagtataggccaattggaccgagtactagcatacaggttctggtcccagctctatcattacagctttgtatccttgggcaaactaattttctgttaaagtatcaataaaatatagagtctttaatacattaacggttttcaaagcctaatcatatagaaatacctgttataccaccaataaaactgaataatgaccctttccatcaatatcagtaagttttggacagggtattttcaacttaagtttttttctcctgtacattcttcaaatatccagactgctgatgttttaaaaacccaaaacatggcactattctgcctggtttatcaaattatttttttaatacaacacactcatttttcgctagcaaaactgcttataatggcactaaatacactaacatactgtgttttagtacaaagcaataatactcagagtactctcaggaaatccgcaagctgagtaaatttgaaaagaagatcttgtaaccacccttccaatcgacttatgtagggttctatggccctaattaaaaaacaagaaaactttagcactcaagtccaaaggggactgcccaactcagtctcaggcttcaatttcgcatctggggaaaaaagaaacacaaaagggagatgctgcctccttggctctgggggtggtgacgggagcggggcccactggggagcgatttcacttaaacggtcggacatagccgtctcgggcccctagcagtctccgcactcactgcctccttctcgaacatgctaggcctcctttctttcctaggcgtcaccggagcctgctgaggggtctggttcggggtctggatggggctcgacttcacgcctcggcctcgcttctccatctcgctctgttctccaagacgcccaccgcctccccttcaccgccggcggtcaaacgccctagccagtcccgcgagggcggaagtctcccacctgcgcctcgtacggtaggaagtgcccgccagggctccaaagcgcctggaggaggggcgcgcaggcgcctgcgtcattcacgcgcgccgcagcggggcaccggaagttatggaggtagggcgggtgtagggcccggttcgatcccgagctaggcagggagtcggcgccaggctgggtggtgctcggctacgcggagtgggcgagcgagcacgcgcctgcggtggccggcggtcccgcgctggagggcgctggcgacgtcgcggccctggcctctgtggcggtatcggacgctcggccctgcaagacgcctggcgggccctgccggcctccctgggccaggctcggtttctccgtcgcctcctggccctgagctggaacgcggcggacggtcagggagggctgtgcgcggtggcgcgggggcggaaagccgcaggtcgggctctcacctgaccgtggctcgttcctagaagcgcagtttcctagtcgctgcctgtagggtccacactcggacagtaaatttgtgttcatcgccgggcgtggtggggcctgtggtcccatctactccgtaggctgaggtggaaggatcgctttagcccaggaggtggaggctgcagtgagccgagatcgcgccactgcacccctgtctgggcgacggcgagaccccgtctccaaaatgatgataacgataactaccatttttgagtactatgtgctagatgcttttcatgtgttatctgattactgtagccctaccaggtgcagcctggcaccgttttatttcacttagaactgagattccgataaagtaacttttccaaggcaagaggtagtcagaggctgaggaatgattcaaatttaagtccagctccaaagcaccggcccagtgtagtctgcagagttccagccccatagagccacatggaggatgcgagtgacaatcgccaatcaacaaatagttgatgtagatttctttagtgatgacttaattgttagggcctgctgggattgttcgaaaaccagggctgagagtggaaagtgcaacttctgggtgcaggaggagcaaacagggcaactgatagcagtttccacattaggaagctgcccagagctaattatgactgtcacaacacagcccccccttaactcaacacaccaaaataaagagcttcggttccgctttagatcctgaatttgacttctttgcaggtttatacgatggtcttagtgtcatgtggggtaattgtgaggatttcgattgtatttaattctccatggaaaaccagtacggtttgctactttttacatggcagggaaggctaaactttacctctgcccatcttagttcggagtgacccctttaacaaatgaaaggataacaagaaaaaagtttattcttggacagagtacacatcacaagggataaaccttaatgagaagtaacttgaaatggtggcttagaactacatttgtataccatcttcaacaaagaactgtagatttgcagagaagtgacaggacacaggagagcagttttaggcttcaaagggcaggaaattgggaaggtagatacatattcggaaactaatggagtaagaattgtttgcagattcccctggtaccttaactggtctggtaagtctaaagttatccccagtaaagaatttatatcctgtctttgggcggaagagggggaggatagagagagcttttccttcatttgctgcctcttgtcttcagctcaaatttgttgttgtttttatatcgaagaggcatgttttgggatgacattgtggttttcttcaacaccgtttaggtagtcagaggtacgtggggttctttttccttcttgttcgttatacttggtttctgctctcccattccccatttaaaaaaattgcttattttgataactctgggatagtgaaggaatgctgagagcaataatgctctggtcgtaaaacacattcagcttccgtgaacttgtattttttctt

SEQ ID NO: 585916 - DNA, 4001 bp, Homo sapiens
taagagaatcctaatagccatgacaccattgatcagcttgatccgcatcttttctgagggcctattacaggaaatccacttattttgttactatttattggttacaatatagtctgttgcaaccaacagacattaactcaggttggtttgaccaaaacaggagaatttataaggaaacaaacatgtcacagagcctggtacagaaatacagccatgtttaaggaagggcagttaagggctttctctcaatcctacacttcaacttccctctgcttcattgtctctctgcagacctctgttctcagcttctctgtacacaaaaaaagatatgtatgaatcctcacaggtgctaagttaacatgttacagttccagctccataggaagactcagacttgactctcttggtcctaattctgaaaccaaggagaggatctgactggccagtttgagctaggcaaacacctcctagtccaacttgctctggttagtaaaacgggagccagagacaaatcactgtgggtgagtaaacaattccccaacaagaggcaagacagagaaaggaacctaaagaaaatatcttatcacatctgtaagccagtgtagctgaaaagaccaaagggaaaataaagtctccactatgaacagtcaattttacaggttgtacatatagctgggagaattttatacattcagtaaatatttattgggagcttattatgtgtcaaatgttgtgtcagactttgggaaattaacaatgtacaaaacagatactccttactagatgtgcagtctagtaggagacataaaataatgaacagcaattataatacggactaaggtattgtaacaggggtcatgcaggatgctataagagtacctaaaaggggactcttacccagacttaggacatcaggaaaagcttcctagagataaatcatgtctcagcttggggctttaagacaaatattagcaaggaagggaaaagaaaaaaattccaggcacaggtaataaagatctttacgaagtttcaaagacaggagaaaatgacccgttggaaaaaagtaaaagtttgataggcctggaacctggaaaggcaggttctaagttatggagccaaatagtagagggccttgtaaggcagctacactttttaagtgcaggaactggagaggggcactgaaataacaggagtaggtgtgcattaaaaaaaaataacaacaacaacaaacctgttattctggccggtcagcctagggcctagaataaataaacaatacaggaagcaaggagacttccaagttgccatttttcgatagaaggtttagccttcgttcatttgtttcaaacctctcgcttacttatttcctttcatttgagttaaacattacatttccatcttttcctccctggaccccaaatcacgttcgaagcgacagtctggtgcagtgttagatccgctgctggggcgcaactccgcgcagcagcagcaacgcaagccctgctcctctggctacgcagcttggagatctgcctcagcatcgtccgcccagctccacggcaggtcccaggacgcgcagggctacctggtatcaaactgcctccgtgcggactggctcccgctcccctcatcacttactaggtcttgggctcagagatggtttcaggtcggcgttccaaggcgctctcctccaccggaggctcgaagtaggagttcagagccctctgaaaaacaaaggcacaagggatgaggtttgtgcgctccaccgacctaggtaatggagccggaagcgaggacagcgaaagcgtacttccatctcccagtcgttctcggccaggaagcactgagccactgcggcatcgcagcttgcgaccgaggcaaactccacacacagaagtcgccgctttttcacctcaggctcgccctcttcctccgccgcctccctcccgccctccaggcaactccccaactccatcttcctgccgcctctgcaccgcccctttaagcggaacaggaggccaacgcgcggctctgcgcaggcgcctgtgtcatggcgctcccgcatcaaccgcccggcggggaaatgcgctgctctcggaaaactggtgcagctgcgccgcaagggagccgccggggcggtgggtgcgaagcgcgcatgcgcgcttcgtcacaagggtgcgaggaaagtcagtgagcaaatcgcggaccaccggggctgccagctcgcctgactcccggcctcttgcgctcctaggggcggagaagggtgcgggctcttcgccctttgtgtcctccttctttcactaacttctggactttccagctcttccgaagttcgttcttgcgcaaagcccaaaggctggaaaaccgtccacgatgaccagcatgactcagtctctgcgggaggtgataaaggccatgaccaaggctcgcaattttgagagagttttgggaaaggtatgggaaaggtaggggagaagccgtggcttctaatgaaggaaaagaaagcaccgtgcttggtgccgttgtgagctttgaataattatctcttgttaggttgtgttctagtacgcctgtaaattcaccttagtaataatgattattactttaatggagcccctaaatatgctgggtcgaacgcgtaagttctctatctaaacatagataagtatggttatgactcgtggagacagttccaaggctgggagggactttggagtttgatccttcaaccaacaaacgtctgcattgctccagagaagagtaagagaaacctctgcatttaaggcacattacagtctaattctctaggctctagaagattagaagataaataattgcaataaggtacaaaagccaagtgcttggtagagtggtgaacgaagggagaagttgttcctctgtagtggtttgggaaatttctcaaaggcacccaactcctgaagaagtaagttagcccttggaggaagactgagtgcttttctgagaccagcactcacaaagcccgaaggtgtttgtttgtttttgtttttttaggatgaggtttcgcccttgttgcctaggctggagtgcaatggcgcgatctcggctcactgcaacctccacctccctggttcaaacaattctcctgcctcactcagcctcccgagtggctgggattacaggcatgcgccaccatgcccagctaatattgtacttttagtagagacagggtttctccatgttggtcaggctgctctcgaactcccgacctcaggtgaaacgcctgcctccgcctcccaaagtgctgggattactggtgtgagccgccacgccagaccttgaaggtgtttgttgttgttgttgttttgagatggagtcttgctctgttgcccatgcgggagtgcagtgacacgatctcggctcactgcaacctccgcctcctgggttcaagtgattctcatgcctcagccttccaagtagctgggatgattacaggcatgcgccaccaagcctggctaattctttatttttattagagacagggtttcatcatgttggtcaggctggtctcaaactgctgacctcaggtgatccacctgccttggcctcccgaagtgctgggattacaggcatgagccaccatgccccgccaaaagcagggatttactgaaaatgaaaggacactcctgtgtttggggtgtggagcagcagctcaggggccctaataccccattgaagtctcctattggccacttggtactcatctcatgtaaatgaagtggtgacccacaattggctgtgaaaagcaaccaatgaaaggctaaagtgaagttacaaagttgcccttatatgcaaacgaagacgtggcgtgcaatcagatggtgaagttacatagttacactcctatgggaagatctgattggttgcagaaagaataattttttttaagggataacttacttcttagcgtaattttgctttttgcaaccaatcagaggtactttcaatttcccatctgc

SEQ ID NO: 585917 - DNA, 4001 bp, Homo sapiens
cgtcataccagtccacattttccgaattgcctcggtcaactaagaatacatccacactcttgtcatccaatttggtgactatggccctataataaccattttctttccacttgacacagcaaaggtcatcaggttcaggtttcaaaactacaccatccagcttactggcagaggaatagaaaccacacattctcctcatcagcttactgaaggtgacattgtgtttcctcaacctaatccaaaactcagaaggatttttaacaaactctacctgcgcatcgtagaaggcattcatctttaacctgatagatcttaaggctgggagtgaaatctcttcatctacttcttcagcaggagactgagactgagatgtttctggttcctcctcctctgttgcctggctctgaaggactcggtcagccaagcaacacgactgtactccaaacacacggttcagattaatcccatcttctccatacaggctgacataatacacatgctcaaaggagcaataaaattcaatctttgcattcactgccttgcctagtatcagtgtcttcaggtcaccgacctgtgaccgagaccagcctctcccaccgtcccagagtccatacaaagcacaagggtaggtcaccaccggcattcgaaaatattcaggcagcaagtaccgaaggctgctgcaactcactaactccttccttccatagtccacatgaagcacctgggcacagcgctggggccgaaaagtctcaagcaacagtgctctgtaccaatgtccatccaggccacaggatgcacacggagagcccggcttatctgggctctcctccctctcctcccaggtggcactggtagagttctcatcccctgtccccgtggaaccccggtatacctgggccatgctctcggagaggcggtggatctcctgcgagacgctgcggagctggcagtgaatgcggtggggatggcacacttgggttatgaccacggcctccgtcacgcccagctgcagctggggatagaagtaatccagaccaggctgcttttgcttgagcgggactcgcgagagaaccgggaccccggagcccacgctagcagtggccgctgtgagatagcgctccagcagcgaacggaagaggctgtcgggcacccgccgagccaggcccagctcccgcatctgttggaacacatcaggcacctccaggaggaccaggcgatggagcagcagcacgtccaggacgcacccgtgcacctccttgccctgaaggttgctaaggaagtccacggcgtcggcgggccagtgctgcggcggctcgcctgagcccgcgccgcagcctgccggcaccaggcccgctagcacgcagcccagcacttccgagggcaaattgaagaactctctgcgcccaggcgccagcgagcctgctccggccgtgatggtgcggccctcgtccagcaggaagacacggctctcctgtgcctgccggctgaccacgcggcagcggtgccacaaaagcccgacctgcaccaggcacagctcgccgggcgaggccgaggcgctgcccagcgcccactggccgcgcgtggccgccgcttcctggatttcccggctcagccgcaggtactcgccccgccgctcgcccaccagcccccacagctgcaccgggatcacatcgggatgcacgtccacgaaggacacccgcagggccagcgaggcccccggcgccggcattccgggcgtcgagcacatcttgacggcgcggcgcggcccccacttccggaaattaagggccgcgcctcagggcctcgaaatcctccgcgccgcctgaaggcgagtcccagccaaactaggttcaaaggacccagtggaggggaagaatgccggcgaggccttttctcggcaactcccccgtcgagggtcctccgggactcccgccacggactggtaagacccggtagcccctccaaccgcccgaggtcgcgcttccgggcacgcatttacctcactcggcgccgccacttccggccgcggagagtgggcggggccagccgaggcctggggttggcctaacgcctaagggcccaaggagcttgttgggacgttcaggagaccccgaggtgggaggttttggacacaacctgcatctcctcagagcgccttcgactctggaggccgccgtgtgacggcctgacacagggctgcggtgaggaccgaccagagagggatttccttttcgtcctcccaactaccagggattgagcactgggggccaggcaaggtactagccagtggcgttcccgacgggaacgagaaacgcaggagccaatggcacgttcctaggcgttaaggccggaactctaggagggccctgggtgctgctgcggggcacgggtgctcctgctggctcagtgtgtccgtggacagccaggtgctcagcctctattctttaaccctgttccatcatctgaattgataagagttgttatgaggttaaaataacgtgtgaaagtatatagcaactggtacatatttcccttcccacacttagctgatacgggttcctttgctcctttgctgtctaactctggcatcccaattttgaaggcattttcatttactcacagagctagcacagaactggattcataaaaggaggccaagaggaatggaatcaacattccttcaagcccctgctgtatatactaaaatcttaacaggataaccctttgaggcctctgttaaatgtccaaacctccatttggaatggaaaagtgcaggcaaactagaagtttccaggatatgtctacattagatttttgttcatttgcaaagttagacacatccgtggaagcttcttatagtctgcctgtacttttcctttcattccacgtttcgaaatgtcattacatacaaatacaacaaggcagtgcttcaaatgaccctggcctaactgtaaatctcagtgtcttcagtctgtccagattagaggcaaccatgtgcttccacatcaccctatgcttactttttcacggcacttttcacattgtgtggcaactgtctgatctctatcatcccaccagccgacaggttccctttggcaagtaccgtttgttggattctcggaatctagcttggagtgaaggcaatgaatatttgctaaatgaatatgaatgaatgaatgaatgaatccaatttctctaaaagccaaagcttttcttttcctgaagaactcatccttgaaaactcaattttcccattttttttctaattgtttcatattcattatggaagaaaaacattttatttaaaaacatctagcaagacctagctcaaacgtcgtttcctcgtgaccctactattcaacctggcagaattggttattcctttttttttttttttttacatacttctatattattatattttgtagctctctgtttgccacagtaggaacatcttaaaagcaggaacacttctcatttatttttatgttctcgatgcctagccagtgctggactgttagcatccagtaaatcttaacaagagtaagcaatctaacactatggcctttacagtggaaagaaggaattcattataaaatggtcttatgatcacttgaaattgttttatcattacatggaataatggagactttaatccatcatctatttcaggttcatgtagtataaccaaactcctttgtagaccacagggttgtagatattatgactttctgtatttcatttgtcctccaacctccttccatggctcatggccttaatcctaggacgtcagggtatatcacgtggccgttatgggctgatctgaatcctttacccccatccacccagattttccaatgtcctaccttttctgtatctggagcaggtagcattagtttgttctgtcatgctctgctgttggacagggactcgggttaattttaaaaatcaggtcattgcactgttaagattaagctcccctcatatatctcccatactat

SEQ ID NO: 585918 - DNA, 4001 bp, Homo sapiens
caagcagggaaactgaggcccaaaggggcctgccaagatggcgcaactggttaaaggtccggaggggaccagatccctatttcttgaccacctctgttgagatatcttctcctttgatattgttgagaatatcaaatcctcccggttttaacattccttcagttggcagaaagtgccagggtctacaaacctttgggtgaggatgggagcagggctcaggacccatgtgatgcttctgtacacttaatgtgctgctctgtcctggcaaccactgaccactctaacaagccattccccagcccagatgcgctcattagcattaatgacgttccctccctgggggggtaggggaaggcccaagagcttgggactcatactggctcctaccctctccctgaggagggggcatccagggcccctgaagttacccttactggacagccttgtcctggaagatctgtgcactctgcccactgggtgagcagggacccagaagaccacagaaccacatcctttagggagtgcccctacgagaggggtcttggtgggaggggggctacaggagtctagaagggagaggacataattcccccaaatctccaacttttgaggaaagcctcccctccttgccccaggtggccccagcactggggtggaacatgtgtacagagaaccaggccacaagagactggatacgcagagccgctatgggcaccagcccctctgagctgtgtccagcccctacccctatgccctgttcttccggacaacaagtccaggcctgacctggttctgcccctacctggaaagagggaagacacagaagaagacagcccctgagaagtccgccccaaggcctccttccccctcgcactgaaagaatctctcagccctggatcagggcccctcaccaggaaagttgacagagcggggtctcaatgacactgccccagggcccagctgggctggaaaacagatccagaccagcgctcccagccctccctcccctagcaggaataaagggcatgacagacaatggtggggaccggggtaggaagcgggagaccagccaccctcaaaccttgtcaagtctaaacaagggccctgagcaagtgtggggaagaaaaggccccaaatccagacccctccgagccaagctcacagcgctcagggctggaactctgaatcagcaccccgacgcaggcggcagaactgaagggaacgtgagcccctccctgcctctcaggggacacacggccggggcgcgcggctttggtcccagacaccctccacaacccagcgcagccgcggcaccgcgcgcagaaaccggcctgggcgctgggaggccgggcccgaggcctgcgtggagctgaggccgggcgggctccgggagcgcgcgggccgggagtccaaagggcggcggggcccgggactgggcgccccggatatgagctccagggtggcaggcaggccctccacactgtgcggcccccggatccccgccccgaccccccaagcacggacggcgggacaggcgacggcacaggggacacggtctccccggcttccccaccttcccggaccaactcgtccccgtcgcgggggggtggggagggcggggggcggggcttcccggagagattttcccccttccctctaaacttcccggcaccccgatccggggctccagctccggctggacaatagctcggggacccagtccccctcgagtgtcgcccccccagccagcccagccgaccaaccaaaccacctctcccgagcggggcctcctcccggcgtccgcccggcttacctggtccgagctcgcgggggcgctccggccgggccgctccgccgggcccgagggagccgcaaggggggccggggaaggggggtcgtggggagggggctggccggaatgtgcggaatgagccgggctggagcgggaggcgccgagcgcggaggagggagcgagcgggacggaaagtttgtgttgaggagccggggcgggggtgggggctgcgggaaggagggggcggggcgcgcagggggcggtgctggccgggaggggcggggccgtccagccgcgctcgggccgcctaccccgcggcctcgcgacccggccaccccggctggcgcgcgcctgggcgccccgctcctcgcccgcccgtgcggagctgccttcctccccctgcgctccgggcctcgccccgctcccgggcacccgccggaatttggggctccggcctggggcggggccgagggcggagccctcgcctcgcgggcagggctcccgtcggtgccgggggccgtgggtgccgcgtcacgaggagcccggcagagccggagcgcacgggccccggggctcccggcccctccaccctagtcccgagccgccaaggcggagcgtaccctccagctcgcgggcctgccccccactcccggggccccagacccggctccgccctggcggctgcgcccgccctgccgggacccggtttgtctggttctccccgcgtggctagtttctcgaatttcttctccctttctccctcttccccgacctccgggaccctccctttcgccccggctccccgggcccccacggggggcgtctcgacgctgtgcggccgccgagtttcggtaggacccgcgacgggcgcggggaggggacgcgggagcgcccggggcctgggcaggagtgggacgggggttgagacttccagctcgcgcctcggacgcctcctgccgcctcgttctccgcacgcgctgaggaaccaccgctccgcttggccaaggacgcggctttattggggatgtgggtgcctggccctcgtcccccatcacctaccccctcctcctagcccgccccagctcctcggagccctagcgcggtcccggggagaggggaggttaaaacaacaatgactactgctcccggacaggaagtgactggggcgcggggaggaggggggcacagcggcgcaggcgagctccgagaccagatgtgcggctccaactccagatgttcttcatctccgtcctacccgccgtccgggctcctcctgcctcggcctgtgccaggctggggagaggacggaggtcaccgagaggcagtgagaggtcagccccgacacaggagcagttttccgcgggagctttgctggagggaccctgccagcctccactgaatcctttcccccacgctgacgggctctgggggcgctgaggggctgctggggtcactcgcaggccagcttcccgtcgaaactggagagggcgatggcgaaggcctgcagggcgcacagcgggtaccggtagtctagggtgaaggcgtcctccgccacgcggccgaactgcagcacgatatagtcggctatggacacaagacggggtgggggcggcccgagacctccttggacccccatcctggcagacagtgccctcaaccttgggggcagtctgtcccttgccttggggctccaaccctcagccaccatctcagttactcaacacccatcccttcttctatctcactccacaccagcaccacgtggctttgcagtcacactataatctcctgggggcagggaccttgcctttctgctgctgccacaggccatgcctagagcccgcacctgattaactataggaccctgtcaaatttatccaagcccagcattcttccttcccaaattctctgttgtttctggccacagtctttcctcctatccccagccacgaagtcccaccttagaccccagctccaccccttgactagcccctggttcccttcctcagcctcactgggcacctctcccttcaatgatccaggttcccagccccaacctcagcacctcccccaggatccatagggacaggaagttgctaaaaatacccccaaactcaggtggacgaggctccaccagaaacgtgatctggagagcagtcccacagccacaggacaggtggcactgggggcacatccctaggatgcagtt

SEQ ID NO: 585919 - DNA, 4001 bp, Homo sapiens
aggcgtcgagctacaactatccacacaaaatccacttgacaagtctgcgtgggaaatcgcccgttcccgttggctggccgccgggaaaaaatcagctctaagttcttttcaggaaataccctcaagtgaaacagaccgaacaacgcagagaaactgtatatggagggggcacaagagactatttaggggtttctttcaaagagaggaaaagatagaaaagggtctcctggaacacagcccattaaactgcagcgtgaaatctctcttaagcaaaattaaaattcctcctaaatactaaacagcagaagcggccttttcttttcccccgatttgaacctgtctgccactgcgttattgtttattctcttccatttatttggagagaaaaaaatcataaacgttcaaagactgttaccgtttcatgactacttaaatagaaacatatttcgcagaggggctgtaacaaaaacacacgtttaaattaccagcttaaagaaggttttaactgcaggatcggggtctgtctttttcgcttcctctgttaggagcctttttctcgacagagtcgatttatggtttggatagggaaagggggacgtcaagtcaaggtttaaaatagaaagattcagccttattgggtttaaaagagagaggtgcaccccggggctgtggccccccccccccgccccttccaccccagccccaaagggcagaagaaacgcctgactttaggtttctctattgcaattcccttgcaaaacaagcgaagagagttgattccagagaccgcgaaccctcggcggttcggccgcaggtcccgagggtagggggcacaccgcgctgcacttttcctgcagacagtttaagcatcaaatgttgagaacatctcggggacaagtgaagactcaaggaaatcaagatgaacgtggggagaaacacgccttgggaagccgcggcgaggtaggtctgcgtgctcggagaggtcgagcgggggctggggtagggggtaatgcactcgatttagggatggaaaagagcgagagaaaggcggaaggtggggtgggggatgcaaatggagagggtgtcctgaaggaaagctgggcgtgaaacccgaggtttcgggcagctccacggcaccaggtttccagaatccaattcctaaagaaacagcaacgggggtggggatgggactcaccatggctgaaaaactgtgaactaacatctgcgaagagtctggggtaacgagtcagggtggaaaaaaacaagcaagcctggagcgcccggctgccccgccgcccgagcgcgccccacacaaaaggcgccgagagccccgcgccacccaggactccagtcacggcgccgacgctccccggagcgcgggagcccggctcggatccatccgaacttgaaccaccgattcgcgcggcgccttcagctggtcgaacccacggtctctatcctgccgcgactggttatgattcaaagttctttaaaaatgaaaaaccccaaaaaaggaaaaaggaaaaagtatgtgtgagtgtgtgggtgcgtgcgtgttccttaatccgtgtctccccctcttttcttagcggcggcttcgcttgagcttctaataaccgcgctgggcagcgttcctggagcctcctaatagcagatattcatgactattaatattacacgaatacttaataagggaagaatgcctggaaatcgagcgtgaagcggagaggcaactcgcgccggagccggctctcaatgcagtccattgacgggagtctcagtgtagcaaatcggagtggggagagggagcgcgagagacaaaaagcgagcgagagagggagcgggcgagcgcgcggggggccgcggcgcggcgtctggcgaatcacagggaaggggcaacattttaaaaggttgcagggcatgcaaaagtgaaagagaaagaggcagagagggagaccgaaggagagagcgcagagagggagaatgtgtctgcgtgcgtgtgtgagaaagaaagtgtgggcgagggagaggagccccgggtggggagaggggagggagggaaggagggagagcccgagaggaggaagggagggaaagagggagggaggaagggagggagggagggggagggggcccagccggagcgcacggagggggaggccgcgggggagggggaaggggagaggaagcgagcgaggacaatcagacctaaaaggctggggcagacctcgggatgcagcgggggtcgtgcgtagcgggtaggagctgcttgggaccgcgtccgggcgctcgtggggctctcggcgcggcaggcgcttcccggccctgtctggccgcgggctccgccgcttcgcagccgagtctgggactcgggactcggctgcccgctgctgcgcggctcctccatgacccggcgccctgcccgggaccggcccgctcgctgcactggtcctctcctcggcctcctcttgagctttcctcggacaggggcaccgtgcgctccccggccaccgtcgctctgccctcggctctctggggccggggattccggatcgggagccgggatgcgggccggggcgcgcacagacgctaggcggcccagcccgggcgccgctggcaccggctcgcggctcccggcaaaaacccgtccgactggctgggccactcccgcctgacgcccccccagatgacacgactagctctcccggcgtgctgcctttgccagtctacccgccaggttgtcagaacaagcggcacctcgcctcctgcgtgtccctacagagccccggcacaatcagactgccccaagccagctccgaaacccgaaatccccgctccggcgcttgcccaccacggccaaagttgtggaaacagctttgactttattctcctctctctctcatctttttttgcctcgcttacacacgcattcacacttgcccccacaggatccctctaggggtgcaagttcatcccccacctagccacccaccccatccagtcggcacctagagccgcacggaggttcggaccccgcccgccgagggcgcccacacctggagctgggtttcggcctctgcgaaagtgaaatgcccaagcctccggccaaagcccagaccagtacagtatgaattgtcctatgagactgaggggttcggcttcattcctacctgcccgcaaagctcgcccccagcctcgaaaacaaagcgactggtctgacgtggggtccctgcgcccctcctctagcgcgacaggacccccccagggaagagccagtacccgtgggatgtcaccccgtccccatctaccggggtggggggcctgaaaggagaacgatttaaaataatcttcagaaagaaaagggaggagggagcgggtgacacatcgttcacataaacccaatttctggtttcgagtgaagtcaagatctccgcccctgcgcctgcacacacacctcctgcctaacattctcagctgcaaatgccaaaaaagaaaaaaaaaaaaaacagcaaaagttgggactgccacctatttatttaggtaatctccagccctacacaccccaacccctctctcggactcattgctcattacagtgttggttgtaaccgttcccagcgcctcctgcgggtggacaggtcgcgctagggtctcccttgctgcctcaagaaggcgagctcaggggactctgcgttttaaaatgggttccaaagcggcgcgctctgtcggcccagcgggcttgcggcaccagaggtggtctgcagccgcgcaaggattcccacggtcgttctgggctggtgcagaagctggtgctcccgcacccagcggccagcaggctcggcgcagcacatctccccaccccacccccacacacccccgtggggtgcgtcgatcctgtagctcagagggagaagctacttagaacttcgtgaagcacagaggatctggagcgagccccgcagctgggatcagtggtcttaagttgaacccgcttacaggaa

SEQ ID NO: 585920 - DNA, 4001 bp, Homo sapiens
tcggagatccaggcctgacgtggggggcataaaaagggcgtcgcggggaagagggagtatttgtgtgagagacagagtcacaaagagaaagagacagtgaggggccagaacgactctcttttctccgattgtcaatgcccagtgggagccgggagcccaacaggcccagcccatcagattcggcccctccgggccccaaatccgctcgccccacccgagatccaggcctccagccacttgcctaactgtgagcccgcaagagccaggcccgcggctccctccttcctcctcctgcggcagtctcgcggctttcaaaccttagtcgaacccacagaaggcccagtcccaggccaaacctactcaacaggcaccttctcacggcctaggaattctgcagcgaaattcactggaatttgaggagaaaacccaaagactgctccgaaaggactcccccagtcttcagcctccaaataagagagttaggaagggcctttagcccacagggtcaggaagggaaaggtgtggattcccgggatttgtctctggtatgggatttgcatccttaaaccacgaggtttgtctaaacttgcggatgaaataccatttagtgaggcttaactagggagaagaatataaaagagctcactcttgataaaagtaataaatccaagggaaaaaagtacagaacgcaaaaggcctttctttctccaactccaggtagcttagtgaagactgcacttctcagaactttacttttaatggcctaaatctgaaacaagagaaagaactcgaccaggagtagcaaggcctcagatttttggggggaagttcagggcattagattcgaattgtcccctgggcttttgggcacacagaatctcaccctcaccaggcctcttggttggggcgaaaacagggcctcgcggttctgatgatgaaatcggcgacaggcagagccttttaccgccaccatcctggccagagccgctctgtttcccgaagggaaagtgtctggaagttggaaggagagagctggacaaatgcttccttggccagggtcggaatccggggctcaggaaggacaggagccaagccttggatgccttgtggtgtccgcggcctagcagggccaagttccacaggcgttggttttggcaaattcaccacccccctgcctcctcacccaccattctcacactccctcatccgtagcccaggcggcaaaaacccatttcaggaagtggagtgagttgctagctaaacttcgggcaaactttgtatctcctacagaaacacgctgcctccgcgacccagccatctggacccctttccattcttcacacatcctagatctcccgaaatctgggggtaccaagagagacaggtgcaccagaacctgtccaacactcaaccctggggtctagggcgaggccgcaggcgcagcaggctgaaaaccttcaccgccgcgcaccacaaccccaggccttctccctccccccttccgaattagtcatcctcccaagtttctacttgaggtgggaggggggtgggggaaacggccacagcacaaaccacaagtgacccaccaggccacctgtggagcgtgcgccggacttccccggcgccgggccccgcgggctgcgcgctttgcgcccagcaccgcagtcgctgcctgcgcccgtttttcctgtcttcgctgtctcctgggagctctcctgggcgctgccaggcgcgcctcacctacgactcccctgccctgggccacggcgcttcctctcctcctccccgctccggccccctcccctactccacccctgcccacctcaaccccagccaaggcaaaccccccgtacctgccagtcccccattttggcaagtatggacatcgcggctctgcgctcctggcgactggtccccgccgggcatgggctggagggctcggtcgggccagctccctggaatcgcttaggcaaatcctccttttttacctgctcaccaacatctcacctggtcataaagagctgggttgctacctgccgacgcatgcgcgctggcccaggaattcactccgccagctgcagtcccagcgccgcacagagctgacctgggaagtgatggatttatagccgcggcaatcttgccatcagctccagcttttcccaacagccccaacccgctttcccggtcagtccctggcccgggaaccgaagctgactgactgctggatgtgctgggtgcgatgcgagtgtgagtgtgttttcgcactccagtggtggggcatcgacaagctcgacccatggctagcctcccctcggaactttcgaactgggggagtctccactcccgggtgggggtcgggggttggggaagggctagactgctagaagcgtccagaccccatgatccccgcgcacctggacacagtggggacaggtcgccgtccccgcctccccacccgcccacgaggtgcagggcacggctggccttagcggatctgactctgccaaccccggggccacttcagcgttagattccacatgaaactgttgctcaataggtgaagacgttcatgattctgtgtcacttctggcttctaggtttagtctcctcccatcgtagagagaaagagagaaactctacacatacatacacacactcacacacactctctcttacacactcagacttagcacttctgtacaaaggtccacccccttcttcctactttcacagttcccttcccctctcccactcctctatggcttccagcgctttatcttttccatttagaactttttaaaggaagaatgggggcgttggtggctctgggatgggcaactgaggtttggtttagggtttgctttcccatgacagataaaatcactgaagtgatttcaccgctgcttctaattagaggggagctttaaaagaagccacgggatttggggctcccggagccgcacctggccaggagggaggtgagggtgaggagattggcctcgggccacactctcccagagacggtgccagtcccattccgcggctatgagatcgaattgtcctgggtctaggcctgggacgcctgggccaggcccagttaccctcccgggctgctgtcgccgggacttggagacgaacaaagaaccagttttaaatcgtcttctctgacatgtcaggcaaatatgtgtaaaaggtcagctccacgctgtggagcagagacctgtcccccaggcaccaaaacctcccctttctaaccgtgcccgagagcctccgacccctgggccctgtccaggcggctttgcacctctcggccttcccaggggtggggtggaggtgcctctccctggagtccccttatcggttccgcattttattcatccctgggctacaggactttcatcccaatgcccatcctttagttgatttaaaactttctgggacctgccttagaatcttggtcaaggctgggggtttctgtgggtagtttttttggtttgttttgttttgctgagaatttaaataaattagatgaagtttttaactcctaagtgcatcttccctggctttttccagacggtggaaatagggcggtgactaacttttcagagtggaagacacgcacgaagggcgcacctgcagctctccgggattcaggcgggggtcgctgtgctctcttaaaagtgagcggcggtttcagcctgccaccgcttcgcctcgccagctcggaggaaactctggctggaggcgacctcgggcccagccggacgggccgggccgagcctaggaggggctggcagacgtgtcccagggccagggtggggcgtagggagcgccgtctccaccctcagtacttttggggtgggggacctgagcgtgcggagagcgggaggcagagctgagagcggggttaagcgcgaagctaaggcgccgcatagggttgggtgggaatggacagggtgagctggaagcgaagcaccccagccaggccttaggagagagga

SEQ ID NO: 585921 - DNA, 4001 bp, Homo sapiens
tgtggaaacagctttgactttattctcctctctctctcatctttttttgcctcgcttacacacgcattcacacttgcccccacaggatccctctaggggtgcaagttcatcccccacctagccacccaccccatccagtcggcacctagagccgcacggaggttcggaccccgcccgccgagggcgcccacacctggagctgggtttcggcctctgcgaaagtgaaatgcccaagcctccggccaaagcccagaccagtacagtatgaattgtcctatgagactgaggggttcggcttcattcctacctgcccgcaaagctcgcccccagcctcgaaaacaaagcgactggtctgacgtggggtccctgcgcccctcctctagcgcgacaggacccccccagggaagagccagtacccgtgggatgtcaccccgtccccatctaccggggtggggggcctgaaaggagaacgatttaaaataatcttcagaaagaaaagggaggagggagcgggtgacacatcgttcacataaacccaatttctggtttcgagtgaagtcaagatctccgcccctgcgcctgcacacacacctcctgcctaacattctcagctgcaaatgccaaaaaagaaaaaaaaaaaaaacagcaaaagttgggactgccacctatttatttaggtaatctccagccctacacaccccaacccctctctcggactcattgctcattacagtgttggttgtaaccgttcccagcgcctcctgcgggtggacaggtcgcgctagggtctcccttgctgcctcaagaaggcgagctcaggggactctgcgttttaaaatgggttccaaagcggcgcgctctgtcggcccagcgggcttgcggcaccagaggtggtctgcagccgcgcaaggattcccacggtcgttctgggctggtgcagaagctggtgctcccgcacccagcggccagcaggctcggcgcagcacatctccccaccccacccccacacacccccgtggggtgcgtcgatcctgtagctcagagggagaagctacttagaacttcgtgaagcacagaggatctggagcgagccccgcagctgggatcagtggtcttaagttgaacccgcttacaggaagatgcagcccagctcacagcgaagtgtgggggggccgtctctaaagccgagaagggaaccgctttagaagtgggggtggggggaagaaagaatgaatgaatgaatgaatgaatgaatagaaagaagaaggaatattaaagatcggagaggaagttcaagagagaaaagagttttctctttcctttctgttcctggtgacttgggccctcaatctcgatgaagataacacgaggagtgcacaggcaagtgcccagttgccagcaattgcttcaaaagcccatgttcttcttttcccccattcttaggcacagccaaaattggtcagaaaggggagtaaagtgggacacgagcttcaaagtagggaaaccaaagaagggagcatccacgtcctctctctgcagcttctcccccgcgttcttcgggcgaatccgagggacgggcgctgcgctggggaaagtttgtcccacccgcgtttcgcagctggttgcaaggagaggaggaggagagggagggtcaagctcggagcctgtgaccgcacggatgatcgagccggcgtcgcgcttacctcgcagtcctcgtacttgatattatccgtcaatttccaaagcattttcatggatcggcgtgaacggatatgcccctctcggtctcgcacccaagtggagctactctctgggtgagcgcaaagtgctggctgccggcggtgagcgcaggaggaggaggaggagggagaggaggtggaggaggagaaggaggagggagaggaggagggcaaggaggaggaggaggaagaggagggcgaggaggaggaggagggcgaggagaagggcgaggaggaggagagaagggaaagagctcccgtgtgcgctcggagatctccctctaatggtagaaacttttcccttttccagctctttaccaacagcctaatcgcctcattagcatatcaacaatagtccaattgctcgccagtaccacaatctgccgccggccgctccgacacaggtataaaggcctctctacgccgcgaacttgcttctagagcgcactccagcctgcgaactgataaaaccttcctcgagctccgccgcgaggccctgccccaacaccccctctcttaccccaattccgccacattccccttcctttctttctccgcttccttttctccagagatgccttctgcaaagcccggcactgctcaaggtccaagcgccacgcctggggcccagcttctagcacttctcccttaaccctgctaccacgatccgagctgcccttttggccccgtgcaattttattagaaatcattatccctttcgcaattaaacataaccaccaaaccaagaccggcgaagtcactccaggattttttcccaacaagggatcgcctccgctcgaggcagccaccccctcgggccgcagcgccttgggagttttattggctttgagctttcccccaggttggagattctgccaagcggctccggtggctctgctggggtttgcaatcccttaattgcagcgtgtaaaataaaagttgtaccctgaagaggttacttgacagctccaggggttaaacaatttttctcctgtttgtgtgaagctagggccaactgacagttcaaattggtgttcaggctaaggtttcctgggtgcaacgtggacacgaatacagaactcctatggaactgcacacccgcttctgaagttgagcctaaaaacagacgtgtgtgtgcctgcaagtctagataccgtctcgtgcgtgcatcaaaataaatcaccgggaaccgacttttagctgtgttaatctgctctagttttcccaagattcccctttttaattaaagcagggagagttccttcatgatttggtgatgctactaacgcgggcgtgctcgcgaggcagagcccggctgccgcggaacctggaggcctgggagccacctactcgtccagactggtcagtccgggcttttggactcctcaccggggcctgctgggtcctctggggcttttatccctttcggttttgggatttttttttaagtaagaaaaaaaaaaaagaaaaggacctaatgtgacactaggaaatacagagtaattaattttcctggctgagcttcctcgtttgtcctccaaaagaaagttacctctgtcttttctctctgctatatgtacaaactccttaactacactaggtcccgcctcagagttgctctagtaaggacctttgattcatctgggcttgtttctcgaaaatctccaggcctcccatatttccaccgggcgttcctaaaaggggatgggaactgtggcagattggagcattccctcacaggtggaaggaaggcaggagctgggagaactccccattccacccaaggctgcagaaggggaattctccctccaaacacctcagcaaactccccaaacctagcagagtaggcagaaggctccaaaaagctagggagaagccggagctggcaaggggccttacagacccaggaagccctccccatgctctgggcctcccttgccctacctgaactgagcacaattcctcggctgaaccgggctggaggcttggcgccgccctccgtccagaaaatggtcgactttccagggctagaccctgcagggctgtcccagcctgtcgccagtgcagtggtttgaagtcaggatctgggctgccaggagcaccgacaccctcccagcagcggccatagcctgagcaggccaaaccctaggcctgagagcatgggtttttacactccgtagacgtcgccgcggtgtgcttaagggaactccaagtttcgctttcttgccctctgcgggcttggaaaggccgccctccatcctc

SEQ ID NO: 585922 - DNA, 4001 bp, Homo sapiens
tgctaatgtcatgcccactttgggcgctaatattctttaggacagttctagcgccttggactttaccattatcccgcctgttaaggaaagaaaaggaggccgaaccgaaacaatccccaccaggcgcgtaggcgcggctcttcgttacagtcgatacacaaccacaaagagaaaaggaaaaccccaagcatcattcagcaacaagaccaatctctctcctctctgctctctcgcgctctctcctgcttttctccctctcctctcttatctcctcctcctctctcctacatacctccacacatacacacaccccaacattaggattcgggggggggcaggaggtgtgggcgccaggcgctgcctgtgggcgctcgtccgagcccgagtcccccaggagcttgccggccgcgcctgtgagtcgcccactcttaggatcttcgaggcggctctgcgccgggctttcaggagctgtcccgatccggaggggtcgcgtgtctttctcggctctttggggagcctctgcatccctccacctttcgtctgacctagcggcccgcgcccgccacccgggagtctgcttctcttccttccttttctctccaacttttcctcttagcaatctccatggcccgcttcgcccgcctcgacttccctccttttctaaatccgcttcgcctttccgaagtttttatttccaacctcgacgtctcagcagaaccttcccttcctcccttcccctggcaaccacctggggctgtcccagaccattccgcttaaaagcgaggctccgcgggcttcccggtccccagcctggcccgccgcgcgccccgcgcctcgcccgcctcggccgcctctcccacctcgcccgcctctcccacctcgcccgcctcggccgcctcgtccgcctagtccgcctcgcccgcgagtagcggagccgtctggccgcgtcagccctcgcccgagccggaaaagggctttggcgagcgcggtccgggccccggaggcggctggcgtcctcctggctgggcgcaacttctcctgccccgaagagttgagctagcctcagtgctagagacccgtacgcattgaacgtgggcagaaatttccgtgaaagatgcccacacaggaggcggctgcgatttctgttcggacgcagtgaccctcaaggaagcaaaacacaagaaaacagaaactaataaactgctacgacttctattttgctctatccatccatatctccagccatctacttctttcccgctaattctctgtcctctacttggaaccatttgttatcaatttcagaaattttattgaaaataaaaattaaaagcccgagtctgttacaaatgaggcttgaaaacccaattctcttccacacttaaaacgagaaaagcccctgactttatcagaatctcgattttctctgagagcgtgcccacattcagtagcaccacattccccatcagagcttaaaagggtggggtggggtggggggaggcgaggaaaagggaaagaaaaataaaataaataaaaacattcctaaattaaagttgtcagatttcagccttaaagtcccttttcagagcagcgaagtcttccctagccagcttttctaaaagttaaaaaaagctgagaaaaccgaccggaaatctacgagtaaatagcttaaaaatatatatcatttggggtatcaagaagctcaaattctctatctgcaaagctctaaggtgcatctgggggtgtcgactcacctcatagatatcttcgtacttgacattctccacaagcttccagagcatgatggcagcctggtctctaggaggtgagtgcattcatgtgaggagcagatgtctggcttctcaggactccgctgtctgtaatgatccatctataattggaaatgggggatacacaccaaatccgacgctcctctcccatcgcaacttatatctgttgtctcaaacaataggctggacaagtaagcctcagcaaagagaaaaaacattattgcacacacaggagttagatgcaacccacagacatatatactataaaaatcataaacccgtatttacacccagacacccacatatagttatataagcacctctgggtcacacagtctgcagactccaaatgtgcatttaacaaagagttgttcagggtgattaatataatatatacattttataacttctatatcgaaaatgacacatcattgtagccactaactgaagtctttgcaattcataatgagaaaccaggggccatcagtcccctattttctatgtagattttaaagggggacacttaccaagatttttaaacacaaaagctccctcctattcatgtatgttccggaagagagtattttgaaaggctggatatgggggattttaaggactatctctgtgttgatggctacacaacttttttttttttaactttatctctgtcaccatagaacaaaaaagctagccaccgttgatgaccatttctaatattttctggtcattttacctaaaacctttggaaacttaaatacacctcagtttgtgctgcttgttattttaggtgttgtttgtatgcattttcaacggattccatgcaccattcctcttggctggagtctccattttatcaagtttttttcagatgttggaagcaacgtacgcacacgttcagacaaggttaattttgagccttttttgcagaggccaaggacattttatatttgcatctgttgtgtatgacttgtaagtggttttaatcatggagagtcaagaaagggccacccgaatctttgaaaaggtttaagcagaatgtcttcaaagagatagtgaaaaatattttagtgcatgtggagtttcttcttttttttgtataatttttcttaataagatgattcatatagtttttaaaaaggaaaacatcatcagcaacaagaacaatattaaccagacttagaaaatgggcaccatttaaggcgcagggattctgaattttatcatgaaatgaatactcatctgttcccctgttccccctttcccatcccctctgtttttctactccctttcagggtgcggagagcttctcatagccggaacagacgcccagaagaggatctctgcgcctgggacagaaaagaaatgccaggagggaccgaggagggatggggcaatttggggtggaagttattaagcctggtgagagtgaatctgcaaagggtgattgtctttaaatccaggactgctgtgtgcagctctgcgcgaacagggatggacgctgtttgagtacagggctccggacaaccttgttggacgtcgattcaatcaaaaccaaggagaagcttcatgaactgcagaataaacaattctgcagatttttaatttaatttttaaagataagtcaaaggaaaagaacacaaagaaggtgcttcagaaggaacttcagaaataaaccccttatttccggttgaattttttatgtttcgtctttccttttctcctcttcctcctttttgttttccttttttctttccttcatttcccttttcgttccttcctttctctctccattcctttcttcccctttaaatgttaaccttaaatcatacacaatctatacagatttttcactaggagcatcagcaaagattttcttctttgcttccagagctagttaggagatgagaagggatttttcttaatcttattgtgtggtgggacttgaaacgggttccacaccccctgacttctagaactaaaatcagtgccagatcaataatctgaaagataaatattatagacttggaagttcagattctccaggcacaagacatttaattaatggaaataattgttttctccctttcaaatcaataattctgtcattgttattacctaaagatcattacaacccaaataaaatgcatttggaaaaatctcactttttttctctaaatgcttttaacaccttttaatatctttttggtatat

SEQ ID NO: 585923 - DNA, 4001 bp, Homo sapiens
cattccatactgagagccatggctcatgagggacaggtcatggcggcggtaggcatcgaggcagcccagctcccgcctctgctcgtccaggcaggacgacttgagcgcccgcgcattgtgcaggttaataaagtcggtgggctccccgtggtggatctgctggtagtactgttgcgagtggtggagagagttcagagagtaggcgtcgggggtgacggccgggtggctgtgctgaaactcgtaatggaaggactggtggtggagcggggtgtactggtggttagtggagaagtagggggacgcaaactcggtgccggtggtggagtaagttaaaggagaggaggaggaataggcgacagtggaattggctactgactccagacagccaagctgcatcaaacggtagctgtttgatccgtcgtgacgtatctggaaggaagagggggaaaagggagagcagaaaaacttgaggtttgtcattttgcaaccaaggcgccgctctcccggagccaggagctttctctggcactccaaggaaagcgagcgcgtaggactcgggccgagccgaagccgggtctcagcgtcttcaccagagagcctttgcaaacaggcgaactgggggtgggcggcctcgtcctcacagtcgagagagcggaaaaaaaatcccccaccctatataggtgcgggtgacaccacacacgcacacacacgcacagacacacacacacagacacacacacagcccctgcccaacttgtgcagggagcttggcgttgggatccaggtttgcaactgactccggggccgcgggtagcagaggaacgagtccacccgaaaagagcgctggcccggggcgccttgccactctaactagaccccagcatcgaaattctgcgcctgtctatgccgagatgttcggcccgggctgctcaaaatcattgtccatatattttaaaaaatccagtctgtgcaaatcgttcaacttgctcccttccttagtcattcgagggagggaatccgactccctcttttctgcttccctttccttgaataagcccattccaaaaggggtgcgttttccccatcccccttgtgcatctactgcttccccaccagtcccttttctttgcttttctgagaatctttctttccgtctctatctctttctcttcactccccccttttattattaagattatgttttcccgctcattatggcaaatgtttcttaacgtggcagagagttgccctccctggcgacagatgtcataacgaactttctcccctttccttccttaacttcccccgaaagacagattataattaaacgtaacggtccaatatagattagagacaggggaggctgccaccgccgccgccaccgccgccaccgccgccgccgccacacacacgcgcgctcaaaaaaaaaaaaaaaaaaaagtaataatacctcggcatcgtggactagtcccggaaaggtagttgacatgttgggtttctccgaaagcttacgatgcaatttccccctccaaaaaaagaatcgggaaaaaaaaatccaaacttcttgtattttccaatttttaaaggaaaaaaaaaatgttctataggtagatatctaaattgtaatggttttgcccggatcagatagctccttgcctcgtacccacttaaaaacctgtaggaacaaaattttccctctgcacaaaagcagctccctggaacagattttgtacttgctgagtatttctttggctgatgtcgtaggtcccttggtaatatagaagttttgaaaattaagcatcagcactgagaactgggaggacaataggcagaagagatttatcccaggagacaaggaataaatattgtatcttcgcctaataaggaactggaggttctttcaacatttttatccattttttccaacctttatcatgcttttctataccgactgaggtggggacttatctctgtggagagtatttgcacacattttattgtgaagctagagctctagctccaatatatgtatattagagatagaaatatatattaattaaagcttccttttatatggggaagtgttcattcctattggttccactccctggatgctgaaagctgctttttccaacaaccacccgaatcaattttgcccagattggggtgtctgccttcgcccaagtggaaacaatgctggtctttccatatttacattgaatttgggttctttccccttttttgaaaggcaaaatcaagcggtggcttacacttttcagcagctttaaaaataaataatggtgatggacagtcccaagtttccatcatcaggaaatggtgtaactggcaatgcatttaggaaaaatgcaagggaataaagatgtaagacaagattctacatttaggtaaactgttgtctttcactccccaaaccaaaccatatcccccctcttttgtgtttttcttcttcccttttggaaacactgctggtggtggtggggtgtagaccgttcagcagtagcattaggtttttgaacactattacccccaaaataacccttaaatgcttggaagttatattttataaatagagggcaggaaggaagcagtgcacacatatttccatctcttcagtggatttcttgactttcaaacagtttttgagctttccttccttcaaaattcagcttcctccaccaagttgtttagtgcctggagggggtggtggtagctataaacctgaaatactgaggctttgctcctcagtgtctacattataagaaagaactggctggccccacagactcatctcatagatagaaggggtaattcagtcttaattgccatttcatttggtttgcttttaagtgtttaagctgagaaggtgtcttaataataagcctcaggcaaacaggcatgtggctttttttttttttaggttggggtttgggagggtttattaggatctgctcatgcaggctaactggggctgtcactcagagctctttgctttatacaaatggacaaaggcacacgacaagaattgaaatgcattgtctgaaatggagatacacgattcttcagccccacatggggtcagcagccaacacttgttccctatttcaaggtgtgccagtgctgcccccctcccacccctccttgaaattccatattttggcctaatgaagtaaggagactgagagaccaatgatgacaaaaaggaagaatatccaacttaatctttaagtaaaaggggtaaaatgagtgctgttggctctaggggttgaatcccaaaaatgtttgcagtggagtctttgtttaccaggtctgagtggggcctccatagcttacccacggagaaaataactaatcatctctgggagatggagactgcccccacgaccttaactcaggcacccctgcccctgggaaagtgcagaccattccctggaagaatatgtaggacttgcaggttatcttggggaatgcccaggtgcgcttttcctggtggatgatattggcttcccagttagtcccggtcaaatggaagaggatagcccttctcagacatgttgcaatctcctttccaacacccctactgtcagatacaccttcattgaaggtgacggtaccttctcttcccagtttaggtccaggcagcagacacaaaaccctctccccggggaacaacaatgaggaagctcaggaagatgtggccgcctgctctgcctgctggcccagagtgtttgttccacatgtttgtccctgtctggaataagagccacacatagcccccctcacccctgccaccgcactcagaagatatagctttatgatactctcggtaatgagctctggccttgaactgagtacaccccatggaatgacctccagtagcctggaccctgtgaacatcaggacatcaccaactaactggcaatcatcgcattccaccccctaaccccactttcatggttcactttcctgagtgacttttaggt

SEQ ID NO: 585924 - DNA, 4001 bp, Homo sapiens
gggaacaggaatgatacattatggaataaatttaatactctccttctttaaaatggagagctacaacagtaggcaggtctctgctctcaaacttttcaggcacattgaaatacaaatgaatattaaagaagcgctatcaaatcaatgagcttggatttcaatcttgctctcttctgcctgagcttctaacctcagctaagtaccctcatctccgttaactctggttcccatagaaagagtggataatatctagaatttgaaacttactcctgaagataaaggctcatgagaaaatgtatttgaaggattttaaaaaatacacagacctataacttctgccctgagaatggtgatttatatttagaatgtggctaataacaagcagaaaaggctggtactagctattactagaaccaaagaattttagagtgggcaatcttttaaagtagtaggcccttcttccaattaaaagatgaggaaactactggacatggtggctcacacctgtaatcccaacactttggaaggccgaggcgagtggatcacttgagatcaggagtttgagaccagcctgagcaacatagtgaaaccctgtctttactaaaaacacaaaattagctaggcacggtggctcacgcctgtaatcctagctacctgggaggctgaggcacgagaatcacttgaaccggggaggcggaggttgcagtgagctgagatcatgccattgcactccagcttgggcaacaagagtgaaactccatcttaaaaaaagaaaaaaaaaaaaaagagaaaacttgagttaaattattttatccaaagtcatattggtacaggcagaataaagactacatgtccaagaaataaaacattttatgttttctggagtgtgcttcatttaagtgaaaatgaactttttgggtgtgatttactgctcttttcaacttctgaagtgggactaaatagaatgaaatatgaaaatctcaaaacctaagtactccagccgtgacttagtagacgtatttgtaatatatttttgcaacctcatctcatagaacatcactaagcaatggtgatggtggttaaaccaatatataaatacattcgtcaaaactcatcaaattgagcacttcaaacttattaattttattgcacataaattatatctcataaaaagtaactttaaacaattaggtgtgggaatgtaaacttgctaaaagtaagctcctcgaggaaacaccgccttgttcacgcccatatcctacccccggcactagcacaatgttgcttgtgtaatatgtacttatgaatgaatattagcgcccccgaggcttagactgaacaggtaaacgtttaaaaaacgaatcatacgagggatactcttttcaccaagttattgataaaatcctcgcatcaatttaaattctggtaactttaaactgcatgtaaagcaactgcagtcagcatgtgctgtactatttcagaatgattgatttcacagtgacccagattccaatattcactagcgcctttcacgacccatgaacccttcctcccctagggagcttggcatttatgcagcctgccggcaggctacacccccccgaacgcggagttttgtgagcaatcaacgcacttcacgtgtctcctgggcggtgggaccggagttctgatacaaagaggtcgaaggacctgaccaaaagcccgtcgcacgccagtgcctggacacccgcccgcggggacgtgcaagaccccccggcccacgcccccacggacactggggagacatccggggagcactgctaagccatccacctgtcagcctcaagtccaggaggaaattctgtgatagctgcttcgctgcttgcagtcttaacaacttaatgatttctcgaatcgtgggcaacggagggagacggcaagtgctgagttttccggaggcagccatgatacgcggcaagcaccatccaaccctacctcacccaggaccttcaccgccgctccgaaagaaacgcgcaggggaggaacctgcgagacctaaggcccgcctcggagtcagccccattggtcagacctatcccaccggaagcgatgaccgcggacaggaaattcccggcgtgctgagagcgcatgcgctaagtcctgccgcgagaagggcaggctgggtggtcggcggcttccgcctgtgagagccgggggagagccgggtggactaggcttctcctgggcgggctatggggagagcgcccaggagggcgggacgaggcggggcctggacagggtggggtttttcggaggagttgctctgagaggtgcagccggtttactcccgccctgaagttcccaagggcttccggctctttaacgttctaaatacctgtctgtgaatattagaggaaaagcgggtgcttagaggcaaagctactgtttgttagcaattctttcttactgtgaggcgtttttagaaccgccgctctgcagatgctgcatgatgggtttttaacttcgttcagcctcagttttttcatcagttaaatggagctaatgtctacctcaaaattgtgagcactaaatgagagagatcgcctggtgtgcacgttcagaacatagtgcacgcatggcattgggtaagctcccacgtgatcagtggtggctgttattatttggcagatgaataattggccagtgtaaagaggtcattcgatttgctaggattacagctaagaacagagagaagactgaaatatgagttctgtctttccgttatacgagataaaaacaacgaagcaaaaaaaaaaaaaaattaaagtttctctgataggtgggagaattttgctgttttaaccctgcttatgtttggacattgctgcgttgatcacaaatgaattttaaagtttctgttcctcaattagtaagtttttaaaaaagctaatggaaaacgaaacaactatgggtatggatataaaaatgaggagtactttgaaattccagtggaaaactcaaccaccttctataaaagctgttttaaaaggaactgagataatctcctagctttaaaaaatagtgatgactaccatagaggtaaggagatttgcccaacgtggcatcaaaatgtagactggaagtacaaactcttgattcagatatcttatcgtccaaaacacagtatacctgacaaagcattatttcacagttatattcattatttcccgtactcctcacaatggtcccatgtgaatgagattattattcttagtttgctgtgaagaaataggggaggtgaggtcatttgacaatgcccagagtcagacagcaaagtacagagagaagacaacctgagttgtgttttttctgagttctgatctcactggccacactcaagtatcagcttattatttttaagttaatatgtgttaattttgtaacatctaaatatatagaaatacgaatctaggtgtaaacataagcttacagttttcatatgactatttaaaacaattgcaataaatatatacaaaaccaatacaaatggtcttattaattgacaaggatgaacactgttaaatcacgacacttagtgctaactggcaggttttcttttttttttttttttaagtttcagcctaccagtgatccagtgtgccatgtaatgactgaatgttctcattagttttctggagtcaaactattaccaaatctttgttcaattttttttccattgtcgcttgtctttcttttggaagaatatggaagctacatattaagtctgcctgcatctgttttcagtagcttggaaacaagtgaatttgaattatttggcactaatgctaccatgaacacacacgttgtgtaacaggtataaagaggatgttcagatgaccccaaatataatcacatgagctttttaaaagattaacatcaacataaaaacaaactaaaatctaaatgagtgaaacacctttgcgtggagaatttgtagattcctgataatttgtccccagatc

SEQ ID NO: 585925 - DNA, 4001 bp, Homo sapiens
cccagcggggttcgcgcagacaagccccgccccgggctccctcccttcctcacccggggcgcggggctggggcgcgccaggcggctgcggcgcgaacctgctcgcgcagcccggagcagctcggggcagccgtgcgtgaagccggaaccccgcgcggggagggggccgagctggcatctgcccgctcccttccaggaggcgagcggacgcgctgggccagagctggtcgggacagcccaggggtgggcggcacggactcgggggatcggggggaagggggcgtgttttccgggattcgggaccgagacggggggagggggaaactcggggggcgggcaggcagctgggaacccggggggaggcagacaacggggcgcacggagggagcgctccggggttggtgttccccagggtcatagaataacccacggggagaaagagactgcccagggactcgaggggacggggccaggggcggcttcttcaagagaccgagctggaggaagggacgggaagggagggagagatggtacttccacccgcccccccatcagcccagcccccggggcgtggcgccgctctggccctcccactccccccgctggcctggccagactcagcccccgcacacctcccctacctccgaccccctctcaggcatcgccggccccagccgtgtccggtggagggggagtgggcgcggggcccgcgcgtccctcaaacttcttgcgagttcaccatcacgcctcccgccccttcgactcccagctccgggccgggaaggcccatgcccgcccggcccctcccgcccggttacataaggtcgcggagaagccgcccccggcccgcgcctgaagggaggggccgagggggctcccggctcggcgggcagcgccgctcgggccacgcgctgggcgcccgggggcggacggactgcgggtgggtggcggcgcgcacggtcctgcttccctctcctgccggcatcccccaccctcccacctgtctccgggacccacgggataggggccagggagcctgggtcgggggtcccgggccctcctcgtgcctctcgctccccggtcccgctcacctcgctctgaaggtcaatctgtccgccgcccgcgccccgcggctccggcaacttgtcgcaagttcgggtgcctggcccgcaagctgtgcccgccacctgctcccggcctgctccggccccgtgccaccagggaggcccgccccgtccgcccttcccgccgccgtcggcgccgcggccgctccctgcgtcccgcccgggccgccgcctccgctgtcaccgagccccgcgcccggcgcccgggctccggctgtcactccacgcacacttccctccgcgcccggcagagggcagcacccgccccgcctcccagccgctctgcctcggcgcccactgggaagcgtagttctcgctgcagtcccgctaggcacgccgggatttgtagtcccgctcagcggactaaggcttacagggaaagaggctcttgacttggaacctctgatccacttctacctctttgcaagttttctttctcctctcagtaaagtcccaaaccagggctcactaagatacattctgtagcctgtccgaccccctaaaaggaacctgcagcctgctgtccttcggcagtctaagaaagagagggtcccagatggtgtgctgttgccatagaaactccacctgtggcaaattccagcttctcttcaggagtagggtgcaggacctggatcttgcacttttatccctgccccgatcataaggggcaaggccagggtgagcctggcgaagtacagggtaaaatatgacagtagaaggcagcctgcccccattatgggttctacattcacgccccactcaccagcctgagcttgctgtcatgttgctggacagaaattgtctgagctcctttcatgtcaccttcccttgttggaagttcacagggtgcggaggcatcattctctactttctcctcttccccgcccctttttccctgtctcctcccccagcccctcccctgcttttcttctccttcccctcctccttttcttcctctctctcctccttccccacatacaatgttgctcctggtttctggatcttttgctaagaggctcctgaggaggacagggatgaagtccaaagggacaagatcccttgctgagttggttccagcaaataggctcgatttctctgtgactcaagtaggaacactctcccccggcccgccacccacccacccatgatggcgctaccactgtcttccctttccaggggaaaagtatgaactttaagctctgagggttacagagcccatcccaagccatgccttaggtcccatttctcttagaatcacagtgacccaccaggaaaccttgtagccactcagggaaaactcccttccaaaaacaacaggatgaccaacataaagaagaactatttattattagagaaagtccagagtccagaaaaagaaggctgaatccagagtggaaagacagatacaatgccctaggagggtgcagggtcaagaggaagaggggagcccacgtgtcgaggcagcaagtctaggcggcagtggcaaagcctactctgttgttgcccaagtcgtagacggaatagtaggacctgaggaagacatccccgaggatccacaggggctggccgttctgggaggacaggtaggtgggctcgactcccacggtgcagtagccgttgttctgctcaacaaagaaaggcagcactcattcatttgtccacacatgagctgggccctgctcagctctgagccctgggctgggagcacaagtgcagagctgagggagccagggtctctgccttgagggctcataggccaactgagccaccagagcagagcgggtgggaggatttctggaacaggtacattcaggctgccgtggtcctcagcagggtctcctctccccatgatgggaaacttctcttcccacagacctccctcctgctcccaatttggagcagatcagcctggtggttaaaccttggagccaaaccaacttgaattcaaaccttagctgtgtcgccttgagtcagttactcaacctctctgaacctccaagttttcatttgtaaaacagaaatgagtatctccctcattaaatactgtgacaattaaatgggatcatgaagcaaagtgctttgcacagtggtctgccctagtaagtgctcaacaaagagcccagtgcctctccccactaattaataataattgatcatagatgacaatcttctatttcatagccttgttccagagaagggggtttagaatcaatgagtggggaagataaatgagtacaagcgtggagtcggaaaatggcacaaggcaggagacccagcatttctggctccccagcccttcctcccaaccccaatcatggtggctcagcctgcagggaccaggacttacactgaggatataggaggaaggtggcagagggaactccacaccattgatgatgaaggtcaagctgggcagattctgaatgctgttacagttcacgagaaactgcaagaggaataggtccctggttaactcatcctccccctgatagcacccaccagccccatcatctcagcccctggatcccaggcctgagctccgggcccaagccctaagcctgtttttggactagagaatgcagctccaagggaaagtcctgtgtaggtaatgctggcattatcccatggactcatagaatgggtgtgatttggagtgatcccagagcctcctaactcctcttgcctcgatttcccatattaaagatcgaacctctgctctttctctgcaagtgcctatatacatatatatgcatatatatatgcatatatatatacatatatatgcatatatatatacatatatatatgcatatatatatgcatatatatatgcatatatatatgcatatatatatgtatatatatatgcatatatata

SEQ ID NO: 585926 - DNA, 4001 bp, Homo sapiens
acagctctgcccttcatttacaccctctggctcccagctctccgggccccgcggccaggaggcagacggagagaagggagccaggcgagttgctcgtggtcctggggctggggtcaccggcatggtgaaagcataccgtcaggttagcaggcagggacctcaaggcagctgacccttcccttcctctgcctctgcctctcctggccggccaggaactattgctggctgtccctccccggacagtgagctccctgaggggagggcctgaggactgtctcccagtcgtggcaccaagaactgcgttctaaccgagcgcatccgcatctgtccacccagaaggaaaccagagaccagcctccaacctcatccccagctgcccaacagtgccaggtctgggccaatggaatctcggccagggcgggtgcaggggcctgaggccacaccccagaggtgtcactgggggcctgcatccgtcttgtccctttccctgagggatgaagcagcccctcactcgggatggggggagggcagaggatgggagctgggcagtaattaacctgcacttccccagcgagctctaagccaaaaactgcgctcaagttgagtgcagaagctccgcgctgaaccgtccccagaacagacaggcgagagaacgacggctggagctgaggggggttcgggggaaggcgcagcggccaggggctggcggagagcggagggcgggggcctgggcccagcggggttcgcgcagacaagccccgccccgggctccctcccttcctcacccggggcgcggggctggggcgcgccaggcggctgcggcgcgaacctgctcgcgcagcccggagcagctcggggcagccgtgcgtgaagccggaaccccgcgcggggagggggccgagctggcatctgcccgctcccttccaggaggcgagcggacgcgctgggccagagctggtcgggacagcccaggggtgggcggcacggactcgggggatcggggggaagggggcgtgttttccgggattcgggaccgagacggggggagggggaaactcggggggcgggcaggcagctgggaacccggggggaggcagacaacggggcgcacggagggagcgctccggggttggtgttccccagggtcatagaataacccacggggagaaagagactgcccagggactcgaggggacggggccaggggcggcttcttcaagagaccgagctggaggaagggacgggaagggagggagagatggtacttccacccgcccccccatcagcccagcccccggggcgtggcgccgctctggccctcccactccccccgctggcctggccagactcagcccccgcacacctcccctacctccgaccccctctcaggcatcgccggccccagccgtgtccggtggagggggagtgggcgcggggcccgcgcgtccctcaaacttcttgcgagttcaccatcacgcctcccgccccttcgactcccagctccgggccgggaaggcccatgcccgcccggcccctcccgcccggttacataaggtcgcggagaagccgcccccggcccgcgcctgaagggaggggccgagggggctcccggctcggcgggcagcgccgctcgggccacgcgctgggcgcccgggggcggacggactgcgggtgggtggcggcgcgcacggtcctgcttccctctcctgccggcatcccccaccctcccacctgtctccgggacccacgggataggggccagggagcctgggtcgggggtcccgggccctcctcgtgcctctcgctccccggtcccgctcacctcgctctgaaggtcaatctgtccgccgcccgcgccccgcggctccggcaacttgtcgcaagttcgggtgcctggcccgcaagctgtgcccgccacctgctcccggcctgctccggccccgtgccaccagggaggcccgccccgtccgcccttcccgccgccgtcggcgccgcggccgctccctgcgtcccgcccgggccgccgcctccgctgtcaccgagccccgcgcccggcgcccgggctccggctgtcactccacgcacacttccctccgcgcccggcagagggcagcacccgccccgcctcccagccgctctgcctcggcgcccactgggaagcgtagttctcgctgcagtcccgctaggcacgccgggatttgtagtcccgctcagcggactaaggcttacagggaaagaggctcttgacttggaacctctgatccacttctacctctttgcaagttttctttctcctctcagtaaagtcccaaaccagggctcactaagatacattctgtagcctgtccgaccccctaaaaggaacctgcagcctgctgtccttcggcagtctaagaaagagagggtcccagatggtgtgctgttgccatagaaactccacctgtggcaaattccagcttctcttcaggagtagggtgcaggacctggatcttgcacttttatccctgccccgatcataaggggcaaggccagggtgagcctggcgaagtacagggtaaaatatgacagtagaaggcagcctgcccccattatgggttctacattcacgccccactcaccagcctgagcttgctgtcatgttgctggacagaaattgtctgagctcctttcatgtcaccttcccttgttggaagttcacagggtgcggaggcatcattctctactttctcctcttccccgcccctttttccctgtctcctcccccagcccctcccctgcttttcttctccttcccctcctccttttcttcctctctctcctccttccccacatacaatgttgctcctggtttctggatcttttgctaagaggctcctgaggaggacagggatgaagtccaaagggacaagatcccttgctgagttggttccagcaaataggctcgatttctctgtgactcaagtaggaacactctcccccggcccgccacccacccacccatgatggcgctaccactgtcttccctttccaggggaaaagtatgaactttaagctctgagggttacagagcccatcccaagccatgccttaggtcccatttctcttagaatcacagtgacccaccaggaaaccttgtagccactcagggaaaactcccttccaaaaacaacaggatgaccaacataaagaagaactatttattattagagaaagtccagagtccagaaaaagaaggctgaatccagagtggaaagacagatacaatgccctaggagggtgcagggtcaagaggaagaggggagcccacgtgtcgaggcagcaagtctaggcggcagtggcaaagcctactctgttgttgcccaagtcgtagacggaatagtaggacctgaggaagacatccccgaggatccacaggggctggccgttctgggaggacaggtaggtgggctcgactcccacggtgcagtagccgttgttctgctcaacaaagaaaggcagcactcattcatttgtccacacatgagctgggccctgctcagctctgagccctgggctgggagcacaagtgcagagctgagggagccagggtctctgccttgagggctcataggccaactgagccaccagagcagagcgggtgggaggatttctggaacaggtacattcaggctgccgtggtcctcagcagggtctcctctccccatgatgggaaacttctcttcccacagacctccctcctgctcccaatttggagcagatcagcctggtggttaaaccttggagccaaaccaacttgaattcaaaccttagctgtgtcgccttgagtcagttactcaacctctctgaacctccaagttttcatttgtaaaacagaaatgagtatctccctcattaaatactgtgacaattaaatgggatcatgaagcaaagtgctttgcacagtggtctgccctagtaagtgctcaacaaagagcccagtgcctctccccactaattaataa

SEQ ID NO: 585927 - DNA, 4001 bp, Homo sapiens
cactctaaacacacaataaatgttggcaactattgtataatcaatcttattataatattgttctagtatagcataaaagaagagatgaatattctattaatataatcttgttttattgttacactctcatagacacacatgcacagttcatctctacccacattcctagacactttaaccacacacacaaactcacaaccattacataaaccccacaccaacccagaaagcaacatcatgtactcaccatgtaccaggcactgccgcacccttagtcctcacaacagcctgtgaggtgggtgtgttttcatctccctcctctcagatgaggatccacactgtacatgcatatatgttcactgcgtcctgggacgtgaacatttctggcagctctgggaaccctgaactcccaccctccgatcagaggaggccaacccaatttccatggtcatctccagggcagccccaagccaggccccaagtgctgactgccctccatccccaggacaaaggcccaacctggttttcatgacagctgtggttggggaaacccctgttgcctgcagaaaccgagttgactttgaaaaggaagagacagaacccagggggtggctgggctactccctgtgggggcaggtgctaagtaactctattaactctggctaatgatgcaattacagtcataaacagagccccaggagggctcagggccaagagctagaccctcaaagggcagccagacttgaggggtgggagtccccttccacctacttctcagctttccagaaacaggctgaggaggcctgtgacagcgcacgtgggaccctggaagggctcctgcctgccctggcccactccctgcccacctctgactgtgagtcaccaggccattagcccgtaaaagcccagttggctctccctagattcagtgcccacctagggtgtcccctgccctatcccctgaactccttccagggcacccggaaccaagatacctgggtccccatttggctccgtctcccagagctgagttgaggacaaaataaccctgcagctgtaacaagccttgtaaatggtaagcaccattggcttccctcggggagaagcagagcatggagtcacccaaacagctctgcccttcatttacaccctctggctcccagctctccgggccccgcggccaggaggcagacggagagaagggagccaggcgagttgctcgtggtcctggggctggggtcaccggcatggtgaaagcataccgtcaggttagcaggcagggacctcaaggcagctgacccttcccttcctctgcctctgcctctcctggccggccaggaactattgctggctgtccctccccggacagtgagctccctgaggggagggcctgaggactgtctcccagtcgtggcaccaagaactgcgttctaaccgagcgcatccgcatctgtccacccagaaggaaaccagagaccagcctccaacctcatccccagctgcccaacagtgccaggtctgggccaatggaatctcggccagggcgggtgcaggggcctgaggccacaccccagaggtgtcactgggggcctgcatccgtcttgtccctttccctgagggatgaagcagcccctcactcgggatggggggagggcagaggatgggagctgggcagtaattaacctgcacttccccagcgagctctaagccaaaaactgcgctcaagttgagtgcagaagctccgcgctgaaccgtccccagaacagacaggcgagagaacgacggctggagctgaggggggttcgggggaaggcgcagcggccaggggctggcggagagcggagggcgggggcctgggcccagcggggttcgcgcagacaagccccgccccgggctccctcccttcctcacccggggcgcggggctggggcgcgccaggcggctgcggcgcgaacctgctcgcgcagcccggagcagctcggggcagccgtgcgtgaagccggaaccccgcgcggggagggggccgagctggcatctgcccgctcccttccaggaggcgagcggacgcgctgggccagagctggtcgggacagcccaggggtgggcggcacggactcgggggatcggggggaagggggcgtgttttccgggattcgggaccgagacggggggagggggaaactcggggggcgggcaggcagctgggaacccggggggaggcagacaacggggcgcacggagggagcgctccggggttggtgttccccagggtcatagaataacccacggggagaaagagactgcccagggactcgaggggacggggccaggggcggcttcttcaagagaccgagctggaggaagggacgggaagggagggagagatggtacttccacccgcccccccatcagcccagcccccggggcgtggcgccgctctggccctcccactccccccgctggcctggccagactcagcccccgcacacctcccctacctccgaccccctctcaggcatcgccggccccagccgtgtccggtggagggggagtgggcgcggggcccgcgcgtccctcaaacttcttgcgagttcaccatcacgcctcccgccccttcgactcccagctccgggccgggaaggcccatgcccgcccggcccctcccgcccggttacataaggtcgcggagaagccgcccccggcccgcgcctgaagggaggggccgagggggctcccggctcggcgggcagcgccgctcgggccacgcgctgggcgcccgggggcggacggactgcgggtgggtggcggcgcgcacggtcctgcttccctctcctgccggcatcccccaccctcccacctgtctccgggacccacgggataggggccagggagcctgggtcgggggtcccgggccctcctcgtgcctctcgctccccggtcccgctcacctcgctctgaaggtcaatctgtccgccgcccgcgccccgcggctccggcaacttgtcgcaagttcgggtgcctggcccgcaagctgtgcccgccacctgctcccggcctgctccggccccgtgccaccagggaggcccgccccgtccgcccttcccgccgccgtcggcgccgcggccgctccctgcgtcccgcccgggccgccgcctccgctgtcaccgagccccgcgcccggcgcccgggctccggctgtcactccacgcacacttccctccgcgcccggcagagggcagcacccgccccgcctcccagccgctctgcctcggcgcccactgggaagcgtagttctcgctgcagtcccgctaggcacgccgggatttgtagtcccgctcagcggactaaggcttacagggaaagaggctcttgacttggaacctctgatccacttctacctctttgcaagttttctttctcctctcagtaaagtcccaaaccagggctcactaagatacattctgtagcctgtccgaccccctaaaaggaacctgcagcctgctgtccttcggcagtctaagaaagagagggtcccagatggtgtgctgttgccatagaaactccacctgtggcaaattccagcttctcttcaggagtagggtgcaggacctggatcttgcacttttatccctgccccgatcataaggggcaaggccagggtgagcctggcgaagtacagggtaaaatatgacagtagaaggcagcctgcccccattatgggttctacattcacgccccactcaccagcctgagcttgctgtcatgttgctggacagaaattgtctgagctcctttcatgtcaccttcccttgttggaagttcacagggtgcggaggcatcattctctactttctcctcttccccgcccctttttccctgtctcctcccccagcccctcccctgcttttcttctccttcccctcctccttttcttcctctctctcctccttccccacatacaatgttgctcctggtttctggatcttttgctaagaggctcc

SEQ ID NO: 585928 - DNA, 4001 bp, Homo sapiens
tggctaatgatgcaattacagtcataaacagagccccaggagggctcagggccaagagctagaccctcaaagggcagccagacttgaggggtgggagtccccttccacctacttctcagctttccagaaacaggctgaggaggcctgtgacagcgcacgtgggaccctggaagggctcctgcctgccctggcccactccctgcccacctctgactgtgagtcaccaggccattagcccgtaaaagcccagttggctctccctagattcagtgcccacctagggtgtcccctgccctatcccctgaactccttccagggcacccggaaccaagatacctgggtccccatttggctccgtctcccagagctgagttgaggacaaaataaccctgcagctgtaacaagccttgtaaatggtaagcaccattggcttccctcggggagaagcagagcatggagtcacccaaacagctctgcccttcatttacaccctctggctcccagctctccgggccccgcggccaggaggcagacggagagaagggagccaggcgagttgctcgtggtcctggggctggggtcaccggcatggtgaaagcataccgtcaggttagcaggcagggacctcaaggcagctgacccttcccttcctctgcctctgcctctcctggccggccaggaactattgctggctgtccctccccggacagtgagctccctgaggggagggcctgaggactgtctcccagtcgtggcaccaagaactgcgttctaaccgagcgcatccgcatctgtccacccagaaggaaaccagagaccagcctccaacctcatccccagctgcccaacagtgccaggtctgggccaatggaatctcggccagggcgggtgcaggggcctgaggccacaccccagaggtgtcactgggggcctgcatccgtcttgtccctttccctgagggatgaagcagcccctcactcgggatggggggagggcagaggatgggagctgggcagtaattaacctgcacttccccagcgagctctaagccaaaaactgcgctcaagttgagtgcagaagctccgcgctgaaccgtccccagaacagacaggcgagagaacgacggctggagctgaggggggttcgggggaaggcgcagcggccaggggctggcggagagcggagggcgggggcctgggcccagcggggttcgcgcagacaagccccgccccgggctccctcccttcctcacccggggcgcggggctggggcgcgccaggcggctgcggcgcgaacctgctcgcgcagcccggagcagctcggggcagccgtgcgtgaagccggaaccccgcgcggggagggggccgagctggcatctgcccgctcccttccaggaggcgagcggacgcgctgggccagagctggtcgggacagcccaggggtgggcggcacggactcgggggatcggggggaagggggcgtgttttccgggattcgggaccgagacggggggagggggaaactcggggggcgggcaggcagctgggaacccggggggaggcagacaacggggcgcacggagggagcgctccggggttggtgttccccagggtcatagaataacccacggggagaaagagactgcccagggactcgaggggacggggccaggggcggcttcttcaagagaccgagctggaggaagggacgggaagggagggagagatggtacttccacccgcccccccatcagcccagcccccggggcgtggcgccgctctggccctcccactccccccgctggcctggccagactcagcccccgcacacctcccctacctccgaccccctctcaggcatcgccggccccagccgtgtccggtggagggggagtgggcgcggggcccgcgcgtccctcaaacttcttgcgagttcaccatcacgcctcccgccccttcgactcccagctccgggccgggaaggcccatgcccgcccggcccctcccgcccggttacataaggtcgcggagaagccgcccccggcccgcgcctgaagggaggggccgagggggctcccggctcggcgggcagcgccgctcgggccacgcgctgggcgcccgggggcggacggactgcgggtgggtggcggcgcgcacggtcctgcttccctctcctgccggcatcccccaccctcccacctgtctccgggacccacgggataggggccagggagcctgggtcgggggtcccgggccctcctcgtgcctctcgctccccggtcccgctcacctcgctctgaaggtcaatctgtccgccgcccgcgccccgcggctccggcaacttgtcgcaagttcgggtgcctggcccgcaagctgtgcccgccacctgctcccggcctgctccggccccgtgccaccagggaggcccgccccgtccgcccttcccgccgccgtcggcgccgcggccgctccctgcgtcccgcccgggccgccgcctccgctgtcaccgagccccgcgcccggcgcccgggctccggctgtcactccacgcacacttccctccgcgcccggcagagggcagcacccgccccgcctcccagccgctctgcctcggcgcccactgggaagcgtagttctcgctgcagtcccgctaggcacgccgggatttgtagtcccgctcagcggactaaggcttacagggaaagaggctcttgacttggaacctctgatccacttctacctctttgcaagttttctttctcctctcagtaaagtcccaaaccagggctcactaagatacattctgtagcctgtccgaccccctaaaaggaacctgcagcctgctgtccttcggcagtctaagaaagagagggtcccagatggtgtgctgttgccatagaaactccacctgtggcaaattccagcttctcttcaggagtagggtgcaggacctggatcttgcacttttatccctgccccgatcataaggggcaaggccagggtgagcctggcgaagtacagggtaaaatatgacagtagaaggcagcctgcccccattatgggttctacattcacgccccactcaccagcctgagcttgctgtcatgttgctggacagaaattgtctgagctcctttcatgtcaccttcccttgttggaagttcacagggtgcggaggcatcattctctactttctcctcttccccgcccctttttccctgtctcctcccccagcccctcccctgcttttcttctccttcccctcctccttttcttcctctctctcctccttccccacatacaatgttgctcctggtttctggatcttttgctaagaggctcctgaggaggacagggatgaagtccaaagggacaagatcccttgctgagttggttccagcaaataggctcgatttctctgtgactcaagtaggaacactctcccccggcccgccacccacccacccatgatggcgctaccactgtcttccctttccaggggaaaagtatgaactttaagctctgagggttacagagcccatcccaagccatgccttaggtcccatttctcttagaatcacagtgacccaccaggaaaccttgtagccactcagggaaaactcccttccaaaaacaacaggatgaccaacataaagaagaactatttattattagagaaagtccagagtccagaaaaagaaggctgaatccagagtggaaagacagatacaatgccctaggagggtgcagggtcaagaggaagaggggagcccacgtgtcgaggcagcaagtctaggcggcagtggcaaagcctactctgttgttgcccaagtcgtagacggaatagtaggacctgaggaagacatccccgaggatccacaggggctggccgttctgggaggacaggtaggtgggctcgactcccacggtgcagtagccgttgttctgctcaacaaagaaaggcagcactcattcatttgtccacacatgagctgggccctg

SEQ ID NO: 585929 - DNA, 4001 bp, Homo sapiens
cagcgagccacaggcatgggttaccggagcagaatgtgcctctgggtctggggcgctttctactctaactgcccgaggcagctgcagtaataatggtggtgctgatagggcctttctatggagctcttaagagggtttaatgacaggagcgaacacttggccatgagcttagaacagtacctgcatgcagtaagcaccacagaacggtgttagaatacacagctcaggtacagccttggcaggctcttcccacctccccacctcatcagcccacactgccgggtacgtcgcagtcccctaaggacagctgtgtggggctggccctgcagaggccagccaagaacaggatggtaaatgcgaaagttctggatgcccagcttcataaggacaggttagaaaaactaaatcaaactcctttgacgaaaccagatcctactgtctctgccttgaggtagattcttacaagagcaggaggctaacaaagcatcccctgctgcggattgtcaaaggacagtgaggctccatcccacaggaaggatgagcagccaggctacctggcctcagcccatccagggacaccgggcatgcatggatggagccacggatgagccagtgccgctcacccctgccccagcctctgcacgccacacatccacgtttatgcttgtgtttttccaaaagaaagatttcggtgcctgtctgcagcagaatgtagtttgaatttgcaaaggtcttttaaaactcttttcgtatgaacaatcaaagtaaaagatagctttgcagagagctaattgtttaccggccgtccaccaccaacagcagtctgattaaacaccagactcctgggtgctcagctcccagtcctgggcagccaaacccaccttccttaagtggtagccaggcaacctgccagctcgcttttcatatgcaaactgccccaagactgttaaaagtcgctgtgtgtcccggcagtcacaggattttccatagacttaccacaaatactctctagttatgttcaaaaccacttttcagctgctaataatgttaacaatcagagtctctctttaatctactaataatgttaacaatcagagtctctctttaatctactaataatgttaacgatcagagtctctctctaatctactaataatgatgttaacaatcagagtctctctctaatctccagttacttttcagatattccgggagttgtttctaattctctcctcaataacaaactctcatgtggaatcttcttcttcggaaactgaaaacataaagcgtttacccgggttcccaggcaggtatatacattgaaatagcagcagccacaaccctcagagaggaaggggtgcccggctggtgaaagcacagccacggaggaaaagctgaggagcggccacgtgccttgctcttcaagcgggcagtagaaacaccacgtgaagaaacacttgccatttagtgttaatagatacaccacccaccttaagttaagaatcgaaattgctcctttttcttctccgcttcttagagttcgagaactctaatttcttaaaattagagcaccattaaataattgattgagtttaagaaataatcgtacctggtttgccaaaaagatgcagtgatgactggtttcagtgttccggaccgagtcagaaaggcgcaggctctgctggagcgagagaccggccctgcagtgcaggatgctccggtggacgtggccgagcggctcccgggcagcgcggctttatatgccgcttctcctgtgcagggctgtcaatcagacacacgaggaagcacgtttaattcattccttcgaaggaatgacatcatcccccttctgatctcaccatttgctccgagtacctgctgcaggggtccaagtccagcccctctgtactggatgccgtctcctcctcctgcaccccggcccctgccagacaggcctgggaggagccagacggagagagggaaggcagggactcacttttcctgtcttctctcaggaaataagatgctataaataacactagcaagattggctagaactcctcattttgcttaagagaaaaaaatgcaagttctatgccttaaatatgtttcgaattactcaatgtgatattggtctttctaaaccaaatgagtgactctcaataacacatgaaatacatcggtgagtatcaataatcagtctgtatattaataaagttattatggtcaataatcaagtgtattatgtgacaaaaatgaaatttaatataaaaggaagttgccaacatttatctcaggcagttagaggactgaaaagctgtactgcagctttgggaaaattcatttttacccaaattctgcttcatttgctcagtgaggatcccctagaaggacgtctcccagtggacgtgcaatacccgtagaagggtgtgtcccagtggacgtacagtacccggccaagtccccttggtgcacacttgcacgtggccccatcacaggaacaacctgacgtgcaggcacagagcaaggactcgagagaacgagaagcagtggcagcagctaacccccgcccctcccacacctcaggcatcacccgcaatcagggtgcactctgcatgggggtggggggcaccgcttctcagaggtcagggtggacgatggatgcggaggggctgcttctcccaggtcagggtatacagtggaaaggggaagctgctgctctaaggtgggggttgatggtacatgggggaggggctgcttctcccaagttgggctggacagtggatgggggaggtgccacttctcccaggccagtgtgaaaggtggatggtggagaggctgtttctcccaggtcagtgtgcaaggtggctggggatgtgttgtttctcccaggtcagggttaatggcagacaggggagctgctgcttctcctgggttggggtggaccttggatgggggaggtgctacttccccaggtggggtggatggtgactggggagctgctgctttgcccggagccacctgcacctgcttcatgtcggcacctgcctgtcaggttccttcacgtttgtgtggagttgtcagcctggccatggatccgtcaagtcctagttagagaacattaaagcgaatttctgtggacacaacccttactgtgtctgtggcaggggagtgtctcttaagcctcctggcattcccccacaggggtccagcgctgcagaggtcggcaggcaccatgaagagcaagcctcactttctggcctctgtcttcagggaggatatgcgagcgggtgtgggagagggaaggagctttcatttgtgaaaacctctgtttttcctaatggcacctgtttatttatcacttggcaaacatcagtttccgacacatgcacagacaaaagcctccaagagtgtatgtgtcatgtttaaggtacgttattttgctttttaagctattagggacaaagtcatcatttgaattaaaaagtagtttaaatagattgatgttatctcaaattcaaaaaaagtataaaccagttccccttaaagaattttcagtggataattatccattcatcagtttgagtttttctgcctccaggttagtttttcctggggccagaacatggagggcggcatcccctactctgcgtgccacggcctctcctgttcctcagtccacagaatgcgtgtttcctgattaaagctgaagacaggcagctcagctgctcagcacttcaggagcatgcggtgaagaccgtgacactcactggggagcaggaaggtatgtattcatgactccacgtgccgatgggcaggtacagagaagatgggcctccttctgtaaaatctggcagcccagaatcagggaagtctgtttagaggagacagaaggtaagccgattggaacatggcccgtgaatggggtgtccccagttgagaaagtatttcaggcagagagagtgggtaggtgttcatggtgcaaagaacagcaggctcct

SEQ ID NO: 585930 - DNA, 4001 bp, Homo sapiens
atttactgtatatttcaaaacaactagagtagtggaattggaatgttcctaacatgaagaaatggtaaaagtttgaggcaatgaataatatccccattactctgacttgattattacacactgtatcaaaatatcacatgtatcccataaatatgtatatatattatgtatctataaaaacatttttaaagtctatgaatatctaagccaatttaggaaaaaaggattgaaaacaagggattggtctatacatcatttctatattaacatgtattgcaaggccatagttacaaaaatagtgtgtttgggggcagctaagaaaaaaaataaactaatggaatagaagagatattttagagacagactgatacagaggtgaacatataatatgatttgaaggaggcaacaaaaatcaatggcggaaagattgtcagcttagcaaatggtacctggaaatcaggtgaactgtatagagaaaactaaaattggatccctgtacaattcataacattgtcctccaaatagactaaaaactaaatgcaaaatatgaaaccgtaaagttgataaaaacaacataggaaaatatctttttaaagtagacataaagaaagactttttacgtaaagcctaaaaaacacaaaccatgagacaaaaaatgatttggggctggcttagaaatagagacattgataatatgattatacacggcaaaacatagtctgattccaaaaatcaacttacaaattagttaaataaaactgtacactaagctgataacagcccatatcaattcatcacctgcaagtatgtgtgtgtatattttatatatatatatatatatataatatatataaaaactggagctgacgtgttaatctttcttttactttgcaacataatatgtaatacattattttgtctacgaacaagaaagacctgcctaccaacagttaagttattttcctggtagttttgtcttgatctgtttctacaactgcttcaattctaccactcttgaggccagaaatacacctacagaattattaattgtattctatgtattcaaactaaccatgtaaagattctaggttgtatattggaggttataatgttctttcacctgaattaacatagtgagttacaccaaaactcactatcttattattcaataagtttaattgaactctgagtttcaacatcaatttttaaaaattatcttgtagcaataatttctataccttcaaattaaaattttcattatttaaggaatttggagttaggccactacagagtgagaaaaacattggtataagcaacatttaggagctaaaagtttgggaaatatttggaaatacttctttctaaacactgtgcctttgatagttgcttttgttttagcaagctaaattttattttttatattgtggaaacataaatattgataactaaatttattattcttgattacaaccaatttcaaagcaaaggcagaaatagttcaccattcaaggcctacagaaagctcaagaagcttcactcaattccttatttctgtctgtcccagagtcctgtctagtttctcccctctccaacaccattggcttttgacgattcgttggtcagttcattactttcttttgtgatcgcctttcctttaccagaactcacatatttgctgttaaaattccccccctccaattttcaaaaatgtatactttacaagaatgttctagccagtaaaggtattggagagtgcttaccttcaagatagatgcctgcctggatttctagaaccctgggtagggtcctgaggtcaagggagtggacgaattcttccagtgataatgccattgctatgccttgggtagtttgtagacctggtgctcacagaaacttgtggcttctgggtgacacttgtctgcaattgcagcccctgctcaccatttcttcctcaggcaggcaggaatgtcacactacagccagagtggggtggagtagctctatgtggggaggacaatgaagagggaggggggaagcaggagacaaaaaatgttatagctctttttgttcacattgtggcttcatttccttctgacattgaagttgaacaggatgggggtggggtgaacagacactgcccaaaaaatgagacgtgctaagtagcgcattctgtcctttgttaatccaggtgtgcatctactatggtagcaaaactgaggtcagagttgcttgtggcttgcccaccaacaaagaacaggaatataggactaaagtctaatcttaaaaatggcaccatgtgaattcattatctctctagttcatttctaaagcttggctttgtgccttatttgcatactgtcagtgcctttacattaaaattggtaataaaagtgctttgcgtcagctctttttagaattctgatactatactctggagagagtattgaaaccactttttattcttccacattaaaaattttgctgaatcttaaaggagggtagggtagggatagaatatgcaaaatgatacagtaaattaacaaagtacattaaaatgagttttctaatctctacactatagtagaaagtattaaaattacttgtcaggaaacctgcattttctgggtttagttctgcttttgatttacaggctaacgtcagccttgtcttctctgattttcatttgttttatttactaaatggagatgaagtagaagagtccaataaattttataatttcttccaagttcacaattccacaattctgatcttattgttgaaatttaggaggggaaatgatcagcaccaaaggaagcaggagaaaactcatgaacattgatctcttcaaaatcctgcccctctctattttttgcatgtaactgaaacaatatttaaaatatatacaattaaaggtggtagttcctaagtctctttaaggtaaagtagaagaatattggttgaggctgggtacggtggctcatacctgtagtcccagcactttaggaggctgaggtaggagaattgcttgagcccaagaattcaaaaccagcctgggcaacatagtgagactttgtctctacaaaaaaattaaaaaattagccaggcatggtggcacatgcctgtagtcccagctgtgaggaggctgaggaaggaggatcacttgagccctggagtttgaggctacagtgagttgtgaacatgccactgcattccaggctgaatgacacagcaagactctgtctcaaaaaaaaaaaaaaaaaaaaataaagaatactggttggtatgtatacacttgaaagatgacaggaatctacacgttttctttagtaaccaaacccaggcacttatctattaactgttttggccttaggctgcagagagcatagccacatacagagggtcaggggacatctcagttctaccatggccatcatgtaaatgacctagaaagataaaaactgcctagttttgatatggagcttataaaactgtttcaactctttgtaatcctatttgacattttcaataatcagtccagcttcatttctttctttataaaagtagaatttacgattgaccacatcaacaggtttactatcattagattcaaattcctcactggcaacttttttgtccaaaaatgtcctacccttgatctgtctgccttccatacccctccccacagtttacagcctagtagtgtatttcatgtggatgaatacatgaaagaggcttctgtggactgctccttaaaaattatgaatccgttagaactgatgccacaatacatttcatttgatatctaatgcaagctggatatcacttatttttttaatattcccaagtcaaatttctatcctactagccaaacagccatttcgtatcaccaatctcttacaattacctaggctccatctgcttctgctctcgcgacagatgacgctctctctgtgataatcatcttcgtattctcagtcttaattaatgacactgctattctc

SEQ ID NO: 585931 - DNA, 4001 bp, Homo sapiens
ggctgacaatgctcagacaaaatagtgaattactgcttgctgtgctgttagattctaaatctcatacctccatattctggcagagccagtgaactctctaatatccataaaataaatttcctttttgcttaagccagagtcggtttctgttgctcacagccaaggacctcaaataatgtactaccagggaattatttccgattgctttgagtcagaggacaagctattaggctggtgcaaaagttgttgtagttttaaaaacacactaaaagtaatggcaaaatcacaatagaagctattatgttaatggacagtacacttaggctcaagtccactgacaagcatcagaaacttcaagattaggactagaatcaaagagtttgcttttgcaaaagcattgatgttaaaatttagtctatagggtctagaaaaagggaatggagaaaaacaaaccaaaaaagcttttaagagttgtatttccacagaaaactaagcttgacaaagtactggattattcagttgctaagatcttcccgagtctcacaaactatagcagaaagattacaaaatgggttggtcctcaacacaacctgagatgtaggtggaagtcaaggagagcagaatggagtcagtcccccagttacattttgggtcggtaggcaggcaatagatgcttctagtaacaacttctatatcaattaggatcctttggttgcaagctacataaatcaacaataattaaagaaatgtggggaatttattggatgaataagatatacagaattgataggatgctgaaaacaggacaggaaccggggcagtagaatctggaatgtgtgattactgaacctagcctttcacattaactccaaaatcagcagtgagaagtgcttccttgtgtcaaagttcctcttgatgaccattgttttaggtacttttaatctatctgcccagctcctagtcatgagaattctccttctcttggagtaatcagcagggatgtccctttcagccacagttatatcatctgatcactttcaagaccatggttagttgaagagagaccaacacctgaaacaagcagggccaatcacattctcttccccagaaatttagaatttgaactaaaagatatactggaaatcagaaattgtgtcattaaagataaaacttctgaagaactagccacaaattcctgcttccgaggaagctgttactttccctgacttcctcattctaagagtctagtggttcagcatttccttggattccatgagatataataggtttctaataaatttatcctttctacttacatttgcatatgtcagcttatttcactcttatctgagagagccctaatcaatacactgtagtaaaagtcctcattgcaaggataagtattgatttttaagaatcatgtacaattagagtaaatttggaagtcattcttctttagctatattcttggataggtcctaatcccagcatagagagtggcccattaataactaaacactgaaggctccaaggcacagacttgcaacattaaaaataaacaaacccaggcataatgcgtgcctgcaattagcattctaatcctaaagaaagataatttaaggattatcaacttgaccctgctggtaactaatatttttcagagaaattttcttctaggctaagtctttataactgaccatttaaagcaagaaaaccctgagagtatataaataattagagatagccctggcccataaaatcttatgcaagagatattatcccacaaagagctgtacctttgatcagagaggctgatgttaatgatcattatctgcgtaagagcactggagcatcccaggtgttttcctcctctcctgtagaaaataagggatccaggaagagcctctcacccctacccaccagccaaagagactaatgcaaatataaatctcgtaattgtaagtataaaccttgagtctgcagaacactttatctgtgaacctgttgtgtctacaaagtgggtggggcttctaaattttgatgtggttaaacccatgttgtaccagattcagtatttcctgcaatgctagctggaaataacagcaaccaattccagttatttaacctaaagattaaaattattacaagagttcagaattgtttaaaggcaagcatgctgttgtggatcaggtaaaaactggaaccacaaattgaaagccttctggaacttgaagtgtgctgtctccatctttctttttttgttttctctgtatgtcatgaaagagcctaagtagctcccccacattcactcagctagtttgtaatagagctgaaagtgaaatccaaaccttttgactttagtgttgagcaactgctactttcctttactctccaccttgagggcaactatataaaatcagctatgcaaatctaactccttccatgttttactaaatggtaaattgctctaaataaataggtactaaatgaggttgatgagtagctgcacaaaaactcactaattccattttccctcctgtctgcttgttttacaacatgatatgttgtagtaggtagagtcctagacgatgaagccatatagtcccagctctgcacctcactaggcagaccctcagcaagtcatttaaactctccaagtcagaacattgtgctaacagaaataagccaggcacagaaaaacaaataccccatgatctcatttatatgtggaatctaaaaacgttaatctggggtgagtgtgtgggatgggatagggagaagaggatagttggggagggagggatcactactaatggttatggtgtttctttttcctgtgatgaaaatattctcaaattgattgtggtgatgcttgcacagctctgtgaacataagaagaatcattgattatacattttagatggatgaattttgtgatacatgaattatgtctcaataaagctgtttttacaaagaataaaataatactaataaactctccaagtcttggctttctcatctttaaaaaaaaagatagtaattgtatgttccccacgggagatacaatttatgaatgaacaatttacaagtgcttatgaatgctgtgagagttaaatgagatagcatacatccatagtgcaccagtccatggtaaacctttgcagggtagtagctatcagtatctctagtctcatgttagtcctctaaacaactctgccatcccatctccagttcaaaacacatacactatggcttcgaggattctcaaagcagggatctttatattgataaaaacaatcttttagtgtttttgtggaggaggtgaggtaaacgacaaattgacattcattttgccttaaaccaagtgtcaaagtctggcttcccaaagagaatggccagtattttgggcgcagctgtcaaatcttcccaatttacacagatgcaacagaacctgtgaattaacctgtggcatttaccaaagccaacccctgccaaaaacaaatctctctcctcctggcatactgaataagagatagggatgcattaaacatttacgaagacacttcaagagagtctcaggtaacaggaagtgttctgagattgatttgccatgctttgagtgcacagaagacagagggagacacacagggaatgttcctgagactttttcttttcaatcatcctcctctgtgacttttaccctataatttatttttaaagaggcatcatagttttctgggtgccataacaaaatctaaaataaatgttttcacctagataagcactattaaaaggaaaggatactgaattcatttgaatacatttacagaagattgattttcccaagggaatgtacctatcctatttctttaattattcttgaagttttgcctatcaactgacaatttcttacagaaaggaagcaaaacagcctggctttcgtgacagcgaagaattataatactagaataaaaacaggtttgtcactttccttatctctt

SEQ ID NO: 585932 - DNA, 4001 bp, Homo sapiens
tggtcaagaacacgggtgggcggctgagatggtcaagaacacggctgagatggtcaagaacacgggtgggcggctgagatggtcaagaacacgggtgggcggctgagatggtcgagaacacgggtggatggctgagatggtcaagaacacgggtgggcagctgagatggtcaaagcatgcacgtcttactttcaacagcattttattgaggtgctcatctatttgttcagtttcctacctgacatcgaatctcagctcaagaggccattaggtgagcaacagggaaaaccttcacacacacacgtatacatgggagacgcaccaggaaggggcagcttacagcctaatcctctctcccctgcttccagtgctcctagttggacataatctcacgtgattcctttgacaacactgggttggtggtggtgttatgtttattcatagaggaggacacacaggcttacaaaggttgggtaacttgccccaggtcacataatgataaggcatggtggatgggaatacaaattcaggtttaagcatcaggtcgagttctttccaacataccactgcctccaagaaagggctacctggaattaggtctttgtgacagattattgtcttcctgctggagactgccacaccccaaaccatttttcagggacaaagcgtttgccttgaggaggccatctctccgtgcattaaaataggaatttagtcacataacttgcatttagaaataggcatgtttggttttaagaaaaggatcatgattctattcatctattgaatagcaaccatggagaaagactacggtttataaataagttatcttttagcttgactgcctaacaaaaacataaccaaaaagatcttgcaataatgcaggcaagtatacaccaaaggaagacgaaaactccaagaatgctggaaagcaaatcatgtggtccaataattttttcttttccttcagcttcttagataggcaagctcttaaaagcaattcatgtgacaaaaaaaaactcaaaaggttaagccaagtgggtgagcagaaattaaatactaaatgcaagttttgttcacgctgtacactaaaaaccatagccactagtgcacgttcttttttttctgcctagaaaaaataaacaggacaaaatatatcaattatatcttaaacaagattaaattgcaaagagcacaacacacagttgtcacgctgtgtatctccagattctcaatgctctctgttctatcaacacaacgcctacaaacggcaaaaataatccctgccaaagcgacactaggtgattacataaaattcttccacaaagccgaaaaattatttcatcaagaataactaaattaaaaactctgcttaccttgtagaaaatgggtttcatgtttgtgaattttcttttacagtattaaacccaatataagtattaatatgtgctatactccaaggaaattttacaagcatacaattaattgctatattcaaattattcctccctgtcttttcaagcatattttgtagagtaaatatttgcctaggcctttctgatatctttatatttcaaaaagaaagaactatttcggagatgaagttaaagattttggaatgagaaaggaacagtgacagcgccacagaacgggtatccaaaagaagttctcttatccttagctgtaaaaagcatgtaaagatcactgtcagaatcccttctggggagaaaggcatctcttctcatctgcatatcagtctttagacatttttagagcaaaatcaactttcaatcaagaaaaggaaaccgtgcaagcatgcctacatttggatcaaaatctttacccatgaaaatcaaagcccttgtttacttacatgctgtacataaaaaggaaaagttcaaagaaacctgctccctctgggagaacggatcacatctaagtcggctgttgggagatgtgtaagacacacgttgtctctccctctcatccccaggcaatgaaaaaaatcccaaactgctcttccaagtcacattcacaaggacgtcctagcgccaccaagctcttcctccacagcagcaccggtgattgggggaagctggccccctgctctgtttccacccatgccgggagcctgcctgctctagaaaggcaccgggttaccacagacgtggagacaatgggaccacagagggccacgtctcctgagcctcagagccagctcagcaggtggagtgcaggcagcatgtctgtggggactgcttaatataccttaagttcccagaacaaaccaaaaactctttcaacctcctcacccaaagggacattgtatatttctttcaaactccaaactattacaatagcacatgctaattgctaacaatactggggaaaaaaatccccccctacaggagaggctgacagggtcacacaaagagctatgacagtaataggcacccttacagagaagaagccaatcaattaggaaccatttgcagaaattgcggggctgtcaaaagccctgggtacagctgtgcttcatcaaaccaggcttcatttgattttcaagggaaattattctttattctaatgtctagaatagttgttagtaaaatatccccaacagcccaggttcaaccagggtctaatctgaaaagaagttaatgacccctgagaagaccagttgggctagggcaggaagcccagaaaacagaggcagatcttctccctgagaagagaccaccttctgaggacatggcacagggggtggggcggggggagtcccaaaaaatccactcccagcacacactaggcattcaccagacacctcccacatcaccacttcaaaaatagaagaggactgggtacggtgactcacacctgtaatcccagcacattgggaggctgaggcgggagtattgctccagcccaggagtttgagaccagactgggcaacacagtgagacctagtctctacaaaaaataaacaaaattatccgggcatggtggcaggcacctgtggtcccagctacttaggaggctgaggtgggaggatcatttgagcccaggaggtcaaggcagcagtgagtcgagatcacaccactgcactccaggctgcacaacagggtgagaacttgtctcaaaaaaataaaataaaacaaaatttaaaacaataaaaaaaaaatccagaagaggattgctttagatataacacgatgtttccaaaaaaaaaaaaaaaatttaaaatttttttttaaaaaaaccacggaacagaaaaaaaaatgtgatccttaaatttgaaattttctttttcttttcactaatgtccaccacagtttttacttttggtggccactgattcttctttcccaagaaacaaagaacagggaaactgagtaactgctaggtatttaccaaagattttaaaaaatgcactgaaatctatcattatacatggaaatcttcatatcttaaaaaggtaaggtgataactacgttagacttgagagggattttacagcaaatgcttaacatgctcatattctttcaataaaattttttcttctgtgttcgttgatgttattatttgctttctcctttctccacttttaacaatgaaaattgaagctcagacggccccaatttcaacctgattgcagctttctctcctcttctaaatttctgatgctccaatgttcactttgtaaatgttttgcttagttaccataggcattgttaaataacagagttggcaatggccttaacgtgctaactttttgcatatctattttgctgaatcttaagataaactttgggaaaaaattcaatttccttcttaagagctctgatgtgtaactcaagcagatcataagagacgagaagtcgttatccctcacggtgttaagtgagagtcccccaagctaccatcctgtgccagggcccccacaggcacacttaacttttaaatacatggccttgctctatcagtgtttcaggaggatttga

SEQ ID NO: 585933 - DNA, 4001 bp, Homo sapiens
ctcgcctctacaaattattaaaaaattagccaggcccagtggtgcgggcctatggtcccagctactcaggaggctgaggtgggaggactgcttgatcctgggtgggattacgcctgtaatcccagcactttgggaggctgaggcaggcggatcacttgaggccaggagattgagaccagcctgagcaacatagcaagacctcgtctctacaaattataaaaaaaactagccgggcccagtggtgtgggcctgtggtcccagctactcaggaggctgaggtgggaggactgcttgatcccgggtggtcgaggttgcagtgagccaagatcacgtcactgcattccagcctgggcaacagagcgcgtcgctgtctcaaaaaaatagcaataataacctactccaggtcactagcaagaaaatgtcagagacaggattcaaagaactcaggcagtctgactctaaataactgtagaccttaggctttccaaatagtgtatttcagcagtagttttgaacatcgttaaagcacaaacacctctccaaggctaattagatactacttttggatattccaatgtagatgataaaaaaaagaaaaaggtcaacacaaacaaagcttaccaaaattaggatcaaaatttctagctttaatatgtattatatttataaataaacccagagatattagataacttcctgtttgcatctaatctaatgttaaatttgatcataatgtgagggaggaattcacatttcaaaaaaatgtttaaacagacaaaccttttaaatatcctccagtgtgaataagtatctcaccatgtgacattgagcaatttacacaatgagcctcatttaaccgttcaactcatacattcagacaaaacatatctgctgtgcaacagatgctgttgtgggctctggagacaggtgaggaaccaggcagagaaggttcctgcccttgtggagcttctgctctaaggaaggcggagacagacaacaagccgatacataaatatgcaaggagaaaacgatcagtgagggacaaggactttgcaggcaactaagagagcgtggcgtggtagcagtggctgggcgtcctttagattgggtggtcagcgtccttcagagggagtactttgagctgaaacccaaaaagcatgaagcaatcagccaagaaaagctggggcaatctaaatcaaacagcagaaggttatgcctgggaaggttatgttcatctgagcgtgcttcagctaagcacgcacgaactccagacacggcaaacagtccagggaactacctgccaccatttcaaacgccgctggggaactgttcagctttcctgctttagtacttaacctgcgacaccaacacatccaatcagtaaaacacctcagtcggaatgaaacagccttaaggtcacagttggaatctgacctttcctcagtggcttcctaaaatccccgtcccctgagcttacctgatcttacaactccaattagaaattatatgctctctgcgttctcaagcaggaggtcctatttggtctggagtttaagtgtgtgctctatcagtatgtggcacataaaaggacggaaactaaagctgcccaggctgcatcctctccacctaaggtcccagagaggcctggcatacccgttttccacactgagtggaccatccagcatatctaattaaagtgcttttgtaataatctactgagctctggagccctgttgcttgcaggaacctcaattatcagcattcagcaaacctgctttggctttccccactcaacttctcatacaaagtgcaattaacagagctacgtgagaatgtggtgattaagcaaagaaatacagactgacatatacttttaaagcctttgagatatacaagtgcctcaaacttacccacagaggaatgtggaggacacttagtgtaatcattcattcatccagaatgagctggctgaaggtatccttgtcattcatacacagagccctggcaaaataaaacaaaaacacagaggcagtgagaaataatttttcaaaatcagattgttataattgaagctcagtttctcagcattctgttgtatcttgggcttgatacaagaaggaagaatctgaaagagaaatcaagagttaagtgattaactataaaggaaaaaaggtcttcccacatcctaactggagaagcagatttactgtagatttactgcttcatttcataatgtcatgactaagccatttgaagatagaatggatggagggaggggagagagaaataaatatagataagttagacaggagatggatagatggatggatggacagacagactgacggacggacagatggatggatggatgattgacagacagagcaagcctactgtgaccaagccactactccagatgctagaaataaagcggtgaatgagagagaaaatctcgctctcactgagctccattcaagtggaaatacacagttcaataaacaaataacaaaaatatcctagagtgatacaggcaatgcagagtcaatagggtaatgagacagtgagtgacaagtggctaaattaaattggaagattaggaattggctctctgaaatgacaactagcctgaaatctgaatggtatttgaacttagagaaatgatcccccaggcagagggatcagcgaagaaacaccatgtcttgagccattgttacggattctggagcagaactcaagtgggtagtgccaaaggatcagaatttcataacttattaaacagatgaggccaggcacggtggctcatgtctataatcccagcactttgggaggccaaggtgggcggatcacttgaggtcaggagtttgagaccactctggccagtacggtgaaaccccgtctctactaaaaacacaaaaattagctggatatggtggctcacgcctgtagtccccactacttgggaggctgaggcaggagaattggaggcagaggttgcaatgagctgagatagcgccactgcactccagcctgggtgacagagagactccatccccccacacccccacccccccgaaaaaaaacaggtggtttctggatcctctcctattatggagaataatactttcttcctgtatttgatatgctaccacctggttatatattaaaactcatggtccattagtcaacacatcagaaagtacctcttttttttcattgtttaaaatgtgaaacagactgctttcatagtgagacttacctttttagaaggcatgatattaactctgtgatgtaaacaagatactgttttatggcaataaccatgtgtccttaacccagaatgcagtccttgataaagaatgcagactttagggcagggatgtccaatcttttggcttccctgagtcacactggaagagaaactgtcctgggtgccatctaaaatacatcaacactaatgatagctgatgagcttttaaaaaaaattgcaaaaaaggtctaataatgtttaaagaaattttacgaatttgtgttgggctgcattcaaagccatcctgggccgcaggtggcccacaggccatgggttggacaagcttgccttagagcaaggggactgagattggagttcaaaccccagccactccatgaccacctcagtgagctcagcccagttatttagattgtctgagcctctggtttcttcaactataaaatggaaatatgatctacactacagggttattctaactgtttaatgaaataatgcacataaaatacttaataaattacttgaaacatgtgacatactcaaagtagcaaaaaaccacaactagactttcagtgtaaatggtcactattgagaaaggtttgactatcacaatgactcatgctatagaaatacacctataccggggccgggtgcagtggctcacgcctgtaatcccagcactttgggaggccgaggtgggcagatcacctgaggtcgtgagttcgagaccagcctg

SEQ ID NO: 585934 - DNA, 4001 bp, Homo sapiens
gaaggaagaaaggaaggaaagtctaggagcagtgattcattcctgtaatcctagcactttgggaggtcaaggtgggaggatagcttgaggccaggagttttaagacgagcctaggcaacatagcaagaccccacatttacaaaaaataaaataaaattagctgggtgtggaggcacacacctgtagtcctggctactcaggaggctgagggaggaggattgtttgagctcaggagttagaggctgcagtgagccatgatcctgccactgcactccagtctgggtgacagagcaagactcacacacacacacacacacacacacacacacggaaaaaaaaggaaggaaaaaagaaagggagagaaggatggaggtgtggagggagggaagaagggaaagctgtttattggtaaaatgtaaagaccgaggataaataacaattatgtggaaaatttaaaataatacgtatgtagacacataaagagacatttcctcaattttacaaacaagatgacattattgagaatgatggctatggcatctggattttttttttttttttgacacagtcttgctctgactctttaaatgacatctggattttgaaataaggattccaagcccctagtttaccctaaaatgtcttctaactgggatttctagtcaccatcacccatttatggtagtgtgacagagaagtctgattaaccctgaagttctgttgaggagatttaatacaatgagagacagaaaaataaagcctcatctatgctcaaaatccatagtcattctcctccaattagataaatataataaataccatcatcctctttatattgtatttatccatttaaccttagactttttcaaccagtctatatgaagccttcctttctttttaataattgtaaaagtcccagactggaaaaacaaatgaagcaaaacaaaaatacacgtgaagaatacatttggtattacttaggcagagcgggtgactgactttatcttattttgtcctggttttaatagcattactaataccacagtttctaatgctagtgcatccattagcccttttaaataacaactaaaatctacggataggaaatcttgcgactttcttgagactctctaagaggctgcacacaaaaaggcttgagaaacctgatgtcaataaaaagaagagagagagagaacagaagaaagagtttaaagtaatccttatacaagttgagtgagtgttcaaaactcactgatcaggattccgatcagcacgcaggactgtcagatcagaactttcctgaaggtgcttgtattacacaggaaccccacatccaaaccaaagcactttaacaatccaaagaaatgtattttctcaatcacaataatcattttcatttcattgaaagaaggaaaaaaagaaagaagaaaaagagagaacgtttgtcagatcttgttgttatgaacgaggatgatgttgaaacacattcccaaagcctaccttctggataccaaggctgtgtgtgaggaggccattctttctcttcacggcaaaaggacttgtagtcaggacagcaatcagaattttctctgtcacagaatttatcacagtagcacaacgcattcgccgcatagaactcagtgacacagccatcatctctgtcttcacaacagccaaaatttctacagtattgcccttggaaaatggctcttttgaatcgagtaccttgcaaaacggtgtgattcctagtgaaataagcctctaggtccacttctctttgagataaatactgcttctccatccagatttctgtagtaagataagagaagattaagatcttatatccggtccacattctctggaagtcaggtatagcttccactttccgttatatccaatacccttagccttgtgggcttctccttggaacctgaattctagtcattaagacacttcagcctgaaccctgaaactgatcctttacttgaatgagtatacttctcatagttaaacattaatcaagaatttcaatgtttgaccaagataatgtatgttagaaataaactattgttattcccccaaagttaaaaaacttatatttcatatagtgtagaaattatgcatcatcaaaatatctacataaaatcttatgcatagagatacattgactattgcatgcctctcaaaaaatctaggttcttaaatcgaaagcctccttagaatatacatggcccagattatggctgtaataaccactggcaaggtgcaggaaattcaaaagtcaaaaatgcaattattcgtttcacctgcctgcattgaaacgaacatccaggctctcatgaggttgcctgctaggatctgtcatatcaataacagttgctctaaatcatgcccagtcacacactggtttgatttcccatctgtactccatttacctaccagaagcgttttgatttcaaggcttagtggaacctaattcagcaagaaattccctgagggtgaccttagttctctccacctgagtccctgcttagcacaaacactgggaaccttcagtatcttgaaggcagcttatagtcaagaaaagtcagtactcggtgtgaatgaactatggggggagggtgttgtgaaggaaactggaaggacaaggtgtcattgtgtttttatagagctgtgtgttttcactggtttttggctacactgtatttactcattaactacaacaacttcctttggattggggataagtaaccagcagaggatgattcagcaagagttgctgggtggactagtggaaagcacctgtcctggcaatcagaaaacccggactctggtccctgagctactgtttaattggttctataaccttgggttcaccatttacttctctggtcctcagttatttgtctatgaaatggggtattcctttcccagactatttcataactccaaccctacaaacttgttccttgaccttgctgtttattttattcaactcacacttttgtcttcattgtgtcgttttcttctggcaccttcctctcaggctttaaaccaatgtgagtctctctttttttaaaaaaaaaaaaaaagtctacataatcttgatgtcactatccataatgcccctgtctcttcaatccaacacctgctgcctccacttccttgccatctactgaatcactaaattactgcaaagtactgcctccattcccacctgctttcaccaatgacctcctaccagccactcccccatggatctgcatttatccttgtcatacaggtgtcttatgcagcattcaaagagagtagatgttaagtgtgctcaccaaaaaaagaaagaaaaaaaggatgaaagagagaaggaaggagggaaaagagagagagaaagaagaaaatggaaactatgtgaggtgatggagatgcccatgagctagattggggtgattattttacaatgtatatgcatatcaaaacatcaatttgtacattttaaatatatacaatttttatttgtcaattatacctcagcaaaactacagggaaaagagaggaagggagcataaaagttagactaatggaattcatatcctagttctgccactgactagcagcatgtctttgggtatgtggcttactctatgcttcaatttgctcatctgcacatttggatattaatatttattactacatcagatgggtgggaaatttaaatgcgataataacacaaagtacttagcacatcacacatgctaaataaatgttaattttcattaataagcatacccactacctagaaactcttcctcccttgctttctatgctttcattctttcttggttctcttcccattcttcacaatgctcccaatttacctgcccacttttggattcacttccttcccttctcaatgatcatttgaaattgactttcactgacattctcaacattcccacctctagtcctcatacctcatattccctcagacttccaacatgaat

SEQ ID NO: 585935 - DNA, 4001 bp, Homo sapiens
cactaggccgggctcagagtcagtgctattaactgttatgtgtgttcaccacactacccttgggtgattacaattacaatttgaaagggggcacgaattgtcctcagaaaaaggaggttctcaaccttcagaaacagagtcacagctacatatcatcagttcttcaaatacctaaaggtactgaagctgacctagtaacagtgacttgggttgttctgtttggagtaagcctttgattggggggacaggtacagagcagacagtaaatgaagagttctagatcaaaccatcctagtccaccatgaagcgatgctgatcctgaagcaggcttcaataagaaggctactcccaactctggctagggcaaaacactcaccaaaggaagtgaaggccacattcactgtgttctctggctccagtccctttcctttctctccaacaccaaatccactacctctcaggccatgcttagtttggctactgagactgatatttttcaaaagtggtttgatgggaagattacaaaggagagaaaaaaactaccagaaaagaaaagagcaagttccatgatcctttctttgcatcaccacacttgtccaactgtaaagtagctctcaaatattaggggtctcaaggataggcagtgcggtgctaaacattcccagagctttacatcagtccacttgatctcttaccagaaactgatctacattttttctctctaatcccaacctgcctttccctcacctctgatacccccaccaaaatccacatccccagaggaacactaatgagcccttcttaccaaaaaagcaaaagtagacacacagcgagaatgaattcaggagtcagtgacagcaggtacctaaatggtcagtgaacacgatcagaatttgttttctcgtgactccccaccatctgtcacccacaaatctccacttccaggcaggacgccaaagtgaagaagtgatggggatattgaagcagaaacaatgagcatgtaggaaactgcttgtgacagggatgtgttaacatccttcggcctggtctctaggcctctgtccaggtttacttgcataggtgaaggcacacaaggcttaattctacaccaactctcaaaagtcagcctgcaatctacgccaaacactaacttaaggacctcagacaaaggacaaactctataaaagtgagcccttttcagaccaaatgtttcttggcatcactctaagcccatgcatcctcctcccagggagcatgccagccagaaacctgtcactggaagccaccttacccgctctggggttggactggggcaagtcgctatctcttcttctttccaagtaggcactgtaatttcttccagtccctggggcacctgaatcttcagctgaaattggggcagatgctgctaacagctgtggaaaggctgatctaagcctagaagagggtcatttgactggctttagttccctccttagcagatctgcccggcatcctccagatctctcttcctcactatcccactctactagaaagatccctttcccctctggccggccagatacagtcgggcctctatcccacgctccaggcttctttattcgcggctaagaaattttcctccaacttgtgactctgcttctccagggcctgcacaacacctacttctggctgccccgcccccaaatccccctcccctagggctgccactggaccctagggccccggtccgccccagctcctttttttcctctccgcctcggaccttactccattccatctcctcttttcaaccctggagccagtacccccttcgcccctactacaggctagggcccccgcaatcctccccaactctggcttccccgcccgactactccaaccccacaacaaactttccgccgctgccagctgcgttcaggccgccatcttgccgcggggcaggccgggtagtggccagggccgcgggaatccccacgcacttggcgtgtcgcgtcatctgaggcggggccatgggggcggggcctcgggttggggaggtgggacactaggtaggtgatggtgaaaaatggggctctcctgaaagcagggattggaggactggccacagaaggaaggaggtgtcaggagcagggcaatagcgggaagcggggaaagaatccagtactgaaagaaaaaaaaaaaaaaaaagaataggggaacacatctcaaagatacagtgggagagagaatcgtgctactggttccccgtcatccagagaataaaaccagcttttcagtttggcattcaaagatccgcatgatccaggctcttccaccttcatcagcctcattttttgcctctcctgggaacttcaggttcccaaattgtcctttgttttcaggacatcgggccttaagatgtctaatctctctcctcctcctttgcatcatcaattcctcctattccttcaaaccatcagctaaaatgtcacctcccccagaaagatttccctttagtgctccttttgctgggcatcactagcaacttgtacatagctttactgtagctgtcccgtgcagtgtaattatttatttacatgttataccacttttgccctgctgcttcttcagggcaaaaactatgtttgattgcatcttcatactccctagcaggtgcttggcacacaataattgcctaatgaataaatggcatgttttcctccaatgcattaagcatatttctgcctcagggtctctaaatttgctattccccatacctggaatgttcttcctccaaatattgactctcatttgtgtctttgctcaagtgtcatcactttagagaagccttccttggccactcaatctaaatcagcatccctattctcctttaccctgctttaatgttttcattcatagtacttatcattatctgacattatattaaatatttattgtttattgatcatctccccactacaaagcaaactccagaggtctgggatgttttcttgctcatcacagtatccccagtgtctaaaacaatgcctggcatagtaggtattcaatagattttttttattctgtttgtttaattaattaattaatttttgagacagggtctcactctgttgcccaggctggagtgtagtggtgcgatctcggctcactgcaacctccgcctcccgggttcaagtgattctcccacctcagtttcctgtgtagctgggattacaggcgcatgccagctaattttttgtatttttagtagagatgggagttccaccattccaccatgttggccaggctggtctcgaactcctgacctcaagtgatccacctgcctcagcctcccaaagtgctgagattacaggtgtgagccactgcaccggccagtaaatatttattgaatgaataaatggtatggaggttggtgattgacagattttggaatatactggtggagaagaggggttgaaaatactataaaataagaaaatgcatagatggaagttacatgacctcaaggccccacttagcactaacaggaatggtagcaaagacaagccccagactcagcaaaggagagagtgagatgaggatcaggtggaattctgcagctgggtcctcagggagcacagccatcctaggaaagccccagggcaccgagcaggccaggtagaggaaatgaggaaggctggaggccaggagtctcctcagacctaaagacatcatccaccccgagcccaggcctctcttggccagatggttccggagaagcatctgtccctccataaattatccagggccccctccagcctatcctctctggtgacagccggaacaattgtccaggaattccatctgctcccctgtccctctcccctccgcagctcatcaacatttcagagcagcaaggtatcccatttccctgggcctagagatggagctggtctgccccttggtgaagctgatctcatgtacccaccccccatcaacgcacacacacaaaaacctca

SEQ ID NO: 585936 - DNA, 4001 bp, Homo sapiens
ggcacagtggctcatacctgtaatcccaacactttgggaggccaaggcgggcagatcacctgaggtcgggagttcgagaccagcctgactaacatggagaaaccccgtctctactaaaaatacaaaatgagccgggcgtggtggcgcatgcctgtaatcccagctactcgggaggctgaggtaagagaatcgcttaaacctgggaggcggaggttgcagaaagccgagatcgtgccattgcactccagcctgggcaacaagagcgaaactctgtctcaaaaaaaacccaaaaaaacaaacagatatttctggtcaacatggatatcccccaccaactttggtctcttaatctatcaacctccgagaaatcatcatcccgctcaggagtgctatcctcctcgctccgggcccataacacaccctctcccatttacaagctcccacccagtgctggtaggctgctgccttctctcacccagcccaaggggaacagaatccacttaggcagccttctgttctcaagctccccctgtccagcctccctagcaccacactgcctccggaagccgaagccacagtctatctagagtgacctgtgtggaacaccaggaaacaacaggcaatcaactttctcatgatctccagacccgcctctccttcccaagcctggagggagaagggactgcgtgggagcttctccaagccaggctgcacgcacccatctcccagtctgaggccaggactttttctgagcccagtgtggaatccgaagccaggtcctgcccccactctactgaggcacccttcccagcttttcatggctaaagtccaccagaaactccggatgtgaaaagaggtgggggggacaaacttcacctcccagagcaacggtcaccaatgggagtgacatctcacatgggtccctggtttggggccccagcattcagtttaagtagcttcacttttctgcccagggaattccccagaaccaggtcaaggttttcctctacctccccaatcctaaagagaaccttgcagctgatcctaacttcttatcctagggtgagagtaacagggacactatccaaccttcccttcttgataaagggaggaaatgatctgatctaggagaaaagtcccttcccactctagttcatctgtctctgaggcatgagaagcagcagcagcatggtaattgagggatcttctcaaactctgtgctaaaagcacagattcaacagaaactcgaaccaattctgtatgaagggagaagtgaagagcacgctgctgactcggggaagggtgacggtggggggtggtcagtggagcccagcagcaggctggtgatgggcaggtggccgtgaagggggcacatccccacccacagcaaagggagactgggaaaatagagggacgcagtagtaagaacaagagagcagaggagatggcgtgatataagctaaggagggaggcagccaggctgcggggaaggatggaggacagaggccctgctggtggcaccccagggcaggttagctggctgaggtcagactcacagggttagtgtcttctccccaaccagccagctctcctggttagtgcagttagcgacagactcatggcagatgccctccaggcactccatataaacagacagcttggtttgtgagcagcccaactccggagctgcagagagaaagcagaggaatggcaagctgcaggatgcccaaggggacacactgcacactgcactctcctgatgggaagcatcgcagacttaccaccagaccctcaggggctttctcccatccggaaaccatgccagatggaagccaagcactccccctgccaaccagggaggccagcttgctgacctcaggcaaaaagcctctctggttggtcaacagaaagagaggacggctgttggagaaggggctcagctcctctatctcgcctgttccccaaacactgctgccaggctgcaccaggactctgaaagctaggctgtaagaacaaagccacccacagctgcagctgcaacccatcccgcaccagtgccagcagagtccatcccaccacctcccacaggctctgaggggctgggagagaagcagcccaaggattagaggctatgacaagggctgcgtcggaaagcacagtacaatggggcagtgtgtgcctggcctacagctgggccagtcaacagcacgggctgcacactgccgcctggccaggggtggcacttcccagggaaccagccccagaggagcaacagggactattctcccctctcagaacaagcaacacgagcaacagagcaagaagctctcccatcaacggcagaaacaactcttccatgaagcctccagaccaccctgggggaagtgacacctctagctcacagactgcaaggcaaatgaggcaaaagcagtggcattccagagaccccacaagatgtgtcccctggggcgggaggacaggactgcaacacatatatccacacccactgatgcttagcagagggtaagatgttggcagggaaaagacaagagaggggtcctctctcctgttctaggaagccctgcaggctctctgatgactcagggcaaaaagggaagagtcaccaccctggccacagaggtgggcctggccttttcccaagcctaggatcaagattcacgcagacaggaaacacttccaataattgcctacacactgggctccccatgttgctctgactacagcccaagagctcaaataggccaaggcctgactatgaagatgagacaactgtctagaaaaaaaagacaacaactcttccgacaggccctgacccctgctctagactgagcacagccactgacaggtgaccttcagaatcctcacccacaagaaaacaaaaacaccaactgggtctggtgtgcttttaaaagagcagcaagtgacatggctaattcaaggtttcagaaatcagggactctcactgcactaatataggatttgagaaatcagataatttttctcttttccaaggcaaaaatgaaatgagtgaaggggagagacacaggtgagatgggagtgccaatgcccacatcgctgttatatccatcctgattcccactcaaggacactcctgccaatttcatctcagaataaaaaaatgtccctcagagacagccagggtgcctgctgtggcaagaccctctagtaaaacttctccatccctcccagggagccagccccagaggaactcactcgactgggaaggaggctgtaaccaggctcctcagcggctccaacagggaccattccactccttggtcacttaagtcaacaaagaaagctgaagaagagtctgtattaatattgagttttggtgaggaatgtctagacgtataaaaaaagctattagaggccaggtgcagtggctcatgcctgtaatcccagcactttgggaagctgaggcaggcggatcacctgaggtcaggaattcaagaccagcctggccaacatggtgaaacccccgtctctactaaaaatacaaaaaattagctgggcgtgttggctggcgcctataatcccagctactcgggaggctgaggcaggagaatcgcttgaacctgggaggtggaggttgcagtgagccgagatggcaccattgcactccagcctgggtgacaagagcgaaactccatctcaaaaaaaaaaaaaaaactactagaagggtacaagataaatggcgaacagtggttccctatctttggggaaacaagttaggcaggaacaatgggagaagaaagggaggatcttcttactttttattttgtatacttttctgtatggttagcattttacacaagggatgtatgtttatggtgaaaccaacagttcctaggcaaacagacaaaaaccctgcatctacactgtgctttatcatcccagaagctctttcccttccatgatatttcctttgatgcttatggtccagtgaggcacaaaga

SEQ ID NO: 585937 - DNA, 4001 bp, Homo sapiens
agggagcgcatgtgcaaggccctaatggcacaagaaagcatgttctcaaaatgaaaagtgcaaggggcttgtgaaaagagagggtgctggtgagaaagacagggctgtacacccacataagccccgtaaagggagtctggttccgtcctaagggcaatgaaggatcactgaagggagcctcacaatcagatttaaattccagcaagcacttcccagttgcagtagtgaagatgggttgtgaagtgaggcagggagataaatcgggaagctgttgcagtaaagtaagcaagagcttagttgataacggtaggcttatctagagaaatggcaatgagaatggagagaaggtggacagatttcagaagttcaggaggtagaatcagaattgaatttgaggcgggaagggaaagtcaggggtgaatcagagatgactcacccctaggtatctggcttagaccattaggagaagtagggagtcggggagcctcatgctattccctgagacagagaacatgggaacagcagcaggtgtgtggcggtgggaagagggaggtggctaggaatgatgggacctgtttagaatgtattcagtctgagacgcccaacacacagtccggaaaacacccttacatacagatctgaagcttatgagagttctttcattatcaggtgtaacttctagacctaattttctcctaaagctaagtagctgttgtgaaagattaattccactccatcctgagccccccagctcttcctgcgatcttctcttgaggacccatacccttttacttggttgggattctctcaactctcagccagccaagctccttgagggcaaaccaaggttcagtttatctttgtcctcctcacagcaccaagaaccctgccatgcacaaggcaggtacttaaaatacttgttaaatgaataaatgagtgagtgaaccaaaggaacagcttctgcctgaagacattctgtaactgacctacccaatacagctttattgccaggaaacaggtagccccttaatctccttagcgaactgactgttgttctaaagaggcaaaataaatctactcccaatgcttgcaagaagattctgttctcacagagaatattcagacaaaagaatcacctattccatgacggagccatgtggccaggccagaagcacacattaaagccagaggctgtgttaacatggaagggataaggtgggagaggatgtgcacagcacatcacacgctctcatcacaaatgtgatgctcaagccttggaaggactaaaacgcatcttggatgcaatgcagcaaaacgatttaccataccaggtacaaaacaaggtgacaggggacagcctcgctgcccgccccaaatcctccaaaattcggagaattaagagattttcggtgaactgttacataaaaagcattttcacatgctaaagatataacaattacctacccttgagctcttggagggcacaaaaggcacattttcgagtggggtctgggtggtgctgagaaggttaaaatcctgccaagcattttgcaatggtccatgagcccaccccaccaccccagatccaggaaggtaggaggcaggataggtgggatatttagggataccagaaggcagaaactcgggaggaggagaaaaatgataccgcggaggtaagaccgatgccctgcaaaatcccctcaaggtcctctgcatcatcgtttgctgtacaggtttggcgcgggggaggggatgcccgctaagcaacgccccttatatttctgcagttttgtaagaaaattcagagcaggaaggtctccattgcgggatgcacagctcacctgcagccccgagccttcactgcagctgaaaagacagaagtctggggccagctgccgccaagcgcggtacctggagtccggaagcagtctccgcaccagcgctgtcccactcggcgcccagccgtctcgcgctgagcaaaggccgctccctcctggaaacgccctccctgccgcgcgcatgcgctgtgtcccttctcgccttgcaggactccacccggtccatgccctccggctgaatccgggcggcctgtaggccaggcagccaggaggccctgtgctgcaacatcccggcggcagccggacccgttgctccgtctatcctgccttcggccctgtcctggagccagggctggggtttgctgcctcccgcctgacggagcaggactggcaggaagcgtgtttgcaagaagccaaaattacagaaggcgaagatttttaaattaactccattcatctttcaagggacatttccagaacctccaaaaggcaacccgaggtcttctacacaccctccagcagactgtccccactgtcagtggagggagctaaggttcagtgaggtcaagtgacttagttgtcccaggtcaaaatccaagtttgcctggtgtcaaagcccaagcacccttcattacactatgggatcatctagatgtggttgggagacgaggatcctagttttaaacttcaggcccaggatttgctgggtttagatatctactgggaaaggtatagaattccagagttggaaagcacttaaaaccttgcctaatgcaaggcaatccgctcaatcccaggaacgaaacttaaactgaccttattttttttttaaatacaggatctcagtcggtcgcccaggctggagtgcagtggcaccatcccgtctcactgcaacctctgcctcctgcctcctgggttcaagcgattctccagcctcaacctcccaagtagctgggattacaggtgtgtgccacctcacccgactattttttttttgtagagacggggtttcactgtgttgcccaggatggtcttgaattcctgagctcaaagcaatcctcccgcctctgcctcccaaagtgctgggattacagtttaaattgactttaaattatgcctccctgtagcaacttatcatctcaatcttctgccttcttgattgaatacagaactccgaccctcttccttatgtaacagccctttggagatttgaagaaggttgtcatagtgaagtagctctagaggttctgtgtcactgagaattacagcggaattcctcagaataaaaaaggaaactcaaaaattaaatcttgtgaagtttgtttgctacatctattctttgtgcataaaagtgcttcagggaagtaatataactacatctaacttatgaaagtctaagttggtcctggggaattaataaaattcctgaagattcacagaagagttgatggcaaggcactggaatgtggcgtggagaaagtgatagcctgaaatttggttctgagttctctcagccctcctttccatccccttctatgcccatccttaccccagcctcctcaccttctctcctcacactctcagaacacttaccctatttggaataaaactaaaatcctcttggaatacttcattatcttcatctgatgtgacctgggtaaataactcccctctggacctcagtgcctggatttaagatatggacaagactagatgctctgagatcccttacaccctatcaccaacatactcgaagctggaaacagcctcatgatattcctactcaaggcgtatcacctaaaactaaagaaaaactctttgaatattatgggaattccatacccttgaatatgtgggaacaggatggttcttaggcaaagggaccactgccctctcaactcataggcaccagctgctgccttctccagctaatggaaaggctgcagcccaaggtaaggatgcaggaaagcctattcccctcaactgttttgtaaagctttctatgcatgatccacagcagagactcttaactttcaatgtgtcaccaacctctttggcagtctggagaaatgcacaaaataaaatacacaggattgcaaaggaagccaattttattgaaatgcaatttcattgaaatcaaattcttaaacatttaaatctgtc

SEQ ID NO: 585938 - DNA, 4001 bp, Homo sapiens
actcacatttcactggaacaacgtgaagatgttaagaggctaagtaacaacaaaaccctacctgtttttacatagccaacgatcccaccagaaacaaccagtgctgtgtagccaaagccaaaccaatgcaaaggcactctgaaaacacaagagaagtcagtgagaagtcagtgctaacctggatttaaaaacaaaccatattgtcataggatggggctaaaaggtaatcattccccacaggtcctatgtgcccacaggtactatcactgaaaataagcaccacagaggttggatgactttctgagagtcacacaactaagcaaagctagagctgggactcaaacccaagtttctggcccacaggtccagtgatcctcccatcccgcacgccatcccaggcagtctactcttagggttcttttcagctgaggaaaggaactctggtttccagaagctcctggctactctctaaccatttactgtctactcacaatgggaagaggggcttctccattcttctcttctcagtccagaaaggagactaccccaggcctgcatctggggaaaacaagccggatcagcagtggttaaaagcacagctccccagcagtcagaaagaagtgtgtccaacctgcaggctatgcaacctaagtctcagtatccttcactgtaccatgaggataacactggtaccaatttcctgggggtgttgtgagcattcaatggatgtcacatgtaaaggtgcttagcacctagtaaaccctgaacagatgccgatcatttcacataggtccacaggaaactcagcaagatccactgaccagctctataatcagggaatgtgttagtcatttcattaagcactcacattatcactaaatcggaaagcaaatactcccgtgcccttaatccaactactttaatgtctcttttgaggggtggtagggatgttgcttttcttcactgatgcaacagccaatttcaatactcaatttttttttttagaaacttctgcatccaactcacagttctcgttaggagggcagaaggggagggtaaaatacacggaaactcaagtcagaatcacatgtgacattgcacccttggaaaaacagctcctattttcttacagaaaagtattctgtatgcagtgaacctaacaagatggaaagcaatgcatacgccgtttattctgtttaaagaattaggccaggcaaagtggctcacgcctgtaatcccagtactttgggaggcccaggcaggcggattacctgaggttaggagttcgagaacagcttggtcaacatggtgaaacccatattctattaaaacacacacacacacacacaaatcgggcatgatggcatgcacctgtaatcccagctacttgggaggctgaggtgggaggatggcttgagcccaggaggcagaggctgcaataagacatattcaggctactgcactccaggctgggcgacacagcgagaacccctccccaccccccaaaaaaagaaagaattaatttcccataaaacggggaagggcagcgggcttgggatcttgcccacagttcttaactcgaggcggcactgagtaagggaggcttttaaagagctggagcaacaaaaccaccaggaaacgaggcaacactatgctacaagggtaagcctttgcctcaggagctcaggtgctccgagcatccacagcctcttttaagacaagcagaaaatacccaaggagaaaagcaccgaccacacggcataaaggcccgctgaatcggggggacgaaaagcagacggccgtgaaactcctaaataatccctaaaagttaaaagtggcagaaaataaaaacaatactctccaaagacctgcaccgacctgccgaaggcccgcggagtccactacggagcgcaagccgcgggacacagcagccaggtctctccggaaacgcgattgcgtgcgcgctgcgccccggggccgcggcagggcggggagaaaggcgggacgtcgtggcgcgtgcgcagtgtccttggagagaggtgagcggagaatggggacagtgggggcggggcttgagccgcggattaccagcacgcgccctgcatcccgggggcggggagtgaggcggggcatcgcggctagcgccgttggcggggaaccgggcggggaatctctgtgcttcctcagtccccaggcccagcacctgcagggccgaccagctccagtcccaggtccaatcctgagtggccaaaagccggaaacccggagttggaattggatcttgcacaagctggaccacgtaagctgggccaggccagaggtggaggccaccgctgcgggaggagggcatctgatgattttgaaggaccccattaatagagggtataaaccaggtgcgggccatcagggaggattgtcactctggcccgatcttgtttgtttacaccaggaagggcctgccttccacctgcaagaaaatatggcagctgcagaataatgtggcgcaatgccaaatatccgtttgttttagggagtgaggctacttgagaagcatcttaaatggggagagagagcaagttaaatctgatttccacgcagctctgtggattccgaatgtccacagtatgatgttatctccattcccacttccgagccgctcctcttctgtgtttcctgcaccaccattcgctcagttgctctacactaaaatttgctgtcatcgttgacttctccctctccttcatcccctacaagtatcaacatagacaactccgatcaatataatcatcagtgaataaagcaaattgcagcgcatattcttaaagacaaactttccacttgcagcagcacctaccttccagatagctaaattgaagcccgtgtttatcatagctgcttctaaccagccagagctgataataactaagaacttgcaggaattgcagtatgccagaccttcaatttaattgaagactttcctgaacaattaatgagacttgtcttaaccagcagggaatggctttagggactcattcttccctatgcaggtgcaagcctcaaaccttaattaggatcatccaccatgatcctcgagcccttccccaccttatacttgaagaggctgaacctcagagaattaaattacctacagtcctggtcactggtagagctattatttaaagtaaggtctaatgtcaaagcctgcgtccttaattctaccatatgctgcttcttgcagtgtcgttcctcaaccagaacacatagctcttctgtgtaggtaaagtccatcaaaacatgtcataaaataaattaaagaaattggtttctgctctatttcaattagtaccagagtaaaacaatcaatgatttgtgtttgggaatatttctagttggcattaacgttgttaggagatagcttagctcttcactgggggcccactgaattatcggaaccctggaacacaaatgtgtcaaaagggtgtaatcaaaattatgtcagggaatgttaagtttctagtctttggtcactgaggcctatcagtaggtttgggtgttttgttttgtttttcccacaaagaggctttgagtaagaattgtgtctggtagacaaacacaggtacacacacaggtgtgtactcacacagcaagagcagtagagatcatctcccacaacacaagagctcatgaagaaagggaattgagcttcaatgtaagcattagtttagcatttttggagcctgaatgtgttgactttacaaattaagaagtccctgaacaaaaacgtcaaaaacaaatcccaagttgcagtctgcccaggtaattcatgtctatcaagtgtctacaataccaatttctacatctttgggagtattttataggtttgtttgaagagcaaggtcaataactctttccccaagaaataaatgaaatcataaaaaaaaaaccgcctattttcttaacctaacctatctgccatctacttctggatcatattcattgga

SEQ ID NO: 585939 - DNA, 4001 bp, Homo sapiens
acaaaccatactgtcataggatgggactaaaaggtaatcattccccacaggtcctatcactgaaaataaggaccacagaggttggatgactttctgagagtcacacaactcagcaaagccagagctgggactcaaacccaagtttctggcccacaggtccagtgatcctcccatcccccatgccatcccaggcagtctactcttaaggttcttttcagctaaggaaaggaactctggtttccagaagctcctggctactccatacccatttactgcactcacactgagccagtgtcctgcatttttctcttctctgtccagacaggagactaccccaggcctgcacctgcagaaaacaagctggatcagaggtagttaaaagcacagctctccagcagtcagaaagaagtgtgtccaacctgcaagctacgcaacctaagtctcagtattcttcactgtaccatgaggataacactggtaccgatttcctggggctgtagtgagcattcaatggatgtcacatgtaaaggtgcttagcacctagtaaaccctgaacagatgctgaccattgtcatgaaaacctcagttttaatcacataggcccacgggaaactcagcaagatccactgaccagctctaaaatcagggaatgtgttagtcatttcatcagctacccatgttatcactaaattcaaaagcaaatactcccgtgcccttaatccaactactttaatgtctcttttgaggggaggtaggggtgttgcttttcatccctgctgcaacagccaatttcaaagctcaacttttttagaaacttctgcgtccaactcacagttcttgttaggagggcagtagtaggagaggataaaatatacggaaacagtggtcatattcacatgtgacactacacccttggaaaaacagcttctattttcttacagaaagtatcctgtgtccagtgagccaaaagatgaaagcaatgcataccccgtttattctgtttaaagaattaggccaagcgcagtggctgacgcctgtcatcccagtactttaggaggccgaggcgggcggatcacctggggttaggagttcaagaccagcctggccaacatagtgaaacccattgtctactaaaaaatataaaaaaattaatcgcgcatggtgatatgcgactgtaaatcccagctacttgggaggctgaagtgggaggatggcttgagcccaggaggcagaggctgcaatgagacatattcaggcaactgcactcaagcatgggcgacagagcaagtccctccctcaaggacaaaaaaaaaaaaaaaaagaattaagtttccataaaacagggaagggcagcgggcttgggatcttgcccacagttcttaactcgagacggcaccgagtaagggaggcttttaaagagatggagcaagaaaatcaccaagaaacgaggcaacactatgctacatgggtaagcctttgcctcaggagcccaggggctccgcgcatccacaacttcttttaaaagcagaaaatacccaacgagaaaagcaccgaccacacggcctgaaggcccgctgaatcggggggacgaaaagcagacggccgtgaaactcctaaataatccctaaaagttaaaagtggcagaaaataagaataatccccaaatactcgcaccggtctcacgaaggccccggctgtctacaagggcgcgcaagccgcaggaatgactgcgaggtgtcgccggaaatgcagcggcgggcgctctccgtcccggtggcggggcgaggagaggggagcggctctgttgtgcctgcgcagtgtaccgggagaggggcggtcagagaatggggacggtgcgggcggggcttgagccgccaagtagcagcatgcgccctgcattcagcgggtggagagtggggcggggcatcgcggcgagctcctgagtccagggaacgcggcggggaatctctgtgcttcccctgtccgcagcgcctgcagggccgaccagtatcagtcccaggtccaatcctgagtggccaaaagcaggagacccggagttggacctgggacttgcacaagccggaccacgtgagctcggccacgccagaggtgaggccaccgctgcgggaccagggaatctgaggctggattttgaaggaccccattaatagaggaacaagttacagggtataaaccagatgcaggccatcagggaggagtgtcactcaagcccgatcttgtctacaccaggaagggcctgcctggaagaaaatacgggggctgcagaataatgtggctcaaagccaaatatccgtttgttttagggagtgaggctgcttgagaagcatcttaaagggggatggggagtaagttaaacctgatttttacccagctctgtggacccaaaatatccacagcatattatctccattcccacttggagtcactcctattccgtttcctgcaccaccattctcttagttgctctacactaaaatttgctgtcatcgttgacttctccctctccatcccctacaagtatcaacatacacaaatctgaccaatataattgtcagtgaataaagcgaattccagccaagttttttttttttttatgtggagtctcactctattgcccaggctggagtgcagcgtatgatcttgtctcaccactacctctgactcccatgttcaactgattctcctgcctcagctgcctgagtagctgggattataggcctgtaccaccacccctggctgccaggctaatttttgttatttttagtggagatagtgagagatcacaacgtgccagtgtgttcaaaattgatggcttcttggtctgacttgagaaagctgcagaccctcgcgatgagtgttagttcttaaaagcagtgtctctagagtttttcttccgatgtttagaagtattcagggagtttttctgctggtgggtttgctgtctcactggctcaacgagcaaagctacagacctctgtggtggatgttaaagctcttaaggcagtgtgtctggaattgtttgttcttcccggtgggatcgtggtctccctagctttggactggctcaaggagcaaagctacagacttctataacgaatgttaaagctcttaaggcagtgcgtctggaatatgtttgttctttccggtgggatcgtggtcttcgtagctttgggagcaaaactgcaaatcttcgcagtgagcgttaccacttgtaaagacaacacaggacctaagcaccgagcaacagcaatatttgttgcaaaaagaaaaagagaaagaacaaagcctcctccacatagaagaaaacccaagtgcgttacaactactggcttgggcagcctgcttttattctcttatctggccccacccacatcctgctgattggtagagccgagtggtctgttttgacagggtgctgattggtgcgtttacaatccctgagctagatacaaaagttctccacgtccccaccagattagctatagagtgtccacacaaaggttctccaaggtcctgccagagtagctagatacagagtgtggattggtgcattcacaaaccctgagctagacacacggtgctgactggtgtgtttacaaaccttgagctagatacagagtgccgattggtgtatttacaatccctaagctagacataaaggttctccacggtccccaccagagtagctagatacagtgtccattggtgcattcacaaaccctgagccagacacagggggctgattggtgtgtttacaaaccttgagctagatatagagtgccaattggtgtatttacaatccctgagctaaacataaaggttctccacctccccaccagacttaacccagctggcttcacccagtggatcccacaccagggctgcaggtggagctgccttccagtcctgcgccctgcgcccacacttctcagctcttgggtggttgatgggactgggccctgtggagcagggggtggtgc

SEQ ID NO: 585940 - DNA, 4001 bp, Homo sapiens
taggatggtacccagagagcatccgaagacaaacacaaaaatggcaatgaaacagaagatgtggacagggaagacaggggaggacagacagacaggcatcagcgaaggaaggtccccagcccagaccccttccaggtcctctagaaaagggggagggacccactgacatcacttccccacttaacaagtggggccctcacttccagatttttttcagtcctaggttctagaggagctactcccctctgacccatccacctccctaaccctcacaattagcctaacacgtcctttggataagggcctccagagaaccccaggcccagtctcattccccatgttctggaccctggttcccctgtgagtctccctcctgcaccctgacatccttccctttgtcctaggatgggagggagggggctggggtccctgagcggcaggcagtccaggaggaggtatccagaagggcagaggcatgtggctgaggagaggacaggcataggggatgtgggactggggtagcgaggacaacgtttgaagcccagcaatttatcaagagaaaattatttttggtactctcctggagcctgtctgttaaagctcctggcacattctgtcccagggttggcccaggagttgtttacatgtctggctccccactacactgggtactcctgagggcccatgcttcattctctttgcatcctaggtgcctaccatggtgctggcccccagcagccacatcctaattgagtgttgagtttaatttcttgtagtggcctctgttttcccacccctcctctgtgctgtctagctttaggaacccatcccccaccacacacacacacacacacacacacacaacctcctgctgggatcctgacttaccccctcaattcctcaggcctgacctagaggccagccaggaaagagaggaaaagagtggaaaagaagggtacagtaataggcatcggtccctggatctagaagtatggatagttaggcgagctaggaaatagcacacagtacatgtggacaaggagattagggtacatgtgcctttcggggagccttgtccttaggaggtatgaacatacgggccccttcgtgtgcctacctggttatgtgcttgtccccatgtgggtacctctgaaaggggctttacctgcaggcccatccccgcttgtgtgcctctgccctagtacagggtgcatgcgtgtgcacaagtgtgcatgggaggctggagtgggggtgctcctggtactttcctccgtctctttgtcttcaggttcagaggactgagtactagggaccccaactagggatatgaggaagcagcaggagcctcgtgagagagaggtgcacacccccccccacacacacacacacacactcccaatgaccacaggcgggaccccccgtacacatctgacctccttagggtcccagatcaggtaccaccaccacttccccatggtaccctcctcgttctgtagcccgtacaagccgcccttcctggccttcaaggtagcatcctcctctgtgagacaggatccccgccaccgtccccaccccggtagagcatagcccccactctcataagcccaggatccgcgaggctccgcccctaggcccctccccctgcccgggacccctgagccccgcccccggcgcggccccttccccggcaccgcggacagctccggccgccgggtgggggcggcggcgcggactgcggctgcagcggccggctcggggtgcggggcgccggccgcgctgcggcggaaccagcgggggacgcgtgcgatgggggatggggggccaggctgcggccgcgcccggggaaggggcgccctagactctcacctcctctcgggcggggccctcgtccgccgccgccgctgccgccgccgccgtgagctcctccgagaccccggggccgccaccgccgccgccgccgccggcggcgctctctcccgcggccgagccagggggggacatggcgtagagggggcgcgtcgagctcaggacctcccggggggctgccaggggccgggggcatcctgcgcgggccctggggagaggacgggagggggcggggccctcgctgctccccaccccccgccgggggagggggcccggaaagggcaccgggagtaaggggctgggggctgagggtgggaggcaggctggggggccgggccggggggggccggggccgggggcgggtgtcaccttgaggccctcgcggcgccgctccgcctcccgcccgctcccgccgccgccttttgtctgagccgagctggagccagcgcgccccccctttcctgccagcgcagccgagccccgcccccagccccccaaactccgccttcccaagcctacctaataaccaccccccgaaggggtaaagcaacagggactccccacacctcttccccgctcccagccctgctcactgcacctccctcccgcgctcctatcctgggagaatctgtgccgcaacccctctccatctgttctccgtggactcggtgcccgaggttcaaccaacagcacccccccacacacacacacatctctggttcccccaagttcccagggcagaggagtggggagaggaaattgattcttggaaccctagggaagatccttactcccagtttcgtggtgaagggttaaggcagaagctagacttccagaggaatggaatagggggaaagggaagagattgaagctagatgtgggaaaggactaacagagggcagaggggagggcattggaaccggccttcactgaaccatctttcttccctaaaagaacagctccagagaagcagtgaagtgtgtgcaataccctaggctggagggcaggaaacctgagttctaattctgaattctgtatctgtcattaaggagttatgtgaccttgggcaagtgccttcctgtctctgagccttaatttcttcatctgtgcagtgaggaagttgactggacaatttctaaggctctgacttgtaggtgtaggaagcaagccaggctgagccactgcaggcagcctatcctttcaggccatccaccccacactgcttttccctgtatcccctggcacagcaggaaggaccctgacatttattcattcattcatttctggatgtctccattcagtaaacaggtgttgggtacctattgtgtgcccagtacagaaatgaaacacagtttccttcctgcaaggagcacaaagtctaatggggagaaaagaacatgaaaaacaaccattatgaagaatataataaaagccatgcatgatcaatcttgtgcatacacagtcactgtggaatcctactatgtgtcattagagtctttgacatacagtaactgttctccccaattactcacagggaaccaaggcagagggagagtgaatggcttactcaaggtcacctgctagcactcacagagctagtcctagaattcagatctttcccactcaaaatctatggggaatatttgtgggtaggaagttagtttggggcaaagcctcgatgtctgattttgggggatagggtacaaacacactgatctgcccaggatgttccttccccttgttggggacaggagagccactgctcccacccctctagtcccactcctggccctgccttcattttactactcttccctttccaggtgaggtgaaggtggctctctgtccacctattgcttagagctatccagcctgcatggtcctctccaggttgatgggtccattctccctgcccagaggaaggcggctgtccagaagaggcgggggtctggttcactcccttggcagaggcagaatctcacttggtggttcattccagcatctcctgcccatgctttttgggaagctggcctcacagctaactccagcccctcttgttccagtttcaaccccttcccccacagagagcagagcccctaaccttggcctttccaaacccacagaggatcctttcg

SEQ ID NO: 585941 - DNA, 4001 bp, Homo sapiens
ctattgctcttccttagtggcaaacttcattgctgttttaagaaaactgccatcatcccaatctccagcaatcatcaccttgatcagtcagcagtcatcaacacaaagacaagaccctctaccagaaaaaagataacgtccttgctgaaggctcagatgatcgttagcaatttttcagcaataaagtatttttaaattaacgtctgtacttttttttcagacataatgctatttcacatttaaagactacaggtaaaatgtaacttttacatgcactaggaaaacaaaaaattcatttggctcactttattgcaatatttgctttattgtggtgttctggaaccaaacctgcaatctttccaaggtatgcctgcacaaatatatgttaagtccctacttttcatttcacttaaacaaaaactggtacagttcaaataccaaacagtggataaatgcaagcaaaatcataagtaagataaagcagtctacctctaaattcaactgaatcatgagatggtctttatgtccatttagttttccagaattataacaatatattccttaccggcaatcatcatgtaaagtcagtctgtttcaagttaaataaccacagcttaaaagtgaggatagcatgaagcaatccagaatctactttaactgtatagtttccattcgaagaaaccagtgtccttaaagttgtcttttgtggtatataattccataaaattttcttctatgaatgtttgtattctataccatgccagactttatatatatgttatatatatgaacccaggttatatttgtaaaatactcacaacactttaaccagtttgacaaaatgcattttgaaatactaatgttctactgaaattaactgccttacacattttcaagaattaaattctgagtatttttttaagatttttttcctctgaaaagcaggcactgaggagtcaccaaatcgcaactgaatctctttctcgtaaattctacttcagagaataatttttaaattcggaactcaaagtataatgtaagcatttccacataacaaaaccagaagtttcttcacaaagcaaatctacagactgaataaaaatattgtgtgttttatcactcacttttacaaatagaaattgatgttataaggccaattactgacagccttaataaatgaagggaaatacacaaaattatcaaatgtctcagaagcagcagctggaggcctgagggaaagagacagacagacaaaaggaaatgggaggggaaggagatatatgaagctaacacgcttagaccgcactagaccttagctcagcccctgacccactataatttactcagttatctacatcgcccaaaaaattagcggttgaaaaagtaaatcgaccattgtgggcaatgattttaggttctacatttggcttgagatttgccagaaagaaaaagaactaaatcagaaaaagatgtaaatagcaagaagcgatgtgtgtagaagggggaggggaggagggtaatggaataaaagcgaaatgcgctcaagtctcagcactaaagctactccgcgcgtactacagaggccgggccgccaccgggagctctccccgtgcggggcaggagcgggggtcgctgatgctcccctggcgactcagggaagggggtggcgggagccggcgcccccgggacacgcgcagagtggctccgattaacaccttcctcgccgggacctggagctccgagcggggcgcgcacgggggtggggcggcgaggagcgtgtcccctcccgaggaaggagaagacaggagaggggcggaccgcatccccgtccccagcccaggcgcgtcaattacccgtgaggttcctcagcaccgtcccgtgggcccagaggctcaggacctgctgcaccgacaggttgatcatggagtggtcgcccccctccgccttcatcttccccgaggggcgcccgccgccctctcctcgggtgccgggcggcggcggcggctgcgaggctcggggggcggcggcgggtgcgcggctcctccaggccgccgccgctggtggaggctgcgggacgccgggccgggcgctgctgctgctgcagccggagggcctccgtgggggggccgctcagcgtgtctcccaggcagccccctccccgccggggagacattgaggacggcggacggaggaaggaggggagggggccgggcgccgtcctcgcgcggcccccgagcgaggactcggggcggaggaggccgccgccgctccctctcaggggcagcgccgcgccgcggggactggacacgcgaggaggccgaggtcacgccaggaggccggtgctgatgggcagccggcaggtgcagcccccgacagggcccagctcatcgccgccggaggacggagacgcgggaccagccagaggctgcggcggcacctgccgcccgcctgcccgccctcgggtcgccgacactcgaggaaccgccccctccacccgcagccgccggcgggccactcgtgcacgcgcacgcgcgcgcctctcagcgccggcccctcctcccctgcgctccccggagccgctgcgcatgctcactcccccgctccccgcgacccgccgccctccaacagccggtcggccccaaagccctccttctcgctctcccctcgcgctgcagcgcgcgtggctgacggcgccgagcgacggcccgcagtggggcggagggaagcgcggtctacgtcactggcgccaccgccgggccttactgctgattgggcgctccaagggaaccgcctccacgccccccacccccggaccccgggcgcgcgccctgagagaccgggagacctggatccctcgccctggcccggctgggtgcgcgcggtgcgggcggcgtgggcggtgcgggcatttcgggggcccgcgctgcaggggcagccctgacccaaggtggggctgctgaactcggtgaggtggatactgtgacagttcagatttttgccttaaaatgtaatgctttttgataaagatgcttatgtataacttttttaaaaaggtgtcactatctcagcatttagatatattaatttgcggggttttttttctgagcctgaatcgaatgacctggataggtcacttacttgcagaatgcatgttaaaacccctaaaacacaaacagacctgcgttatcattctgctaatccctcttcccgcagcaagaacttgggcctcccggggttccaggacctgcctgacattacctgtttactccaggctcggcaggtgtcctaatcctcaaggccatcgccggctctagcccccctttttttgatggtagtattcttttatctaagttgcgtctgttatttttttccctcgaacttaaactagatctctctccccacgctttgctgtctgtcttcatgtccagcgttagccagaggagcatctaaaatccaactacaagttaaactcctcgaaattggaaaccttctaactttaaaaaataaaaatttaagttttagcagtaacataaatatgcagtagccagcccctccccccaccttttttcaacccctctgccatctggataaagaaaaatttacaaagagaagtgaagaaatacctgctgtagctaaatcatgaagtatatttgacaaagcactgaagggtcaaattacctgtcaaatggtgctcttggtgaccactttaaaataatatttacatacacatttatttctttgtttatttgtattttctttttgatgtcacaacataagagaaatttttgcaccattaataggaattgagccaaaactcttaatgtagagtttatcttcctcctagaatttagacttaattagatctattaacaagattacagaatatcaaacctaaaagagcgctttaacatttttctaattttattttacagatagggaaacagattctgtgaattaagtgacttgacagagatgacagcacttcacagctcagtttctga

SEQ ID NO: 585942 - DNA, 4001 bp, Homo sapiens
acgcctgtcatctcagtactttgggaggccaaggtgggagcatcacttgagcccaggagtttgagaccagcctgggcaagacagggaaattccatctctaaacaaaatataaaaatcaggtgatggggcacaggcctgtggtcccagctactcaggaggctgaggtagaaggattgcttggttgagccagggaagtggaggatgcagtgagccaagattgcaccactgcactccagcctgggcgacagggcaagaccctgtctcaataaataaataaataggaaaaaaaaaaacagagtagggggcgggggacgggggactagcagaaaaggagattggaaataatcttatttaacaagtatgatatgaaactgtggattcttttcccataccctcaggtcttccaggaggctgcattagacagatttccaggctcgccccaaagctacatcacatgattttttacatttgtttaaaatgggctttttcactcagtaaccatgaccacggtcccgctgcgttgctgattagcccgtgggaaggcattaggttttttaacagatgtgaggataagtgtgacacgcctttttctgagcaggtacctatgatgagtacaggataggtcttagaaaaatgaccacccgttccccatagcagtgcgacaccctcgccatccttagcacagagtgagtaaatcatgattaaacctcagctttctgagaccttctggttcagacttcccatttaacagatggggaaggttgaggtgggggggtgagggagctttctaccgactcgcgatagggtcctgtcccgacaccgccaagcctttgggtaaatcggccattggcggtgaacagactttccttcccctccgaactgcagagcgcagagaggaagggggcgggggccggcgccagggtctgcagtccccaccgctctcccctaggccgctgaagagggagacagagatgaacgcaaacaagttccacacagccgctcccaggcgccgtgtccccgcatggcgccccgccgcgtcttccccgccgcgcccatccgcccccagcccttggcggcgcccccgcctccgaggcgtcctgcaaagcctagggcgctcagagctgcggccaagaccctcctcccgacgccgcagcgcgcgcggtcgcctccccagactgcgccgcgtgaggcccgagcgggggcggcgaggcgggcgcggggggagaacgacgcggggcgcagggaggagccacaacccgcagctcctttccggggaggcgggagcctcggcttgggtttcagctgaacggaaatcggcccttcgcccgggggcgccgggctgccctgaatccaggaacctgcccgccgctgccagtatccctgctccccgtccccttcctggtccctcccagatccccgccccgaccccgtccccatccgtaggctccgcgcccggccggcggaggcggccgtcggcgggaccaggccaaggccggggcgcgccggggtcccggaggggactgcggcccggaagcctccggccgccccgccgctgcccgcgccgcgcccacctgtagtagcggtcatccttgaagggcgtgaggtcctccttgagctcgcggtacgcttcccgcagccgccggcacaggtgcttgagctcgctgcagagcgggggctcaaaggcagggtactcggcgtccatgccgcgcagcctcccgggtcccggtcccgccgctccaccctttgtgtcgccgcctgcgccccctctcttctcccagcactggggatcgggctgctggcgcgctgggcgggaccgaggaggaggagcaggtgcgggggaggtggtgagggggcgcgcaggactcggacccagtgcgctcagggctccgccgcgagcacgcgaggagctggacacggcgcgggtgggggctgggggacccggccccccgccccgtgaagaggcctgagtgggggagggagccgcgcccatccgcctccgcgcccatccgccgccgccccgggagaggcagaaggcgggggaggaagtgcaacacaaggtcgtctgccgcccaggacaaaaatctcagtgccgccctcgccattggcagcgctgggaagggaagacactggaggtgggagcacgaaggaaaatggtgcttgggggcggaccgaaggccctttcctgctggggaggtcaaaggctgaagccggctaccgcgttcagcaccgcggacagctcccgcgggcgacttctggcttcttgggctccacttggccgaatgcagaaacatttaaaactaagcccattagggttatagtcataataaatattatttttaaatgaagtgtgtccaagtgaggtgcttcttcccacatgtactaaaaccaccaaaaaaagtctaggcagaggagtttctcaccttctacaagctcaacactagtgtgcaaactatagttaaccagttaacacgtcttctacggaatggcttctccaaagcgtggtgtgatctcctcttgtgaatttttccaataataggtggaaaaacagtctttccagacgatgttagtgcatttccaactgaacccagggcaggtttccacgcaaggttgatcctgcctgcactgggggaaacctcttacttttagggacaaaacctacacaattgaacctaaataattgtggaatatcgatcccaggaatctgtatttgtccaaactccacaggcaagtctaatgaccactcaggtgccagtggtctcagcattcccatgtttcctgctgtctgtgcctactctgtcactccacccactcttccttgctctgtatttttattccctccctttacattttggaacagcttttgtatgctagccaggctccctatcagggcttgcacatcttcccataactgctgatcatcttgcattgcgcacagttaggttttagccttaattcattaacatgagcatttgtgtttaatcatctcagtattttttttttttgagacggagtctcgctctgtcgcccaggtcggactgcggactgcagtggcgcaatctcggctcactgcaagctccgcttcccgggttcacgccattctcctgcctcagcctcccgagtagctgggactacaggcgcccgccaccgtgcccggctaattttttgtatttttagtagagacggggtttcaccttgttagccaggatggtctcgatctcctgacctcatgatccacccgcctcggcctcccaaagtgctgggattacaggcgtgagccaccgcgcccggcctcagtattttttttttaaagagctcaggtttggtaatattcaaaatatagtgcatcaagagccgcactaagaagaacttcagagaacacacatgcagatttgttttctgaaatgagagagactgtgagttcagcatgtgccatattttaaacattgtatcattggctacagagagcttatttttaggaggtatataggccaatctccaagatacatcaaaacacttaaaaatcctctacggagccttccttagcttctcaagcctagttttttttcctccctctttgaagtacagtagcccctcgaggataatacacatctggctccagcactgtgaggtactaatctattttgtcagctcttttactacaaatcactagaaattcgagataaaacacacacacacggccgggaacggtggctcatgcctgtaatcccagcactttgggaggccgaggcaggcaggtcacgaggtcaggagatcgagaccatcctggctaacatggtgaaatcccatctctactaaaaatacaaaaaattagccgggcgaggtggcggacgcctgtagtcccagctacttgggaggctgaggtaggagaatggtgtgaacctgggaggcagagcttgcagtgagccgagattgcgccactgcactccagcctgggcgacagagcgagactctgcctcaaaaacacacacacacacacacac

SEQ ID NO: 585943 - DNA, 4001 bp, Homo sapiens
tcatgagaagtacagcatttaaccaatcagttcagatccgttccctctatatgtcagtagttatccttttctggccaatgagctattgtcaaaattctgaagctacacaagtccaaatataacaatctaactcctgtagtattcaaaagcttcactaaaaattccactaagttaaaataacaagtacagccatccctctttacaatgatctttcctgaagaatcccttctgattacgggtgtcttcagacactacagcatttacctagacctgcctcaaaggcaacaggtgaagcctttctgtgctaactgcctggaatttacctacagggactttccatacaactctaatgaaggctttcccagcccagatacaaagctaattataaccagggttacaaattatagttacattatctcataattatgagctatctagtaggacttggttaaaaaatcattctaaacacctcagtgtgtgttttttacagtaaaaaaatcatactgttaaattgtcaaagcatttaactatagtttccacttaatggaagcattattttctgtttagaaggacttctattcttcacttgaggtgtttataaagaatgaaactacaactacatacttctgtgtaggtaaacagtgggaaaataaagtaaggtttaaaaagtttcaaaatttagtctacttttcacaaaatgataatgctttctagtatcagtagccaaataacaaattgaaggtctttttataagtgttccataattcaagaaacgacaaagtaaatagctttcacaagctctggtaatatttatgcatacagcactatagaaagtgtgcctcaaacttggtttgattgcaaaaccgagagttcaatattctttcttataaacaagaataatcatcgattcttgaaatgttttctatgcagttgtccataactacttctgaaggtattcagaagagacaaggcaagagacactttagtccaacatatttagtttttaaatacaccagactaaggtggaccggactaaggctgattccaattagtcaattacctgtatgtgctgcatctgcctttctctccgacattaccaatgcccggtactgaacaatgaattgttatttaaaaaaaacacacaaacacacacacatttttctaaatcaaacagcggtaaatacacacagagagcttgcgcctacacaatgtgaagtgttggctggaacaatttatagcaaaagaatgattaatgaagcaaatcttagaagccctcagtcctttctcttacagacaagactacagggagaagagtagtgctgaattttgcaaataattgctttgcctctccattttgcctgtgtagattctaccccatccagatactgctttacgaaaccctgaccatactttgctcaatcatgaattaacgctgtggacattacagagaatgctgactctcaggaaccgagacaaaggagggtgttgcttggagaaacccagccaggcgctccagtactccgggttcttggaggctgccccgcacggcttctctcgcgctcccgggactggggagtctggacctgatggcggacttggtttatttcccaaactttaggagagacagcgtttacctaactctggaggctgtagcggaggggaggggagggcagagggctgaagaagtgcccggtttcggctgcggtggccgcccacccacctccccactcccgtcagcaccctttccttcccctcacctgtcctgagcaccgggccctgggggtcgggtcgcctctccctgttctcagtcctggtctcactccaggagctgtcgggacgtcgggcgcctctggaggcggacgaagaaggcggcagggtcgggggcgtcagcgggaatctcggccgccgcgggcagccgcggtctccctccccatcccagggctcgggcggccaccgcgggcggatgagtcaggcgagggggcgggtggcaaggggtgcaagcggacggagggtgggggcgcccctatgcccgcgccgggggggcaccggaggcctcggggcaggggatgcgccgctgccggtgctcacagagggccgccgccatccgggcgcagagtccaggcgcgcctgccctcggagggcaccgggcgcagcaagccgggcaggggagagggagtcgccgctcaggcggcgccgccaccgcgtccaagaaagacaaaagggaccgggaacgggaggggaaaagttttctgctcggctccagatggatcccagccccaaacctcacgccataaagccccgaagaggcgggttgggggcgggggccggggcggacttccaggggcgtggctgcgcgcctgcgaccccggaccgtgccaatctcgccgccgccccaaaacctgtgggaaaccccagtcctgccacccactcctcctggaggacgcagacaggatctgctctgcaggagcccaggccggccgatccgcgtcccggccacaaagttgcacttcgagagcccaaatcacccgcagacaaaacccatctttgggaacaaagtacccgcttgcaggcgctcttcccgggctggaaggctggcgtgcggaaacggacacacccacccgtggggcccgcctctagctaccgcgggaccaccggttaccgagccagggacccggctcccccagttctccggagcggctggggagctccagccgactcgcagtattcccggagcaggcaccgcaggaccctggctccacgcccctcggacgctttctcctcagatgccgcccggcgggccggggtccccctggcgggctgcgcgggcgctgcgcgagctaaaccaaacctggccggaaaagacgcggccaaggcccgctccgtccacgcttcccgccggcccggcaaggggttccggagaacggcttgggggggcgagaaccatgggcgggggaaatggaagacagagggaactgaagcacgggggtcttcgatgagcagtgcggatgttcgactccaaacatcaaagccaacgagaggttcaggttactcctccttgaccccaaacatccagtgagtggagactggcctgttcacagagtaaaatatgtcgtctctaattcggcaaagacggtgatgactgtatatatgcaggccaattccgtaagtaaagtttcatgtaaaactaattaccggatattccaaccaccccctgtgcaggccagccgcatgcacaaggtgtgtgctatgcttgtgtcccctggatctgttttaagtgatagaaggcaagtatgatattctggtgcagtgtatttgtttatttcggcgtgtgatctgtttatctcgttttcaagaaaagtttgcttctgggggggtataaaatccgtgtttggggggtgggggagagccatgcaaaaatttccacattagaaaaaaaagtctttaaaatcagatatggcaatgagaagagactgtagaaatggatttcctgtggtataaccttcttgccttgactagaagaatttagagattgggcacttttagtggagatgtcacaatcaaaatgttttataaaaagaaagaaaagaaaactaaaggagttacggtgggggaaggatgagtcacctttataaaccatctgtggttttatttttaccccacctgcatctagtattctagcccacagccacctgctcaattctcttaggttttcttaaatgtgtttgtcaagcaccatatcaaaggagtgtgcttccattgggccctcttcctagttacctctacattttataaagaaacaccctgaagccacattgtctgtaaagctcctgagaggaaacacctcctggttcccctcactatctaaggagtgagtaataggaataggctcatagtccatagatcatttgaggtgacatcctctctaagacccatggtaaaacgtttaaaatggtcatctagccattttaagcattgagtgactgagccgtcctcaaaaagag

SEQ ID NO: 585944 - DNA, 4001 bp, Homo sapiens
cagatagaaggccacttaaaatacagcctttcatttcttcaaagtcacatacatctttattctaaaaagtcaaattactttgttgttatgccaagttcaatttgagagctacaactatgaatttctagcttagtcaactaaatgataaaattccatgtcaaaattatagatacattaatcttatcttctacaatacttctctttaatgatttcaaaaatgccaactggctaactagcaagataccagaaatataataagaacactcatataagttttttaaatagttggttgaaagggtccaaatgccttcactattttggccatatgcaacttgcattaaatgctgagtgggaaaccctctctaaggccttctggtacaaaacagttcccatgttttggaatttgcagtccgtaacaatcaaaacaacattcaggaagacacataaaagacacgagtattatgatatcccaaggagaaataattaggatcatttcaacagttcaaaagcaacattaaaaagtacaataaggctgtgtgtggtggctcatgcctgtaatcctagcactttgggaggccgaggcaggcagatcacttgaggtagggagttcaagaccagcctggccaacatggtgaaaccccctctactaaaaatacaaaaattagctgggtgtggtggcatgcatttttagtcccagctgcttaggaggctgatgcagtagaatcacttgaaccccggaggcggaagttgcagtgagtcgatatcgcaccactaccttccagcttgggcaacagagtgacactccatcttaaaaaaaataaaaaactataatgagatatctcctcacacctttcaggaaggttattaccaaaaagacaaaagataagtgctggcaaggatatggagaaaagggaacccttgtacactgtagggatgtacattagtacagccattattaaaaagtatgaaggttcctcaaacaatcaaaaacaggactaccatacgatccagcaatctctcttctgtgtatttatccgaagaaataaaatcagtatgttgaagagatatctgcaatcccattttcattgctgcattattcacaatagccaagatatatagaatcaacctaaatgtccagtgacacatgaataaagaaaatgtgataaacatgtatatatacatatatacacacacccacacaataaaacattacttagcttttaaaaagaaagcaagcctcccatttgtggcaacatgagtcaatctggaagacattatgttaagtgaaataagccagacaaaaagaaaaatactgtatgatctcacttacatggaatctaaaaacatcaagttcatagaagcagagagtagaatggtggtgaccaggggtgaagggaggaatgggagatggtcaaagggtacaaagtcttagttacgttaagatgagtaagttctagagatgtaatgtacaccaagggactacatagagttaaaaatactatgttacatatttaaaatttgctaagagtagatcttaagtgttcttaacatgtacgcatgcacacacacacacacacacacacacaaaggtaactgtgaaggaatggatgtgttaattagcttgactatagtaatcagtttactgtgtatatgtatatcaaaacatcatgttatgcaccttaaatacatacaatttcaatttaaaaaacaaacaaaaaaatctaagtaaaaccagtacctgagaataaactaacatccgcgagtcttgggacgtaaggaggtaagagaacaagaagagttcagatggagtaatgctgcccaaaatacaatcctcgggccagcaacactggtataacctgtgagcttgtcgggaatgcaaattcatggttccacttctccctactgaatcagaagcgctggaccaagcgggcccagcaaactggtttcataagtcctccaggtgattctgatgcctgctgaggtttgagagccactgagctgaaagaatttctggcacagatgcagcctctactcagatgaaacagaaggggaggggactttctaaaacaagaaagattctttttggaaggtggaaggaggtggggaaaggaatgctgttactagagaaacatgacttgaggcagcagtctccagcatgtcctctaggatcagggagactccttggtgcttgcccagtggtcacagcctggccatgaaggatggaagaagaaatgagtaggaagggaaagacaacaagcgtgggatttcagcgggccctgcactgagaaaacgtccccttgtgctctccctatacctagaattcctttaaatgggacaacgttttttgttgttcactcagtctgttcttcactcactgttacttgaagacattgctgggagctaaggacccgaggctgaagaatgtcagaatctttactccagaggagctcacaggccagaataatatatttaagatgaaagtgccaactgaagtcacatattcccggaggtccattgtttaattgcaatttcccaactccatgaagttaggcatagagaggtgacttactttggtcagaaaaatgtgagtggagagatgttcctctcttcctggtgaaaaactttaagagctagtgtgtgacatgacatgatcccttccccttgccatggtgaccaacaaccttccagatagcaatgggtcaatcaactcaagttctcaggtaaggatgatgtggaagagggactggccaaatcacaatggacatgagtaagtgagaaattcacctttgttgttttaaatactgatatttaggggttgtttttactgcacataacctattctgactgatacaagtaggtattagtattattccaatgttatatataaagaaataaaagagagattaaaacaacttactaaaatacagagaggtggtgctatagtctgaatgtgtcccctccaccaaaattcaaattcatatgttgaaagttaatgaccaatgtgataatgctaagaagtgaggcctttaggaggtgattagatcatgagggctccactttcatggagaggattaatgtccttataaaagaagcttcatatagccttcatcccttttgcctttctaccttccaccatgtgtagcaccaccttccaccatgtgtggcaccatcttggaagctgagagcagctttcaccagacactgaaactgctggccttgatcttggagtctcccagcctccagagctaagaaaaataaatttctgttgttcataaattagtctgtggtattttgttataggagcaagaacagactaagacaagtggtgtcactgagtaaatgtttttggtttaattcctgatgctctggtgtcaggagccaaaggaaattcaattacttgattccacaaagattccctcttgcagctctagttcatactttgccacattgatatgtgtttgtatcacatgactaataattgatcagaaattgcccacatctagacaaaaaataatgaatgctggagaggctgcacagaaaagggaagtcctatacactgtcagtaagaatgtaaattagtacatccactatgcgaaacagtatggacatttctcaaaaacataaaaatagaaataccatatgatccagcaatcccactactggttattgatccaaaggaaaagaaattagtatatcaaaaagatgcctgtactcccatgtttattgcagcactattcacaatagcaaagatatggaatccacctaactgtccatccacagatgaatggataaggaaaacatggtatatacacacaatggaatactatttggccacaaaaaatagtaaaaccatgtcatctgcagcaacatgaatgggactggaggtcattatgttaagcgaaataagtctggcacagaaagacaaatattgcatgctatcactcatatgtgggagctaaaaaattggatctcacagaggtagagactaggatggtggattc

SEQ ID NO: 585945 - DNA, 4001 bp, Homo sapiens
ctgaaattctagacccattgactttaactttgtctctaactcttctctttaatttgcataaaaataaaacctaacaaatgttctgtatttctcattcatattccattttgtaccatttctgagattttgttaacaatgtttcagctgtccagaatccacccactccccactgccctgccctgttcttcacatacccacatctggctaggcatcaaagctcatattccactttctttataaagccttctctagctgacccactgcaccctatgcaagcattaactccttacagcattttataatagcaagttttctatggcacttacaatattatagtatcacagttcttctacttatgatcaaacatcaaatttaattcatatttttattagcagaaacactcactgtaataccttgcacatggctagtgttcaagaaatatttgctaaaatgctgaatgagggacaaattctcttcttgtggtctgttggatgaccaccatattactgtactaactttcctagttaaaaatatgaacaaacaagattaatatccaaacaaaaagcaacattttctgagttggtaaaatatctatcttgattcataataaatagttctcaagctgccatatctagctggtaggaaacaagaagatattttaagttccacaaggtctttggcaaatttcagagagagtttcttcagggcatcaaatctcatcttgcagcattgagctctccttttgaatttctatttatgatttctgaattgtgtttaaataacaggcttgtggttgttatctacagttttaacaagccagtgagtaaatccagccttcagtgaaattataactaggattaaaatagttttatgttggaagaacaaactaaattgtaatctgttgctctagtctatgaaatttatcaaagtgtacatactgcagattagaacctttcccaaacctttgctaaaataaagcttagtgtcaacctatgttttcttgaagcaaaaaccatttcaaatgtttgaattaaatgcttagattagatagcagccctctagcccagttatttccatatggcaggcttaaggatttagtctgaaatccttctgagtagaatggaaacaagggcaaaaacgtttcatttaatttaaaagcaataaaagtgaattacattccatacagatttctagtcctcccccactttttaaaacattagcactaccattttcgcttaggaggctgattgatagaggaaaggagattagatgagaaaagatattttaagaaaaatatatgaggacagaaaggtgaaaaagagagatggatgactgggcttgcatgtgagcatgtaaagaaacgttaggaagaaaaaaggtatcttaaagtaaaaaagggtatcttaaaagtatgaaaatggatagaaacaaaaagaggcaaaaacttccagagtagttgagaaataaagaatttaatgggtggaggaatcacattttcttcagccattctaccctggtcaagcccagacagaggcaccaagactcccaaggattggcaaaatcacatttggtgccaatgtcctttaattctgtttaaagcaattcaatactacagaaggctctattatcactcagggtcccaatgtagaccctgagaggaaagcaaaggtgagcaaattcaatcactgtttcaaacagcttgaaacctaatgaaggagctaacagatccacataaaacagaatgaggtaactcctagaatgaaagtttccattagagaaggacctttcattaggcttcacacaggagatagcacatagatcacagtcaaaagtcaggttagcagtatttcaaggaaggtcaagggaaagaaagcagtccaggaataggaacttggccagcacacaactcagtactacaggaggtcagttaggtaagtaaggccagagcgagagggacagccaagtcttgggagttggcaaatgctattcctaaatgcttgcaatttatacacatctgccatggagttggagtaagacataaatactgctgttgttattttagaaaaaattaatctgaacttgtagatgaaagcaggaattagggaccaataccggaaaatggcatggggatgctaacggcagttgcacaataaggagcctagtgaaggctgggtgcagtggctcacacctgtaactccagagctttgggaggccaaggctttagtgtcacttgtggccagcagttcaagaccagcactggcaacatagcaagactccatctctacaaaacatttttttagcaagttagccaggcatggtggcagatgcctgtagtctcagttactcaggaggctgaggcaggaggattaattgaggccaggagctggaggctgcagtgagttatgatcatgccactacttcagcttgggtgatagagcaagaacctgtctctctgaaaaaaaaaaaaaaaaaaaaaaaaaaaaaaaggataaagaaaaacgaagcctagtgaaactataaaatctagaatgagtgaatctacaggctctgcatcttcaaactgtaatgccaattggtacaaagtgttcagtatatgcaaaaacagcctaaatctacctttttttttttttttggtcaatgctgcaaagctacatgccctccatcctacacttttatgactgtttttttttgttttgttttgcatgtttttctaaggcatgggaaatgtaagaatcctgttaactagtctcctcactgtaacaagccatactcttctaagttttaataataatagtaataacagcccatactgcttatggtcaggcaatgttctaagtgctttagtacaaaaacatttgttctcacaataattctggaggagtaataattgtaatatctatttttcaggttactgaggctaagagagcttaggtaacttgcctagagtcacacagctaggaggttaccccagagcctcccatttgagatggggaggggcctccagatttgctttcatttgaggttttcttttttcttattctgattcctgtttccataacaccaaatgcaaaagaatgctgctctgcctttaaaactaggcctgtggaccaatcaactcccattttccaaatctcaatgattacctgtgaaaagccatggggagtacataagtttgaaggcctcaccttgggtgagtatctggcctcttgcacctgtccatatcccttcagtgtatgaagatgcagactcaaaggagaccacttttctacctccacatcctcctctttgctctccagcatgcctgacagggcagggccgtgacttattccctcaaagattcaagtgaaggattttactacactgaatttcattttgttaacttgggaacaaaatttctgcttatcagtctctttggatcctaagcctggcttccaaaatcctgttgtccctctcagtttatgttcatttgcaaatattataaatctgacttccaaagcttcacccaagtgtttggaaatcgtaattgaagaaagtatagagcaaagaaagctctgtgatattccactacagacctctttctaggtacacattgttaatttgtttagatattcatgtaattgcaataaaaatggacacctggcattgaagtagacactgggctcaaaatatgtttcctggcctgagactatattgatcagcaaccatcattttgatgacatcatttaactggttataaataaatctaactagaaggccagccacacttaatgtttccatattcttcaaaaagagatcatgattttgtcaaaggccaagttaaaagacaaatatgggctgggtgcgatggctcacatctgtaatcctagcaacttccgaaggccaaggcgggtgaattgcttaagcccaggaattcgagaccatcctgggcaacacattaagaccttgtctcttaatttgaagaaaaaaaaagagacaaatatgtatatacctgcagacaacca

SEQ ID NO: 585946 - DNA, 4001 bp, Homo sapiens
atcttgtcacatggatgagtgtatggcagctcacatagggaaagacaattcagaggatacctttaagacaatgaactctgaactgctggttgccaccaaggtaaggaatctagaagttgttttagattactctttcaagacatcaactcttctaaagtccaaacagccagcaaaaggtctggctgtccagaataaagacaaaacatcagccttaacaaagcctcagtacatccctctttgggcttagtgtgcagtgctggtcactgcatcctaagaaaaagaagcgccagagaaaggcaagtaaaataattaaaagaatagaggggctttttttctctgggttaaatgcccataaagaagataagatgcttttatagcatgaaagactcagaggaagtaaaaatagcccttgtcatccaatcctataattcttaaattaggggacaaaagaagcttgaaaatgggagtaatgaagaaaccgtcgttggaggacatataaaagaaggtccttctttggctggggccaggggtcaggtctttaagtattctccaatatgtggaagtacatgtggtagctgtaaatggagggtgggggtgggggtgggggacacgcagcccacctcaacagtccttcgaagggacaaaaaccactctggactggtgcccgccttccctctttccccaaatcaccacggaatacaaccacagaaactcaaaaccagcaaaaaacgctgacaagacattcaaaggattcaaaatgctaatactaaatctcattgtctgggaaaattagattgaaaataaattcaagggtgcaagatttataatagattaacaagggaaattaaggatgttggtggggccgggaggagatacatccttaactttgtgattcacacgatggagcaatactgtgtccttcaaagaaatggtatttggtaatctgagttggacagctatcataaaccatttcctatatacactgttagcatagtcagaaagtgagagttatggattgacatagggattagatcatttgaatttttaacccacagcacaagtccttcaatcgttttcaataaacagagggagagggagactctgatgaaccgttgctcacgtgttgaacagttagcaatcccgggctatcgggtccctgctgaccttccttcagaaaaacgaatggacatgtaaacggaatgaggaaaggagggtaataaccagagtgtcattgaattgagagatgttaaaaatgggccacaaccaacacatgggcccttacttttaggtgaaagattcctatatataaatacatagtatgttctctcttgccaagaaatattagactaaggaacttcattcctcacgaagaagataatcccctcttccttcccataggtcccttaccttacctgcttcttccctctcgcgggtaggaactttgagccccgcctctcggctcgtccaagctccgccttccccgtccacctgtgtgcccagcccctgacgttaccggtcggcttcagcggcctgcaggattccggctcccaattggtcggcccgtccacggcttgcgcagctcaccaatggcagcggtgctgggtggaggggtgcccacatccaagatggcgtccccaggagctgggagcgggtgaccggcggcggggaagcggcctgggttggccctcagattgcggggtctgggggcatctcgccgggcaaacccttggcccgcctacaaggacttcccccggccagagcaatggccgctgagaacagcaagcagttttggaagaggagcgctaagctgccggggaggtgagcccaggacgctgagagggataggggattggaccaaacccttccagatcctaatccctgaatcccgcgggcctggggcgccacagaggccagaagactggtttggggaagctgggactgcctggtggcggcagggcagctgtcaggcagcgaagcgaacagcgagctttggggacggctggatgtgggtgtagaccggggtctgggggcggaggtttcaggaggggtgacctcagcgggaaggtggccgaagattgggcgtaaaggggagtggagttgggtgaatagtcagtgtcggccctggtctcggaagttcctccccagagctgcttcccactctaattaggactccctctcaggggtctccaccacgcacaggtggttggtcgctcgaggatggccccttcccttgatccctgaggtcggcacttacccgaaggattccggtgggagtttggggccgcctgccgagagggttaggcaggaaaagtgaggacgattctcaaccctgaccttactttatcttgagttggccctttcccactaggaattattacaagacgaccacagaatcagggttattcctttggcattttctaaggatttgtccaaccccaagtgacttcttcctcccctgcattgtaatgcacttcttgtgcaaatgcactaaattcgttcattcttcagttgtttaactggagagcagaccccctaagactacccccaccctcttttcggtgtatgttgagacttttggcaaattatccatccatcaatctactgttggtttactgtttcagtttattttgggcaaagtcctgagaagtataaggaagagtgtgtatttcagtcgtaaatttaagatttctgccagctacagtctacttggtgatgaaattcatgtttggttgtgtcccctgtgctaccttttctaatggattcaggttttttccttctgggataatcttttgaactcgtgactttttttttttaagcgagagagagatgagggtcagtagtggctaggtaagagccttaattttttttttttttttaaatgaaatagagacaaggtctgactgtgttgccagggctggtctctgactcctggcctcaagtgatcctcttgccttggcctcccaaagtgttgggattacaggcgttagccaccatgccccaccaagagtcttattttattaaggattctagtagacatatggagaatagggtggaaatcagcttttagtaatacttattaaagtaatagaaaggaatgcaaagataacttcagattaaagtgctgtggactcaacagtgttaatattactgttaaagatgttctgtgtttttaggtaagcacacttcctgccaactgattccttttccttcctggtctagtgagctctctagttgtgctaactgctattctctggggttttccgtagtgagatcattaaattttgacatcctaagattataatcataatcaataggaagactgttgtatcaggaagcagtgtaagagatgtgggacgtggcatgggcttctgtgccttctgactgctggttgctattaacaatctttttttcctatatttcctgtatttggctataagaacagtcaacttttttaaagcactacttttctgagataggaagagaagtcttttcagtttcttcaagtttctggattcctttttcattttgaagaatatagagaaatagagaactttcgagttcagaaagacttgggttactatttgggctctgttgtgtgtgtgaccaagacaaataatctttctaggcctcaatttccttacctatgaaatgagaaataaaaatactttcctcagagttactgtggggactaagtgaaataccctatttgtaaagagcctaggacagtgtttatttagcacattatagttgctcaaaaaaacagtagttattaacattgctgtcattattacagcaagtaaacatttaaaataatgttactcagatccttaccccagctcattgtcttcgttgtttaaggtattcaaatattgtcacaattcataatagtttttagtaccttacttggtaaagagaaatactgttcagctgtgtgcttttagcagtgaagcccacaagcctctggtcataggagaaaactaaggttcttttagatagaaagg

SEQ ID NO: 585947 - DNA, 4001 bp, Homo sapiens
catgtcactggactccagcttgggtgacagggcaagacctggtctcaaaaaaaaaaaaaaaggtctctctggttggtatatggggaatggactctaaggggctaagagtggaagcagggagccgaatagcaggctgctgtaagcaggtgtgtggttggtgaagattagggtgaccaagtggtagtggtgaaaaaggttccaacaatctcaatttccctatttaaaaagtcatcacaaggtaactgatgtgaatttttaaaaaatcttggaggggaaactgatatagaaaacaaactgtagaaataacagggcttttctgggttgagcactgttaactacaccccctgggaatcagtgtcatttaacatttcatagaagattaagaaaaaggagtattttgagatatgtctagatacacaaatcatactttgctttccacatagtaaaatgtcaaatcaatagggagcagcttctggaacatctctaaagccatgtgcataagctggaaagtggcaggtatcttgtcacatggatgagtgtatggcagctcacatagggaaagacaattcagaggatacctttaagacaatgaactctgaactgctggttgccaccaaggtaaggaatctagaagttgttttagattactctttcaagacatcaactcttctaaagtccaaacagccagcaaaaggtctggctgtccagaataaagacaaaacatcagccttaacaaagcctcagtacatccctctttgggcttagtgtgcagtgctggtcactgcatcctaagaaaaagaagcgccagagaaaggcaagtaaaataattaaaagaatagaggggctttttttctctgggttaaatgcccataaagaagataagatgcttttatagcatgaaagactcagaggaagtaaaaatagcccttgtcatccaatcctataattcttaaattaggggacaaaagaagcttgaaaatgggagtaatgaagaaaccgtcgttggaggacatataaaagaaggtccttctttggctggggccaggggtcaggtctttaagtattctccaatatgtggaagtacatgtggtagctgtaaatggagggtgggggtgggggtgggggacacgcagcccacctcaacagtccttcgaagggacaaaaaccactctggactggtgcccgccttccctctttccccaaatcaccacggaatacaaccacagaaactcaaaaccagcaaaaaacgctgacaagacattcaaaggattcaaaatgctaatactaaatctcattgtctgggaaaattagattgaaaataaattcaagggtgcaagatttataatagattaacaagggaaattaaggatgttggtggggccgggaggagatacatccttaactttgtgattcacacgatggagcaatactgtgtccttcaaagaaatggtatttggtaatctgagttggacagctatcataaaccatttcctatatacactgttagcatagtcagaaagtgagagttatggattgacatagggattagatcatttgaatttttaacccacagcacaagtccttcaatcgttttcaataaacagagggagagggagactctgatgaaccgttgctcacgtgttgaacagttagcaatcccgggctatcgggtccctgctgaccttccttcagaaaaacgaatggacatgtaaacggaatgaggaaaggagggtaataaccagagtgtcattgaattgagagatgttaaaaatgggccacaaccaacacatgggcccttacttttaggtgaaagattcctatatataaatacatagtatgttctctcttgccaagaaatattagactaaggaacttcattcctcacgaagaagataatcccctcttccttcccataggtcccttaccttacctgcttcttccctctcgcgggtaggaactttgagccccgcctctcggctcgtccaagctccgccttccccgtccacctgtgtgcccagcccctgacgttaccggtcggcttcagcggcctgcaggattccggctcccaattggtcggcccgtccacggcttgcgcagctcaccaatggcagcggtgctgggtggaggggtgcccacatccaagatggcgtccccaggagctgggagcgggtgaccggcggcggggaagcggcctgggttggccctcagattgcggggtctgggggcatctcgccgggcaaacccttggcccgcctacaaggacttcccccggccagagcaatggccgctgagaacagcaagcagttttggaagaggagcgctaagctgccggggaggtgagcccaggacgctgagagggataggggattggaccaaacccttccagatcctaatccctgaatcccgcgggcctggggcgccacagaggccagaagactggtttggggaagctgggactgcctggtggcggcagggcagctgtcaggcagcgaagcgaacagcgagctttggggacggctggatgtgggtgtagaccggggtctgggggcggaggtttcaggaggggtgacctcagcgggaaggtggccgaagattgggcgtaaaggggagtggagttgggtgaatagtcagtgtcggccctggtctcggaagttcctccccagagctgcttcccactctaattaggactccctctcaggggtctccaccacgcacaggtggttggtcgctcgaggatggccccttcccttgatccctgaggtcggcacttacccgaaggattccggtgggagtttggggccgcctgccgagagggttaggcaggaaaagtgaggacgattctcaaccctgaccttactttatcttgagttggccctttcccactaggaattattacaagacgaccacagaatcagggttattcctttggcattttctaaggatttgtccaaccccaagtgacttcttcctcccctgcattgtaatgcacttcttgtgcaaatgcactaaattcgttcattcttcagttgtttaactggagagcagaccccctaagactacccccaccctcttttcggtgtatgttgagacttttggcaaattatccatccatcaatctactgttggtttactgtttcagtttattttgggcaaagtcctgagaagtataaggaagagtgtgtatttcagtcgtaaatttaagatttctgccagctacagtctacttggtgatgaaattcatgtttggttgtgtcccctgtgctaccttttctaatggattcaggttttttccttctgggataatcttttgaactcgtgactttttttttttaagcgagagagagatgagggtcagtagtggctaggtaagagccttaattttttttttttttttaaatgaaatagagacaaggtctgactgtgttgccagggctggtctctgactcctggcctcaagtgatcctcttgccttggcctcccaaagtgttgggattacaggcgttagccaccatgccccaccaagagtcttattttattaaggattctagtagacatatggagaatagggtggaaatcagcttttagtaatacttattaaagtaatagaaaggaatgcaaagataacttcagattaaagtgctgtggactcaacagtgttaatattactgttaaagatgttctgtgtttttaggtaagcacacttcctgccaactgattccttttccttcctggtctagtgagctctctagttgtgctaactgctattctctggggttttccgtagtgagatcattaaattttgacatcctaagattataatcataatcaataggaagactgttgtatcaggaagcagtgtaagagatgtgggacgtggcatgggcttctgtgccttctgactgctggttgctattaacaatctttttttcctatatttcctgtatttggctataagaacagtcaacttttttaaagcactacttttctgagataggaagaga

SEQ ID NO: 585948 - DNA, 4001 bp, Homo sapiens
agctaggactacaggagtgccacaccacacctggctcatttttgtatttttagtagagatgggttttcgccatgttggccaggctggtctcaaactcctgacctcaggtgatctgcccctctcggcttcccaaagtgctgggattacaggcatgaaccacgatgcctggcccaaatttagattcaaagtcatgttgtgaataggaaatgtaccagataagctttcaaagtcttgttccgctaaaatttaagaaagcacataagtacatccttctaaatgaaaataaagacttggttaatttgtacatttctagaatccatgagcgtatataaattcacatcttaaagcaatgtgaaagaccatcaatattttattttttctacgcaaaagctgccatatattgtaaacaataacaatgctatgaatggatttcagtgtcaccaaccttattgaaccattcagggcttttctttttagccaatgataatgttgtaataaatccagctagcattcccgctgcagcaacggtaccaaggaaaattccacctgccaagagtttcggggaggaggggggatattaaaaaaaattaaataaaaagaggttaaaaagatgtacaaaagtaagtttaagatactattcgagttacaatcaaaatcacttttgaaattcaagaaaccatggctaagcagctcttgctaacagtaaatgacagcggctgagaaacacgcgtgaccgcacgacctctggttccttgggtcattccgaattattattcccgagcgcagagaaaaggttcagcttcccttcccctctcccctgggaccacagcgtgaagtttctcacggggaggagaagagacgatggcaatcagaaaaggcaaggctctagaacaattgcagaggtgacggggaaatatggcacgcccgggagaatagctcgcgggatctgccccccgccccgcccaaggggagactccacccagtaagcgacctaccctccctgggccgccagactccgcgggctaaactcaggggcaagcacaagctaagggctctcagagcgggatgtgtgtgggaatgcccgctccagagcaagccagggtccggggttaactcaccccgacgcccgcacctcaccacagcacatcttacctttaaccaggaaaagccggtcattcgtggaccccggagcctccagcccagaggccggctgcccagttgcagcgcccgctgtctccatgtttaggtcgcctctagtgcgtccgtccccaactgggcccgggtggaagcgagaaccaggcggaggagaaaggttccgctaccgcctcctcctgtgcaatctgaagaagggtccggagtgcggccgctgtccccaaaccctcctcccgcgccggggccgggaagacgtgctgtgcccagccccaggggcgatgccctccaaggccgtctcttagggaggatcttttgatttctccaaggagatcattgctggacttaagtgattactttggctgtttgaaagaacgctcagccccgactgtaggaggcagtgagggtcgcagattgcgccaagattccaggccccgcctgtgagaccctggagctcattttcctgatcaagcttacattgtgtccaacgatttggccagcgctaacactccacgattctaaaacgcaagcctaggtcttctgtctgtacttttctaggtaacttcccaacagtgttgaggaataagtgacaggctttctccctggaggagagccagccacccggttctgcggtgacgggtacctccgccgcggtgtgagtgctcggcctccgtcgggaagtggaacactcacaggatgaccgaatgaaagtaccacccccgaaaggagagcgacgcccgctggaagcgcttgcagagctgccggcaacgttgaccgctagcaagcttggtcttccgctgggaggctggtttgcccattctgtaaatggccgtggagaggaggaggctagtggtgatagaaaatcttttcagcctctcagagaacaatgacatcttgtaaaataaggcggtctctctgctatttgtcctgccccccatcaccggagggcatgagtttcctgaggatggagatgggactctatgttcagtttatatcccccagctttcagatattaactggttaccaacatcaaatgcatgttggatgaatgagtaaatgaatgcatccatttttgcgtcagtgaagtgcagttaatagctcaaacctgggctcgggtcctaaaccgcttctcaggtgtgtgaacttggggtaacttagcccctctatagctcagtttcctcacctgtaaaatttaaaaactggtagtaggccaggcgcggtggttcacgcctgtaatcccagcactttgggaggctgaggcaggtggagatcagaagttcgagatcagcctggccaacatggtgaaaccccgtttctactaaaaatacaaaaattagcggagtctaatgatgcgggactgtaatcccagctactcgggaggctgaggcaggagaatggcttgaacctgggagggagaggttgcagtgagccgagatcgagccgttgcactccagcctggatgacaagagtgaaactctgccatccaccccatcccgccccccccacacacaaaaactgatagtacctaactcataggattactgtgagaattaaatgaagcaacatctataaagaagttagcacagtgcctggcacatataaatattcaatacatgttagctctaactattaccacctttgattccagtagctattttgcagcattgcctatggggatttttaaaaatgatggattatcaaggtctatctaccacgggagattagagctctgaaggcccgcgggtggcagggcagaatgtaaaagctccgtggggtttctgatgataaaaaactactgctctgttcaaatttttgtgtggatgagatcacacagaatgtatgtgacctttggatttcctggaaacacgtcagtatctgaaagggcttttaagctggtaaatgctgtgctaatttgttgaaggacctatcctttttccttcccctcatacataacagtaaccatagctgctaacatgtattgagtgctttctatatatctgacattgcactaagtgcttcaagtacattatctcatttattcctctccataaactcagaaagactaacttgctcaagctcacacagctgttaagtggcagagacagggcttaaaagcaggtccttccttatccactgtgccagtcgtcctcaagtgtgaacttgaatattggaatcacctggaaggcttattgcactcagcttgctgggccccattcccagagtctgtgactcagtgggggctgagaacgtgtatgtctaagttcccaggtgatgctgttgccacggattccacttcgagaacatcttctgtgtgccttcctcttatggattacacctcttaaaatccacaccatacactttagcacttggaaatctgttttcccaagactgcttagggagaaaaagtgcagattcctccactctcttctttgctgtccccttagaaaacgacagaaacattttaaggattaagctgggcacagtggctcaaacctgtaatcctagtgctttgggaggtcgaggcaggcagatcacttgaggtcaggagtttgagaccagcctggctaacatggcgaaaccccatctctactaaaaatataaaaattagctgggtgtggtggcggcgcctgtaatttcagctacttgggaggctgaggcaggagaatcgcttcaacccaggaggcagaggttgcagtgagccaagatcatgccactgcactccagcctgggtgacagagcaagactccgtctcaagatgatgatgatgatgatgataataataataataataatttaaggtttatatcactgcttactataaggaacagaagggagataatagatcttgtaat

SEQ ID NO: 585949 - DNA, 4001 bp, Homo sapiens
acattaagtactgtatgttcccaatagataatactttctctcttacttctccccataggaaagactgcattgtagttctttggacaattcctggagaaatcatgagatatgactctctcacttgtagaatcacagcaaaggctccgtcctactggtaagtagttccctctgaaattgcctgaatgaatgaaattctccagttcaggtgaacaactctgaggatatgcaggaatgtgttgtgcttctgagatttttacaacatttgttttacagaggaaagtttacattagtttaacatagttaggaaacatgccgtctactggagtagaatacattgtattctgaacagtttagcagtcctcatacttgggctttcttcccagttcttgtgctattttcccagacagcaaattaattaaatggcctttggccatgactctttcccttgagtcagcttttctgtcatttaaagtgtacagataggggggatttaattagcccaatgcctggcacattgcatgcactcaataaatgtttgttgagtattcgagttatctctagatgaaggtcacttttgctattactattaatttataagcatatcagtaattcttgtgctgataatattgacagtgaacaagcacttaaaagaaaagttaactcataacttatagggatgtatcatgagaattcagatagtcaacaacctatctattttgaacatattcactattcttctaatgttctaaggctctaattctacacttgaagctcagatgattctaagatagtgaggaactgcagcaactatctggatattttctctgcaatgcgtgtgtgtgtgtgtgtgtgtgtgtgtgtgtgtgtgtgtgtgtgtctgtctgtctggtctgtgtaagccccgactaaatatagagcccccattctttgtgtaagctacttaagagaaaggattttatcttctaatttttatctcttcagcagaagttattattgctagttcaatcccaaatctatacataaattacgaagtttaataaccccttaaaaataagctttttaaaaatatttttcctgaaataatgttttactgaccttgaaaatttttcttagctgttgtcatgctcaacatttctcactgatgacatatgtggtgatgatggtagtgtaaagaaaaagcttgaggaaatacacacggtgctgatattttactaaaatgaatgtagcactcactcataattgtaatttaatttttaagtaaaaatctgattttccactatcattcccttaagtctggctcattataggcctaaagcctgtatgaatttacacagctgctttgaggctttgcatatttccttgttttcgattgtttgatttttttttaaaggggtatttttgcactgaagtaaaacacaactattaacactagcctcgggggaaaaagaaactaacaaacctacagcttgaaatgtttcaacactttgcatttaaaattttgcgcaccctttagaagttacaaaaataaaagccactccctgcaaaaaaaaaaaagaaaaaaagattgagaacaaactgtcatgatttcagaaaacgatagcagacgtgcaggtgctaataccagagagcttacctccgaataaaatggtgccttctaaacagcgactatttacatgttttagaatcctttcttgggcatgggtgcctttatattgccctattaccacaagatgcaagccgtgcagcagaatgttttctgtatggtacccagccaaaagtgaaacaagttgcccactgacagagaggccatttatagaacatattcatttacaccagtgctaggcagcaactgaaaggcaatgcaaagaagtaatttctctttaccttgcttggagcaactctgacctggagagccatgtacacatcctacgtcaaggaggtgatgaaagccccactccttatagcgatgacatctggaagaagacacaattgtcaccgtgagcttttcaattactcctggagactaagtgtgagacgcagtagtgcaggatgattggattacgcaaaacgagacagatgccatctgtgagccacgcgtaagctgctaagtgccaaaatgaacatccttattaaacgatggagttctcataccatttgtagtttggtcagatttgaaagatgagttgattgtttttagatagtgcggcaaataggcagggacttggaatcctctctggctgtatgagtaattactgtctcatacttaaattagaaacatgggttttcagttaggtcttgagattgtttccaaaggatgctgctgcattcatgttgaagcgtggcctgtcctctctgtttcactcacaagggccacagagttctgagaaagaaatcatcagttcctttcacatcatggcaaagaaatgtaaaacttatgactttttgttaggaaacaaaagggttcccatactctaaaataatggccacaatattgtgggtagaatgttttcaagaactgccaggaggcagtattggagctctgtctctctgcgtcctgaggctccagaaccaatccttcatttacaattcattctcccatctttttactggcaccaactctattattatttttattttaatttttaattgctgtgattacatagtaatatagtaatataccccatagagtttatggggtacatgatatattttgatataggcatctaatatgtaatgatcacatcaaggtaagtgggatttccatcacctcaagcatttattctttgtgttacaagcaatccaattatacccttttagttatttttaaatgtacaattaaattattattgactatagtcactctgttgtgctatcaaatactagatcttatacattctctctcttttttgtatgcattaaccatccccacactcccccttttctcccactacccttcccagcttctggtaaccattcttttactttccatctcaatgagttcaattgtttccatttttagttcccacaaataagtaggaacatatgaagtttgtctttctgtgcctggtttatttcacttaacataaggacctccagttccatccatattgttgcaaatgacaggatttcattctttcctttggctgaattctattctgtacctgtaccacatttctttatccacttgtctgttgatggacatttaggttgtttcttaatcttggatattgtgaaacatgctgcaatatacatgggcatgcagatacctctccgatagactgatttccattctttggggtatatgctcagcagtgggattgctggatcatatggcagtcctatttttctcttttgaggaacctccaaactgttctccatagtggctgtactaatttacattcccaccagcagtgtatgagggtgtccttttcttcacatcctcaccagcatttgttattgcctgttttgggataaaagccattttaactggggtgaagtcatatctctttgtagttttgatttgcctttctctgatgatcgatgatgttgagcacttctcacataccagtttgccatttgtatgtcttgttctgagaaatgtctattcagatattttgatcatttttaaatcatattattagattttttcctctacagttgtttgagctccttatatattctggttgttagccccttgtcagatgggtagtgtttgagtattttttttcccattctgcgggttggtgtcttcactttgttgattgattgctttgctgtggcaccaactttagatgggaacttagctgtgccctgtaatcctttttccattacagcatcttgttaaccgctataaagagcacattctgcaatatctacctgcataccaaaagcaaaggtgaaaagagtgccttcagcaagtccaggccttgatagttttcatctgaatatgttattgaatttgacattcataatgcatattaataacactgtcaatgctcttt

SEQ ID NO: 585950 - DNA, 4001 bp, Homo sapiens
cccatgttccttgcatgacaccgctttgcccatatcctaatataatgtgggatcccagtatggttagaacaagtactacatttgcaggactattagggagattaaggtgataaaacaaactaaaatacatgctgaaaaaaaatactgtaactctctagttattaaattgagaatgaatttttagtaaaaaactttaaaactagttattctatagatactattcttattactgtcatcaacactgaagtaagcactgtagaattacaaaatacatcaatcttgcttttagagataacactgcaaattaaactggaaccccatccctatttcagtagttaaaaataaaattactctcaaagtcccattaaatcacaaagtatatttattaaaatgtgtgtgtgtgtgtgtgtgtgtgtgtgtataaacagaacagaaggaatcaagagaacttggtactagttcctgccctttcaaatagatttagaaaaaaaaaaattctcagatatgcaagaaaagatgagagatgcttaatactggacacctatagagtatatattaatacagtgtactgtcaaccgtcttcgcccctgcagataaagatactgtgctttcgacaaagaaatgtttccccaagttttcctgtcatgtcttacacattcagcaaagttaatatcagtaaaatgtttggtagacagtgcacaacttactccctgagtgtggtcactggctctttttgtaaaaaaaaaaaacaaaacaaaacaagacaaaacaaaaacccagcaaaggtagggcacattaataaacgtagcctaaaagcaaaaccagaattgaagtttcaggttatcttttatgtacatcttgccctacaactaaaaatatcgaattagctcaaaatgaaaagtactatgcacatttgtcataagtcctcatatgtgacctgataacatgcgacagcttctttacattagaatcgtcaatacctctacgactctggttcttctcccaacaatggccaaggtgtccatctctgtgtcttgggatacttcccacaaaggtaatggcactttgaccctgtcaattcactcagggttacatctacctagttacaattgccccccgcccccacttctctttttacctccgtgaacaacccccactaatcccccacggaaccacacaaaccgcccactgaagaagcgttctccacctgacctatcttctgcattaaacattcattccgtctcagctcattccgtggatttgctctttcgtaaatctcgagcaagacaaagctaggacaaacctgcaaattcaggaaacccgcagaaagagaaagaaaaaacagagaaacagagggaagggggtggtggacggcgcgaggtcagccagtcaactggattctgggcgctgggaaagaagtggagtgggcgcgtaggaccctcctcccgagcaacgccaactcccaccacagctccctcccctcacctcgatctcgcggatgttgttggaggtgacaaaaatgccaatgccgatgggaatgaagatgagaccgatgatgaagaaaataggtagcaccgtgccagccgtaaggatgggctgccaagctggcagccgttgctgtttgaaggccgtgttatccggtctccgagtcttcgcggtgccccccggagcacacgggggcccaccgtccacttcatccttcgcgttatagttcatcgccatcgatccctggggcgccgctccgcgatttgcaggtggaccacccagggggcccgccggctgaccctgacaggaaccgctcgagcgccgctgccgccgccgccgccgcagccaccagcgccaccgccacagccacctccgctgtagagcggaagaggcgggacactcttccgccaaaggctgctgacgggaagcgaaagtcggctggagacgccagagggagggagagagggaggagggagaagaaggagggacatggggaggggaaaggggaggaggatagaagcgggaacgaaaaggcggacgcaccctgatcatctgtcctgtgacgggctcagccattggatcgcgaatctgcgttcgcgcatgcgtggtcctagagctacggtgacacttcgcgtgcggtgtaggcgcatcttcgctctgttggccgtggctttagtaagcacacacctgcctgctactctggttatcgtggcgacggcaggtctggattgccagacaggtttttctttttacctcgaggctttctctgaagggagtcggagcatttaaaaggcggcctcaaggtggattgagtcgggggaggattagcagtatttgcttaggttgtaaaaccgcgactttatctaataaatcgccattcaaggtgcaaatacaaacttggaacagaggtgcgtgacatgtaccccttttgtcctaaagtcaagaatcaataatgtgacttagccctattatcttgcctctaattaagcgattctcacttattctttctctattgctaattctcacgttacatttccccttttctgtgtccacctttctcttttgcgcattgatataggaagtgttttgtaataggctgtagctttttctcttactgttataaaaaccaggacatatagcattactacaaaatgagatactccgtaaacactttaaaagtgccagctatttaatgacccaagaaaatactcgtgatataaaagttgactaagtcaggatattagagtagtgtagcgactatagaagtacaatatagagcgcaactaaaaagtgaaaatggtaactctgctgaccggatgaaggatttttttttctgtttctttgcacttttctgtattttccaaaatttctataataggcgttatgttatttgtaaaatttaaacaatatatacaatccatattatactgacatctttgaaatccaggccagagagtaaatcatatcatttgaaaacaaattacttttttttaggcttagtctgcagtaatgccttaaagaaggtaaactgaggaaagagaaaataaagagtgcttggtcctcataatttaccgttaagctgggctctgtggctcacgcctgtaatcccaacactttgggaggccgaggcgggtggatcacctgaggtcaggagttcgagaccagcctggccaacatgatgaaatcccgtctttaccaaaactacaaaattagctgggcgtggtggccgcgcctgtaatcccagctactcgggaggctgaggcaggagaatcacttgaacccgggaggcggaggttgcagtgagccaagatccgccattgcactccagcctgggcaacaagaacgaaactccatctcaaaaaaaaaaaaaaaaattttacagttaaatgttttttttcaaaatgaccacaagtttcaaaaatgtgagccaatcacatgtttactaggcagagtttagagtgatataatacttgctgccttctaataaccgacttgcttgggtttgctcttacatgacattcatgctcaaattcttagcactactgacatacttaggtctatattttgttttgatctgttaagtttaccttcaaccccaggctcaaatggaaaacaatctatcacagttaatggagaaggctttgagtccttttattttgctaagttctgttagtaaaaatgtatgccacaatatgggcatattgcgaaagtacatataaggcaggtttttcctccccatttctgcctatatcatcatgcccactaaatttgataattatttaactgatctgctattccagcactctgtatatatggtcattttaccttcaattttttgtttttgttctagtgatctgagtgattgtgatgtatttatctgcttcctttttctttatttttgtttgttcataggaaaatgagttaatcccttgtctctttttttattagaaattcgattttgactgaaacatttacagaattgaaacctcctgagattcttctctaaaacttaacat

SEQ ID NO: 585951 - DNA, 4001 bp, Homo sapiens
tacactgtgttagggactctgccactgagtgacagggaatattctcactctttgaacataccccatccatctgtggtagcctgggaggtggaggcatgggagagttatgggtcagaagttcagagatgataacccattattgatcaattaccaggaaggatgccaagctctttacttctgttaccttgtttgattcccatgataaaacttgtaaggaggtggtagtaaccacactttttttctttttcttttctttctttttttttttttttttgagacagtcttgctctgtcacccaggctggagtgaagtgccacaatctcggctcactgcaacctccgcctcccaggtttaagccattctcctgcctcagcctcctgagtagctgggattacaggtgtgtgccaccatgcccggctaatttttgtatttttagtagcgatggggtttcaccatgttggccaggctggtctcgaactcctgacctcaagtgatctgtccgcctcagtctcccaaagtgctggaattataggcataaacactttttaatgaaaactgaggttcagacaggttaagtaacttgtcaaggtcacacagctgaagaatagtagagctagaatttgaacgcaggtctctaagactctgctatacttggagagaacttgaatgatgtccaagggggttcttagttacccactgcctgccttctgccttgccatgtccccatccacccacaggccaagactgcactgagtgagccaacagcaggccccagcatgtgccacctggggcatgccaaggcctggaccctctggtgccctggaggacaatcacgctgccagcacacccccacttgaagcctggctgacactcccactccccacctcaccctggcctgggaggcaggatgggcccctcttcagcaggtgttgggcacagcctcattgctccccggctgctgcagactggtaatgggtaggcaagccccagccccccagggcggtggagtgctcaggcttgccccgagcggccagacctctgcccaggggacccaggcagggggcagcacagcgccccaagggcagccagcccctctgacctctcctccccacttcccaagcgtcctttccttttctggggaacaaggtgccaagctttgggactgtccgccttaggcggtcaagacagccaggagggacaaagcggcgccccctccccacaacagggcctttgccccactctcggtttcgcgtctgaatcttttccccaccgcaccctccaacgcaggcccgggcggctcatgaatgaactgcactgtgtggggcgcaaggagaggacacgctcccggggccggccgcctctccagcccgccgaccagtcagtccccagagccgggggcagcggccggcctcgtgccagcacctgcgaaccctgcccttgcccgagcccgagcccttaccccggaccggcttcgggtgtactcgcccccgggagcagcagaaaaaataaaaggcacagaaggcatcggacttggcgaccccggggtccaaaactcgggggcgggggcggctagttccccaaacggcggcggacaggcggggcgcagctggcacccccgagggtcgcgcaggggacgcgcacctgcaccgggcaggtgggagaagagtggcactcgggggccgggggcgggggtcccaccctttgggatctccccggggctggggagagccggcggcgcgtatctggacctccggcaggggttggaggactcacatttggctcgggatggtgcggggttgggggcagcgcgcgccacccctgggtcccgcgggcccgggcacctctgggtcccgcaggaggttgaagggaggggacgcgcagctgagtccaggttttttctttgggtggtggtgggatcttcgaagaaaagagcgagggctgggtaggggtcgcgtactcacccccaggcgcagactcggctccggctcggagccccgggttggggcggggcggggctgggggagggggagggggagtcgctgggcggctcgagctccgggctcctgcggcggccgcggcagtgtatgggggagggggagcggggggagggagggggagggggcggagccccgcaggtcccgccccgcacgccggcgcacgcaaggtgcgcgcgcactctcagatcgcgtccgccgggctgggcctggcgcgcaggcgctaggaagaggccgcgtggggcgaaggcggcgcttggctggtggggcccgcggcgggattttcccgggcggcgagagcggtatggtggggggcaggggtgggcgttaagtcctcattccctccttctcctcttcctttctctgcagtaggggaggcccactccccggggtgagtgaggagaggccagagtgggaggcagagcgtcagtgggaggggtcccgacggggaggggggggtcccgacggggaggggggtcccgacggggaggggaggccccttacccggatcctcctcccttccgctctccgtgggctgcttctgcgacccccaagtccgtggccggcgctcacctgctttccccgggttgcggcgtcgacttggggagggcgggctgcgttcagccgtcgctggtcactccggagcgtctcctccggcttctccgctttccgcgctcccctcccctttcccaacttaggtctggagatgagttagccagacgcctctgtggtgtgaggattgagtttttgctttcactctgtcaacgctgatgagtgcgccctcccccaggccagggggttccctggtttcttatttcaccagagactgcatctaccagtgattaagactggaaagatgaagggagagactgagactctttctatatatcacccacacaaatagatcataaaggcacaacgggcaccaacctggtcatttaatttctggttcctggaggggacaaaaaggaagtattgctttccacagccgacgataaatgaactttgccaccgtaagagacggacgggactgaatttataaagaggttaaaagggcatatgacagacacctcaggctacttgggaaactctgggagtttgggagataattaactctcagggctggtggtggtggggaactgccactgctgaacagaaggacactgcccacctggggggtttggatcttgtagttggtcagcgtctctgctgtatgctggattttcaagagttcattagtagcttgtggaatgcaactgtaaggtttgatttattgcagtgtttttcaaactgaatcctattggtgagttggaaatcagtttagtagatcacggccacttgaaatagaaaatatcagagggtgttgcacttagggtattgtttcttgacacttcaggtgtacacacacgtgtgagtgtactaggaggtgttctacagtgtgtttctgtaggtcgcagtgagaaaaatttgaaaagcgttgtctcctgtgcccttctatttgccctcttgcctttctttgcctgagttttcagtcacttaaaattgtctgaggatgcagttagcatgccaggaatatacagtaaagaacaaggtggatcttcttcacggaggttactgtgtgagacgaaagacagttcactgttcatcactggaaatactgtacgtgctactgaaaaacaaggattttattgaggtaagaagttggttggcttaattaggaagggcagtttttcaactgtgaaagaaaggaagatggagatgaagcccgtttttggtaaagtgcttggtgggaagggtctttgtaggtttggattctgggagttgtgaaattggtgtaatctgttgcttgtgtggaacaataaaattcactttgaggtcaaatagtattataatggatatctgaaaaatggaagtggaagccatagttgtctggtttttggatttctgaggatcactagaaggcctttttttttttttttttttttttttttgagacagtctctcttg

SEQ ID NO: 585952 - DNA, 4001 bp, Homo sapiens
gcgtttgggaaggttggatgttcgtcctcctcacagggcaatgatcccaaagtagacctgcccagactcggcaaagtcgagatagtcgggccgattgatctcagcgctgagtcggtcacccttctccagctggaagacccctcccagatagatgggctcataccagggcttggcctcagccccctctggggtctccctctggcaggggctcttgatggcagagaggaggttgaccttggtctggtaggagacggcgatgcggctgatggtgtgggtgaggagcacatgggtggaggggcagccttggcccttgaagaggacctgggagtagatgaggtacaggccctctgatggcaccaccagctggttatctctcagctccacgccattggccaggagggcattggcccggcggttcagccactggagctgcccctcagcttgagggtttgctggagggagggagagagggagaggagagtcagtgtggccatgtcggttcactctccacatcctggccctcgagctctgcccaccccacatccggttcctgtcctctctgtctgtcatcccacatcccacctggccatgacgttctgagtatcccactaaggcctgtgctgttcctccacccttcccttgagctcagcgagtccttctcacattgtctccaagttctgcctaccatcagccgggcttcaatccccaaatcctagccctccaagttccaagacacatcctcagagctcttacctacaacatgggctacaggcttgtcactcggggttcgagaagatgatcctgaagaggagagagaaaagaaaaagctgagacccttaaacttcctagaaaatacccccctactttcacctccatccatcctcccccaagaccaaaactttaaatttcccccactgcttccataccggtactaaccctacccccaaacccaaacccagaattaggaaagaggtttggagacacttactgactgcctgggccagagggctgattagagagaggtccctggggaactgttggggagaaggagaatggttaacatcgagggagtcacccttaaaggaggaacagctggctgcctgtctggcctgcgctcttagccctgaggtgtctggttttctctctccattcatctgtgtattcaccttccaggcattcaacagctctttccctgagtgtcttctgtgtgccagacaccctatcttcttctctccttatctcccccatctctctccttagctgtcatatttcccgctctttctgtctcaccatctttattcatatcacttgtttcttcccccatctctcttctcacaccccacatctgtctccatatcttatttatatatctgcttgttcattcattcattcattcattcactccatacacacttagtgagcaccttccatgtgccagacatcctgtctctccatctttctctctctctcttccccatctcttgccacatctctttctgcatccccgtctttctccacgtttttttctctccatccctccctatcagcgcacatctttcacccatcccatctctctccctctcttgcgtctccatttccccttgggtgggagagtggatgaaggctggccaggcactcacctcttccctctgggggccgatcactccaaagtgcagcaggcagaagagcgtggtggcgcctgccacgatcaggaaggagaagaggctgaggaacaagcaccgcctggagccctggggcccccctgtcttcttggggagcgcctcctcggccagctccacgtcccggatcatgctttcagtgctcatggtgtcctttccaggggagagagggtggagccgtgggtcagtatgtgagaggaagagaacctgcctggcagcttgtcaggggatgtggcgtctgagggttgttttcagggggggtctgtagttgcttctctccctcttagctggtcctctgctgtccttgctgagggagcgtctgctggctgggtgtgccaacaactgcctttatatgtccctggggcgagaggagggcggggaaagaatcattcaaccagcggaaaacttccttggtggagaaacccatgagctcatctggaggaagcggtagtgggccctgcaccttctgtctcggtttcttctccatcgcgggggcggggatttggaaagttggggacacacaagcatcaaggatacccctcacactccccatcctccctgctccgattccgaggggggtcttctgggccactgactgatttgtgtgtaggaccctggaggctgaaccccgtccccatgcccctcaaaacctattgcctccatttcttttggggaccaggtctgtggtctgtttccttctaacttccagacaggatgcaggaaaaagatagaactagaactgggaggggcttcagaaagctgagtccttgagggagagaaaacggggttggagggaaaagctgtgttgagtcctgaggcctgtgtttgggtccctgcggggagaaggagctgggggcttggtggcaggcttgaggcctcaggaaaggctgggtgggggtagcagggacaagcctgggacagccccggggagtgaaatcacccccgggaattcacagaccccactggggcaggccttcttctttcattctgacccggagactcataatgctggtttcagtcttggcttccaaggaactctggggtccctgatttttttcatgaagctctcacttctcagggccccagtgtgtggccatatcttcttaaacgtcccctgtattccatacctggaggtcctggaggctctttcactccctggggccctctacatggccctgtcttcgttaagggggggtccccatactcgacttccatagccctggacattctcctacccattgctgtggtcacatctccccagaggtctcctgtaacccattcctcagagccgctacatgtggccatatctcccaggagctccctgacccccgcccctccagaccctgacttttccttcatcttctcagcttctcctttgcttcccctgcagcagtctggcggcctcacctggtgagtccatcacatatccctgaagctctctgagcccttatccttttgttctccccacagctcttgctccctttgagccctctgtccctccctccattccttagatagactgggaagttctcactcccagacacacacacacaagcagacagcatttcagagaaaagaggtttattgggcttcatcgagggtgcagatgcctccgtgtggggctctggtcggcagctggctttcagagcctttccctgccttctggggccctgtgatccctcatgcctacttctttctctcttggtcagccttgtgcgcatgccctctcactcttcatctcttgggcctgtctctgtttctccttggatgttcttctattattcccctctctccatcctccataaataaataatttaatttttttgccttcataaatagtcccctccctgcctctagtcatcccccaagctcctccatgtgcctgctcttcctctgtgtgtggatctaggccccacctagctggtgggacagaccaacagctttgggctgggaattcctaggcaggcttgaaatcctcagccagacagacatcagggatggttcagggaggtgtggtcccctgggatgcctagaattccttctttgaaagctccggtgacttgatcagggaagacttgagctgttggaatggccaaaggagaggtggtgacgacccctgaaatggtcagaatggaggcagaatggggagaaggtcttgaaatcaattattttttctttctggatttttccaagttctacagagcgaaggctccaaagaagacagtactagggctgaggactaggtgggggatgccatctgtgtgggtggatagctggtctccctgggtgagctggaacgcagccccgtggtacatcgagtgc

SEQ ID NO: 585953 - DNA, 4001 bp, Homo sapiens
atggagttacaggtactgctcagatcccacagccattcaggggcaaagttttgcctaggagccaggtctttcaatacctgccccttgcaatcccacaacaccaaacctgtggctacagtgcctgccacaatcagatggaaagagatgggcagtaggaagattttaaacaaatgaggtgttatctctttttgcttgcctgactcttttatttttctcttctgaatctaaagatttttcaccaaagatctaaaatagtgagagctgtaaaccataggcaagacatgcaaatgtcaatatcggatacgccagtgtgatctcattggtagggttagccttgcacagcctgtaaaactgcctccttagaaatcaaaacccactgcccagatttccaggtcttggaccactctacgcttaagattaaagaacaaatgtttcagatacgttataagtggcaaacaatgcaatattacccttaacttttttttttttaacatttgttacctcactgtcttatttaaaggtagtttctcaacttttgtcactaggattccacagaacttctccgttactcaaactcttctcccccttgttttatttttccactctgggcagacatttttgtctgcattgtggaaattgatgaattatttatcaacaaatacctcatccaaatttggggatgtgcctctccaaaaaatcaaaaatagtacaaagaattgaaaaaaaaatcaaagcagcaccttaaacaatgagaatgaagcattcattggctgctcaataatctggtacattaaggttgcggtccagaagtccctttaattaacaatggttctgccaaaatgctaccctgagacacttgaccagactggctttccaaggcaagaagatctgaggcgaggagaaccgaaaacaaagcgggctcaaaaagagttaagctccttccttacttaatgccactgcttttctgagaggccaggtggcaggatgtgggacgactccagctgacaaagacagtctaaccgtggggtaggggctggagcaggggccagcgacccacgtctacatgcatacttctcttacactgctgctactggaaaagctgaaccccgcgccaggaccccagccccctgcaaggacccgtgagcgtctgggaagctgtctctgggactgaagccccccacctccgccgggctggcggccactgcggtaccctacgccccgtcgggctggtcctgcacaatttgggaaaaagccgcagcgcttctgcaaggtctacgtggccatgagcatgcaacgcttggctccaaaaaagacacgaaaggagcaaagcgccaacgaccacccgatcggagggcccgaggggcgcctcttcaccagtcagctgcagcttaagttccgtgcattatctgaaaggaacagctggctggaggtatccagggctgtcactccaacctctgcagcagtgacctcaactcccagcacttcaaaacccagacagaaacgtccaacaaactcccagtccaggagcgctgcaaaaccaacgccaggtagacggtgccagcccgggggtcgctgcccaacatgcacccgcagcccttgactgcggtgagcccgaggcagacggcacggggaggcgcggcggttacctctccgggaggcgcggcggttacctctccgggaggcgcggcggttacctctccgggccccgcgatcctttcgcaaagtcccaagtcctggtcaaggcaggagcgcgccgcaggcgggggtcggggcagggaccgggcggaggcgacgctccatggacgcctggggtcgggctcgctcgctggcagggtcggctgggggtgtgatctctcttggcggccgctctcaccgctccgcccccgcgggctccaagctcgcttggcccgccacgaagactgcagactgcgcagtctgctttgccccgtttcagttgtatgcgggttgtaggcccggggatttccacgggactttccaaagtcacgtgactctctgggtcgggctgcgaagtgcgtccagccggccgccagagggcgcagggggcgaggggcgcgcgcggcctccgcccgaccgggcctgcgggccccgccccgccccctttccctgccccgccccgctgccccgccccgcccggtccctgcaggcgcccggagaaactccctcgccccgccccggggtgtccccgcgtgagtcacctgggcatttcggaagctggggtcacgtcacatccatgtggaaatcgcggtgatgggaactggaaatgaaataggttctttttcgcagttgtttttctgcagaaaatcatcaactgtggagaagaagaagggaaataagaaagaaagaaaaccctaaaaaccaccctggcgcccgggcccgcaggcctcgggccggctctgaaaagtttgggctgtgcacgtgatgagcgcgtaggcgggagccccagacaggacccgggcgggcatttcgagaaaaagcagcggtgacagcctttggtccccatctccattgttcctgccagctctggaccccaggctgcatgagacgtaggtcccaggggacacccgaccccgtggccccagtcttaggtaaacttaggaatcagaacaacactcacccctatgccgcgcttgctccatttccccttgtctatttctgctcaccaagcatccagctgacattgcattcaaagcagcatttcagcttagaaatcgcttctagtccatcacggtgcttgccatgtgtctccaaggctttattaggtgtgtttttagttgtcctgataatcagttcaccccagggtgctgatggctgataatactggcgcttccctccctacccccatgcgttgcacagggagggtgagtcatgtggagatggatgcagccccctgggcagtgggggtgcaggtgctgtgcagggaggagtcttagggcgtttttactgtcttactgccctctaagcacgggaccctttggatcatttactagattggctaaactagaaccggatggaaatattctgtactatggtccccttaattacatttaagaatacttgtcaggccatatatcacaggtttttaattagaaaagtatcctcctctcgccagtaaggacttgcagagatgggggtgggggctggatggagggtggcacttttttggcaaaaagaagtttggagcagagtgtcactagtggcctctctgaagactggtcctcgtcttttaaaaccgatggctggaatttcttccagttccaaacctcttgttatttgtcctctcttcttgttcacaaatgtgctatcaacattcaaacaatggatagtcagctatccattgtaaatggaccttgctggagtccagggctagcagaaatgacagggtctaaaatgacatttatcaagtacttgctatatgcttatatatgctttttatatgaaggttaagaagcttgaggcatttgcccagtttccacaaccaaaaggggcagagtcgccagtggcattaagcctgtgttactccaaagcccataatgaccagtcttactagaccattcctctcaggaaagatcctgtgagacaggtactcttttggtgtcctgtctcccagcctctcaaaacagccaaacacggaccttagacagaatgcggcttcagaggtagaagggtcttggtttcaccttcaggaaacctcctgggtttcagttgagctggcagaagaagatcatgtatctgaaagaccctgcatggaatgttaatcctcacaccactctcctgctggtgctcctttgtaaacagagttggcctgtttcctctcatctctggctccatgacttcaatcctcctgcagcttccactgcccctatctggctcatgtcttgctgtctggtgtcatgaactgggagtgcagtaaagaggagtgacaagcctgaggggccacgttcatacctgccactgccaactgtcctgatgtaactgctttg

SEQ ID NO: 585954 - DNA, 4001 bp, Homo sapiens
gatcagtgttcccatggacctagatgtgtttctctccacaccaagactgtcaatccaggttcattgtcccaagagactccccgactactgcttaccatccaccacacttgtttcacttgtttcaaagatataaaccttggccatgccattaataagtgggcagaaaagagtttctgaagggagactgggacttgcctcattataaatgctaacagtaacaaacttttatttagtctctctcttcctcttaaaacacacacacaaggaaccagagtgtctgtaggatgaattcccaggccatagcaactgcaatgtcctgagatctaagcagttcttggctggccaggcgttaagcccttttggggaaggagacagcaagcctgcttttcccttacacagccctgtcgtgaaaacaagctcttgtttcttgggggtttttttgttcggtttttagctaagaatttccatccctcctgcagtgataaaagataggcaagggaagctcaagggtttgatctcaaattttcttccacctaacttgccccttcaccccaatatttggaaataaagggagggaatttgggggaagttgagggtaagtttttggtcaagatgattgacccgagatgtggatgcagcttagacgatgagggagactgcaccaccctgcagggtcacctgcctagccacaggtaaacgagggatcggaaagactgtagaaaattcatcttccttcacacacatctccttccccctccccccattccagtgccggcgcgctggctggctggaagccggcgctttggaggcgccggagagtgggtctaagggtgatatttcggcatacagaacctgagaccccacccgagccaagagggaagagagagggtaaagggattgaggagggggcggcttgcgccctgctcgggaatgcaccgcgcgacagcacccggaggtctccggtgtccggcgcgcaccggtaccactgtcttccactgcggtagcatcccgacatgacattgcagctgcaacaaagcgccggcctcggccggccgtgggagccccacaccgcggcgaggccccacaccacgcagaggggcagtggccgatgggtggggggctgtggctgcgggcgtggggagcgcgaggtaggccgagtagggggaaaagccctcaaatgcgcagaagctgggcggctacctctagcgtctcctccagcaaagccagactgcaaggaaaacaattcgtcttcattccccagccccggctgagccctgagattcccccaaataacctagtcgaggccctctggtgtgttgccttcccttggaaacccctcagtgcccgtaacccagtcggccgggccccgcgcctccctaagccccggcccggtgacccgcccggctcccggagagcggttccttctgctccggcgccgccgccacccccggtccacgcaagcgctcaccaggagaagggagcccgcgatcatcgtggctgtggctcggcgggcgatgcggctgcaggaggcgagggcggtgctgctgctcggagaggtccccatggctgaaccggggactcgcaggggcgcccggggcgcgcggggcagctggaatcggcggctgcttctgcccagcgccgcatccaccgccgcctcccgggccgggagcccatctacctccaacaccccatgtgcactgctgcggccgggcagaggagggaggcggcaagggaggctctaggggcgctcagcacctgcccagcggcgcggccgcccaggcggggagaagccgccgcgactgcagcccgcgtctccgggtgctctcctccgacagcggctgaggagaaccagggaggaggactgggcgcgagagagcaaaggaacgacttcccatagcgaagcttccagccactgccaaccaccctcctccgctgcccagactggtcggcgagggactgagtcggtggccaccgggcgcagggacacacgtggtggcgccgaaggggcgggggaccggccctttgtgatgtcacccgggaggaggccgggctctttgtgcggttggaaaggcgaaggcgttccaggtagagcggggagggagagggtgccccttggcgttcgctgaggaaattgcacgcgcctgttgacccagggaaagcgctgagaaagcatctcactcctgatctaactttacttattttttccgagataattccaactaaattatttcagctacatacgcctttccattgtttcggacacgatgattaaatcagagagcgatggtgaatagaccacagagcacttagatcaactgcgtgacgaaaaaggagacctgtgtgttgcttctcaaactttgctgccctgtggaatcacctggagagttcaaaacatatatattgattcttgggtcccacctctagagactctgatttaattggaacaggacaggatctggtctgggcattgaggtttgttgttgttgttgtttgtttgttttttaagttttcagggtgattttaatatggggcaaagattttaattttttatattttaattttaatatgggcttatgaatgcaattaaggaaatccaaactaaaaggatttaaaacccagagtcattggtgttgggtccatggatggtcttggagggacttttgaactccttgaaatgtatcaaaagatgcattttcctaatttaaaaatcaagagttttgaatcggattatccctgagattttttttaatcacccttcccccaaaaaataatgctaaaaatttttgagttgatttccaaaggccttgtcaggatgtgggtggtagaataggtagtattctgcttcagaaggagaactggaatattctcgtggatgttggtatctcacacacttctgaatgtaagagagcagctgttatccttttctttgtttcacctgggggaaggccgagtctcctgactgtggccaccatttctggtatcgtgttatccatcatctaggtactgacagcacatggcacactgtattgatattacctcttcagccatccagtccacacccctcaattgggagccctatggtgctgggcttatcctaggctcctttggtcccatttcaaaagaatcacactttttaaactatcagtttcaagatccaacacccagtgctaataaaggtaacttgctaagtcataggtaccaattatttgctttattagttaacatgttgtcctttgattctttgctctatgcacactttggtagaagctaaaattaatatgagggttaattccaatctattatttcaaacatttgtcagtattgtctataaatgttagagtgggaaaaaagctacaatatataacctctagtgaaattcaaaggagttctagaaaatattaccattaattatggagttttggggaaaggatgatggttggacttgccactctctagctattttcagaagttgaaagagtgagggatagatgctgtgttttcatgcataactgtatcaattttttcttcaaaaattcaaatgactggccaatactattataaggttgggttgtttttttttaagaagttacataggtattaaagaggaggaggagcttcaaatacgtttttatttagtccattttactccttgcatccaaactcacatttttcgtggtaatatatgattgatttgctctaaagagttgggcaactttagagtttagtgtctgggttactatgcaggtataagaagttcttctcaactatttgtcttcctaaaactaaaagaaaattgtttatttgtgcttggaccactttgaaacttcatgaattcctggtgttccattgatcatatcaagttgaaatttaatatacattttgagagatgaaaaaatttactcaattctgtttactactaacatttaaatacatgtccctctatagagtgatagattatagataatttgaatctagatgcagtgtgaaattttattactttg

SEQ ID NO: 585955 - DNA, 4001 bp, Homo sapiens
cacccagaggctccttcccaatctccctccctgccctgttgccaccacccagccctccagctccccattccagctcctgggataattctgctcttctctcggtactgggcaagcaaagaattgggtgtctcttgtgtctccccttcaccattccccctgccactatgtctggggtggttctctgtagtgtgtgtttggagagagatatggcctcaccctcttggcaccctccccacagttggagggctggcagggatgggggcatcttcccaaactgtgactcagcttcctgggtattttgtgttgtagccaactttgacactttgctcattagggactgtataggtcccaaggggtggggagaggggctggcttccataaaagatgttccacagatgggggttctggtcctgcccccatgcctccctctgaccctcctgctacaccctcagttgaatctggcaatgagaggtgaaggtagaaggattctaggagtgagactaaaaagggaatgtgggggtctcagatattgggctggaaccaggtaggaaggaggtgtcagggaggggtaggttggggaatccagataccccttattctggggagctaatcggcctgggaatggaaaaattaagagaaaggatttccaggccccagctgaaaatggttaggggtgcaatgagagacaggaaggcagtttctggtcctgcacctagtggctaggtctggagtgagcaaaggaagtttgaggaattgaggtgctgggtccccagggacttgaaggcagggtcagggaaaagaggaggggctggagatgcgggaagcaggggcagggcaggcagcagctgtggtgtttccgagttgcttcccagtagttcctctcagttccacttccagttgtttctatgccattaaattctttccaggcgagataaggggcccgcccttcccacccggggcgtgtcacgtgtactggtggtggggggcgggggcggcgaggtgagggagagtgcgggttcagacagacagaggcaaggggagcctggaaggggcacagagtgaagacggagcccctgtgcccccagaggcatctctcagccatcccagccctgctgaaccgtgagtcatgagtgcagagctctggccaagaacaagttttaggatcctctctgcaggctctgtgcacgtcccagacccgagtcctgactgtcccatttcagtatttcctaaagagatctcccagacctccctccctgcaactctcacgctgccacctagggagtccccatttggatgcccaaagaagcaccctctggcacctcctggagcctggagcccccagagcctgggctcagctgctctagcccgacatttgggattccgcaagcactttccttccaaggttcagctggccaccagttcagcctagtcctatcttcccgctagccccagcacctccagggcccaggggctcacctcaccaataaccacctctaccctggttccaccatctgactcccggagtccctcggtttgttcccagcccctctcagttgtctgcatcccatccaaaccctgacacatactgcccaccccaacacacacataccaccctctcctcccagacactccttcacagggagcctggttcccagcgaatgctcctatgtcctctgtcctgaacagaagtccttgctctggaagcactgctgagagctcacctgccacaccttcacctggggcatggggataggcgagaaatcccttgcctctccttctgggtctccccagaactctgttccttacctgggcaaccgagcagctgcagtgcctctgcacctgctctgtccccaaccccgggagggcggcgtctcagggcaggacagggaagtctccctcacttgtcccctgcaacaggggctgagccacaaccgactgtggatctcggcagcgacagtgaggagggagtctgcagcgagcaggggaggagaaggggaggaccaggatgaggtcagggaggggagcggagatagggcaggtcctcccacccctcccaggccctcccacatgccacccctcctcttctcctgcccccaccccagcccccactccctgtctagcatcactgtctcaccataccctcatctcaacccccagccccggtcttacctcccacgtcctttccctatgccatttttagctcaccctaatttttgcccaacttgacaccccccacccttcctgccatttcttttttccccaccatttctccacctgctgcccctcctctctgaccccagtggtttcctctcagcctatatccttcctcatggccagcccccttcccctccctcccccatgctcctctcccatctcttcccagccactgctctagcttggatctctggatcgcaccccatgtctatcacccagtgctggctccctcatcctctcaccagttctcccctggcagtctggggcagggagcaggggcagagggcaggaggcaagaggcaacctctttctccaactgggaccgtctctgggaccccaagtccccaccctgctccagtcccaccatttctatcttctcggcttatcccgtccccgagccactcctgctgtctgttctgttcagtccctctcctgtcactgccccctttgcattctcctacctcagcaagtccctagagaaagagcaggtgaggcttgggcactggcagggcaagggcttgggtgaacactgggacatacaagccttggggaggaagctggggttggggcggacaaggaaggaaagcctgaaggttaggaggaaggtttagggttgaagaaagggctagagacaggaggcaaatataagggtgggtcacctgaatagagggtgaagtggtggaaagcagggtggggggctggtgcctgggtgctgcgggggagcaggaacagaggcggggagaggtaggggctggaggaaacggacacgctgtctctggtcccaggcagaagactgacagccagaggacaggggggacagggagacagacacaccccacataagtctgttgggtgtttccctagcttcatctccccatgtgctgccctgacaaggagctgaaaaagagactttgctacagaggagaaatatcccagctgagtgggaacccactacccccagcttcacagtgaggactgggtctctctatcctgctacagacctcaccactgaggtgtaacttggccaagtcacgggtgaaaggtacgtgagggagcccatatgtgcttgattctgccacatgggtgacggcccaggtgtctgcacaccaggtcagatccccatggtggcaggtgtgtggtgttcctgggtcagggcgtgcctgcactgcatgtggctgtggccagatgcccagtaagctccatgtggccgagggcaaaggcacacatgggcttttgcgtgggtgtccccgtgtgtgtccgtgtgtctgggtgtgtgtggctgtttttttcctggctttgatggggaggatgaagtcagcatcttggacagagccaggctcagcttccttcctctgccttggcctgaagcccccagagccagcagtaggtagcagcttcccaaggatctcctggcaggaggtggggagccctgcagtgataggaagagggagggtctggagacagtatcacacagagggcagaacacagggtatgaatttcctctgacaccttcagatttctgttccatggtcatatcctttagtgtgtgtgtgcacgcgcgtgtgcctatgccctatgtcctggctttattatttaggaagaatggtcaacataagtacatttggcacagagagtggccagggacctcagagaagacagcaagaaggatggtcctgggatgttctggaagcccactgttggggtctcagagagaaatgtgggattccagatgtacacaagcttataaggcatttggggaagccactggaagcttagcagatatagtt

SEQ ID NO: 585956 - DNA, 4001 bp, Homo sapiens
aactgcagaggggtcaaggaacaatgacgcaggcaggggcagggaggctcctccctgcgagtccccccctcgcctctgctccagcacaggctcaccaccccttttcctctagtccccaggaatggaagtcgctctgcagattcctccaggcccaccaccaactcgcccacccccaccgctggctgaggcactaggtcccccccgtgaagtacaaagacccccactttggggcagagtgtgtgtgggtccttacctgggctgagggtgcgggcggttccctggatgctgtcggccttgtggggtcctcgcagcccatacagtgtcaggctgtacagagtcccggaacgcaggtcccggagcacggccgagtgccgcgtccccggcaccatcagctcgcgctgcagcagtggacgcggatgcggctccagagtgcttggtgatggaaccccaaagcggagcaggaaggagtcgaaggcccccggtggggcctcccagttgagcctcagtgaactggtggtcacgtcagtcacagacagctgggacaggcggggccttgactcctctgaggtctgaccagcaggagccagccctgcacggagtgggtgggggagaagggattggagacagaagcacaccagcttggtgacccagagcacgtcccttccacccccctccctgcccccgtttctctatctgtaaccagggacttgcagccacaggggggtcctgtggggcagagctaaaggccactcgcatccagcccatccatcctctctccctggtacccgcctcacgctctttccctgcgaccaccccttctgagcccccgtttctcccttctgagtcctaggctagaggccggagacgcctggtggtacctgtggtgccctcagctgagaggggccccaggcgcttcccttcatggaggccatagaggaggaacctgtagcgggtgctgggctccaggcctgagatgaggatcttgctctggtcgccgtccacgagcaaggcctggggctgcccattcgtgtcctcatactggaccacgaaggaatcaaaggggccctgggccacgctccacgagaggcgcatggagtctggggttgtgtcggtcacggtcagcactcctaggcggggctcttcaggaggctcaggggcctctggggctaactctggggctggtgtgtcctcttctggggctgcgtgggagaagcccaggggagaatctgagtgaggggcgccatggggtgctccatttttatcttccaggcttggcccaaggctgaggtgggaagtttataggtccaggcccagtcagacaatgaagtcgctgtggcctcgtgactcctgcgagctcccgcgctgtctgagtcaggtgctcgcttcccccttccacaccccggtgtcctgccgagcccacctcgagatatcacaggctctggccccacccatgccgggatacattcactgagcttgaggagtgtggtgctcccttctgagagaagctgagggtggaactggctggttgaggtgactggcaaatcccaccagccgtgccgtggtcaggcctgtctgaggtgggcatcagcgagctctggaagaggagcctgtaccacaaatgcagccactgctgttggtttctgtgtccccgctcattttgttttccagtgatgttcctcttaagaaaatgctcctgactcatccacggcagggaggtttgccactatctggacaaggccacccttcggggaggcgacagcagccccagcgagtaatgaggagcagcggcagtgacggggcagagtcggggctgggagattagagagcccctcccagggcctttccctcccgcctggcctggctcctgctctggactccttgatggatgttgaagcccacagggctgcagactcctcctccttcctgggcacaggccaggtcaccccactccggcctgcccactcctgcagtcatctttgtcttcagaccaaatgcacaagtactttgttaaaggtatcccatctgcagctcaagcctgcagcccctcaccttttggtggctcctcaggcctctaggccttattcacctttcccctttcctgtgccacttctcctctagggcgccaggctgtccttggcatggtccggaaggcaaagtaccgggagctgctcctatcagagctcctgggccggcgggtgcctgtcgtggtgcggcttggcctcacctaccatgtgcacgacctcattggggcccagctagtggactggtgagtctttccctggcctctggcagattatggagcaatgacccaaagtgggatttcctcccagctcatgcttagtttcctagtgaaggccagtggctctcattcttctctggaacccgggagcaccccttcccaagttctaagttctcctcacagcttgagcctaggcgtctggctccagccttgtctttctcctgcacagcatctctaccacttcaggaaccctcctccgcctgccagagacatgaagattctgctcatcattgctcagctcctcagagtgggccgggaggggactagaagagctgcatgatggtggctgagacagggtcaccttgggaaggcttgggagccaggatgagtgtcgggctctcgtgtgtgcaaaaggtcagatgtgactgctgctgtttgcctggtttctgacccagtggtggggtttgagcaatgcttctctgcccttccatggaaagtggaaccagaaatggtgccaaggctgtggctgttccctttcgtgtaaaatggtgctgttattactctgtcttgaaataggaaggtgggatttctggggaggctggtgaaggagggcagggttcttttctctacgtgtcatgttaaaattgccaaataaagtacctctgcctgtgatattttctggatgtcctttatttactgtgacgtgtgtttgggtgccttgtttaggggtagaggtgaagtctgagctttgcctcattcagagaggaaaggggtcaggggttcactctgacgttcaggccattctccctgtggagtggtgagggtgtacctaatctcctaaaccacggaatttctgttagggcctaaaaaagcaaaagcctagtatagttcaatttgtgttggaatgaaagtaagagacaagtgtcttagaagcctgtcattgttttgtgagggcctttaaatatcctgtactcgtgggccatgttgggcccttgtacgcccaggtatacatgagcttgtgtgcacctataccctgatacagatatacctggtagggggaggtgctcaggcactggaatgagaggagttaacggggaaggacagggttatttctgggccaagattcagagtttcccatggacacccaggtgtccggggtgcccccacaactctgggcctgaggccagttgcacttcttggctgtcacgtggtttcccagcttagctgggctgggggaggagcaaggtccagagtcaactctgccccgaggcctagcttggccagaaggtagcagacagacagacggatctaacctctcttggatcctccagccatgaggctgctctgggggctgatctgggcatccagcttcttcaccttatctctgcagaagcccaggtcctggaggcgggatgctgggtgcttggattggggcagggctggcatcgggacccgattcaggagtgagggagagcaggggtggaggtgtcagagcgaagtctgactgctgatcctgtctgttctccccaggttgctcttgttctctccttctgtggttcatctgggggtccccctatcggtgggggtgcagctccaggatgtgccccgaggacaggtagtgaaaggatcagtgttcctgagaaacccatctcgtaataatgtcccctgctccccaaaggtggacttcacccttagctcagaaagagacttcgcactcctcagtctccaggtaaccagaccccatgccctcctgctgcttgtg

SEQ ID NO: 585957 - DNA, 4001 bp, Homo sapiens
actgcagaggggtcaaggaacaatgacgcaggcaggggcagggaggcttctccctacgagtccccccctcgcctctgctccagcacaggctcaccaccccttttcctctagtccccaggaatggaagtcgctctgcagattcctccaggcccaccaccaactcgcccacccccaccgctggctgaggcactaggtcccccccgtgaagtacaaagacccccactttggggcagagtgtgtgtgggtccttacctgggctgagggtgcgggcggttccctggatgctgtcggccttgtggggtcctcgcagcccatacagtgtcaggctgtacagagtcccggaacgcaggtcccggagcacggccgagtgccgcgtccccggcaccatcagctcgcgctgcagcagtggacgcggatgcggctccagagtgcttggtgatggaaccccaaagcggagcaggaaggagtcgaaggcccccggtggggcctcccagttgagcctcagtgaactggtggtcacgtcagtcacagacagctgggacaggcggggccttgactcctctgaggtctgaccagcaggagccagccctgcacggagtgggtgggggagaagggattggagacagaagcacaccagcttggtgacccagagcacgtcccttccacccccctccctgcccccgtttctctatctgtaaccagggacttgcagccacaggggggtcctgtggggcagagctaaaggccactcgcatccagcccatccatcctctctccctggtacccgcctcacgctctttccctgcgaccaccccttctgagcccccgtttctcccttctgagtcctaggctagaggccggagacgcctggtggtacctgtggtgccctcagctgagaggggccccaggcgcttcccttcatggaggccatagaggaggaacctgtagggggtgctgggctccaggcctgagatgaggatcttgctctggtcgccgtccacgagcaaggcctggggctgcccgttcgtgtcctcatactggaccacgaaggaatcaaaggggccctgggccacgctccacgagaggcgcatggagtctggggttgtgtcggtcacggtcagcactcctaggcggggctcttcaggaggctcaggggcctctggggctaactctggggctggtgtgtcctcttctggggctgcgtgggagaagcccaggggagaatctgagtgaggggcgccatggggtgctccatttttatcttccaggcttggcccaaggctgaggtgggaagtttataggtccaggcccagtcagacaatgaagtcgctgtggcctcgtgactcctgcgagctcccgcgctgtctgagtcaggtgctcgcttcccccttccacaccccggtgtcctgccgagcccacctcgagatatcacaggctctggccccacccatgccgggatacattcactgagcttgaggagtgtggtgctcccttctgagagaagctgagggtggaactggctggttgaggtgactggcaaatcccaccagccgtgccgtggtcaggcctgtctgaggtgggcatcagcgagctctggaagaggagcctgtaccacaaatgcagccactgctgttggtttctgtgtccccgctcattttgttttccagtgatgttcctcttaagaaaatgctcctgactcatccacggcagggaggtttgccgctatctggacaaggccacccttcggggaggcgacagcagccccagcgagtaatgaggagcagtggcagtgacggggcagagtcggggctgggagattagagagcccctcccagggcctttccctcccgcctggcctggctcctgctctggactccttgatggatgttgaagcccacagggctgcagactcctcctccttcctggggacaggccagggcgccccactccggcctgcccactcctgcagtcatctttgtcttcagcccaaatgcacaaggaaacccacacaagctggcttgctatagccaggcacagcagcctcacctgtcattcccagggcagagaccgggcccaggcgctttcccccaaggagcccgtagagcagaaacttgtatttcttgccaggctccaggtcctctacggtgactgtgcgctggtctgcggccacaggcactgccctgggctgcccgtccgtgtccctgtactggaccacgaaggagtcaaaggggccctgggctaccgtccaggacaggcgcagagagctggaggtctcctcagccacggtcagttcccccaggtggggaggtagctccttctccaggggagctgtgcagagggaggagggaaagctcttagtcacatgctgcctttgcctaagccctggcagcctcccggaggtgtgaggttctgggaaatggtccctccagtgtagccccagggacagctccttgaggagacacacaggcctgctcccgccatgccccacaggaatgagggagaacagccccctcctcctctggaggctgctgcccaaactccttcctgccccgccccttccctgctgtgatcgaggatgcgccaaattcattacagatcatctcccgagggatgggtggctgggggtgcagagagggcctttgtttaccctgacccccagcccctgagcaagaatgaggccagagctgagagagactccccggaggtctctgggttgtcacggagacaccccaaacatcgagagctggtctgggcagccggccaatgcacggctcccatcactgccaggctgtgatctcccccttgtccccttgtggccatcagcctgaacatccgtgcctcctgcttccccagccccacactgaccccactgggccggggcagccagggtggggcagggagaagacaggggattagctgggagaacagagggcagagcagaggcttgcccgggtggggctggggccgatgggtggggatctgtaccccgtccccacagtgagggtttgggaagagaattacggagtcccagggacccaggcccagactggccggctgctctgtcctcctctgggcatagtgactcatggtcctgggagtggggtgagggtcggtgacccaccacaccccttcctcagggagctgagtcataggcatagtgacaccaggtttttccatcgtctttccatagccaagccctcccttttcttccacccctcggctccgagtcagggaggagggaggaggatgggaaccactactgagtccagcgccattcccagcattatgcaggtgaggacactgaggtcccggggatgaagcggcttgtccatggtcaccctggcaaaggctaggactggaactggaacacagatctgctggccccaaagcccgtgtcccttttatttcctcagcagtcagcgaatgaaaggaagtaatgcatatgcttcagaactgtgcctgacacacagagggactcactttcggagttaagatggttgtgtcagggctgatagagggaatctcacgggaaggctgcagggccagctctgagggctcggatgagaggcagctctggaaaaggtggaggctggactgggactcacctgtggtgctgtcagcagagatggggcccagtcgtttcctgcctgacagaccatagagcaggaacctgtatttcctactgggctccaggccctggactgtgacctcccgctggttggctgccaccggcaccacctggagccgaccatccttatccttgtactggaccacgaaggagtcgaattcgccctcagggaccgtccacgagaggcccacggagtcaggggtcgcatctgtcacagtcagctcccccaggcggggagacggtttggtgtctggggctggaaaagacagtgaggtgcatggagagtgggatggaggcaaaggggccacggagcttcctgggctgctatggctctgtgagccggtcccaggaacgggagggtgactgggccagg

SEQ ID NO: 585958 - DNA, 4001 bp, Homo sapiens
ttttacatcacattcttttgtacatttcatgaatacttgacagaaaacattgcttcacccagtctctaggtctcctaagacacgcatgggtgtagttcagtgcttacctacttggctacacccctggctgaggtgccatgaggtcaatgtcactcaagttcctggccagccaaactcccgcagcaaagagtcccaaatttagtatcaagttcctggaaaaacaatgtgttttattaaccctgtggtcactgagtcagttgtacagttaacgaaatgtactggggggaaaggcttccatcaccaccttcccgaggcgttgatacgtggttgtgacggcaggttgctcaagacccacgtgggaatttggagttcatttttgtgcctagtaagtgtaaggtcaggctgggcgcggtggttcacgcctgtaatcccagcactttggaaggccaaggcaggcggatcacgaagtcaggagctcgagaccagcctggccaacatggtgaaaccccgtctctactaaaaatacaaaaattagctgggcgtggtggtgcgcgcctgtaatcccagctactggggaggctgaggcaggaaaatcgcttgaacccgggaggcggaggctgcagtgagctgaggtccgccactacactccagcctgggcgacagagcgaggctgtctcaaaaagaaataaatgtggccgggcgcggtggctcacgcctgtaatcccagcactttgggaggcagagtcgggtggatcgagaagtcaggagtttgagaccagcctgcccaagatggtgaaaccccgtctctactaaaaatacaaaaattagctgggcgtggtggcgcgcgcttgtaatcccagctactggggaggctgaggcaggagaatcgcttgaacccgggaggcagaaggggcagtgagccgagattgcgcctctgcactccagcctgggcgacagagtgagactccgtctcaaaaaaaaaaaaaaaaaaaaaaaaaaaggccgggcgtggtggctcacgcctgtaatcccagcactttgggaggccgaggcgggcggatcacgaggtcaggagatcgagaccatcctggataacacggtgaaaccccgtctctactaaaaatacaaaaaattagcagggcgtggtggcgggcggccgtagtcccagctactcgggaggctgaggcaggagaatggcgtgaacccgggaggcggagcttgcagtgagccgagatcgcgccactgcactccagcctgggcaacagagtgagactccgtctcaaaaaaaaaaaaaaaacaaaaaagaaatgtaagatcaaacgcaaagcccagctaaagcactagtccagggccgaaaaagcctgtttacgtgctagcacttcttcccttgatcagggtgacattacagatacagccacatgacagaaagatcgcttttgccacacgggaactctcctggccagggatctcagtgaggcacagccagagctacgaagacgccacaatgctggtaatgttaaaaaacaaaaacaaaaaaccctgaggcgccagcctcgcaagaaaggggaaatacggatttaagggccagaaaaggaccaagttcctcgggctcggttacctccggaagtcattcctatcagtggcaaagcggtagacgccccgaagccaatctcccacgttgtccggtatttcgggagtttcattagccgagccagcagcgctcaccgggacagtgctggaagccatagtggaaagcttcgcatgggcctcggtggaggaaccgtatcggcgtcgccggtgaatgacgcacctccggtctggcacttccggctgctaccggccggcagtgggggcgctgttcgcttagtccgacatccggaagagggacggccctctgctgcgcctccacgaactctaggaggggaggagcgcggcccggttctacggtcccctgctcccggtcccacctccggctctccagccggtaactgtcacgcgtgctgtgatcatttaattggcttgggaggaggatggtggggacggggctgtcccagcctgtggaggtgggggtaggggctatctcagcaggggaagcgtagctttggggaatgggttttgccaagaaagtctccgccaaaagtcttagaacgcgcagtactgaagggggcgcactccaaacttgtcacctcgccgcctcttgcgggcgtgcgcctgactgcgtctcagtctaggattgttagggggaggctagccttgttctcccgctttacagacccctttcctcccactcacatcccctctctgagctgcgccactagcacatggtgcagtgcgtcttagaggcgttgctgtcctctgcttggaggcttccgggggtcttccaggactggggaaggcgctcgcctaagaaaaatccttcaggttccgagtcagaggaggaggagcaggtggagaaaggggtgtccttgggatcacgaatagtctccaggcggcattgctcctgccctttgggtgcctccgctttgtccccaggtcggttctcctgctggggactggatccaggcagccccctctgagtttgcaggctggaaccgccggcagcagcgaggagtgttcgggagagggttgcagagttcaccgaggtttggtcccttccttcagttcggtcgagtccagtctcccctgttccgggccgggtcggaaacgctggtctcagagccgcggagctggacctacaccgcagctagtgggggtgaggcccagcctcccgccccgcccagcccctgggccgtgcgcgccgccgccgccgccgagagtcctcgccagggtcccccgcctccaccagagggcgtccgcctcccgcgcctgggagggagtctggcgccgcaaccccgaccgcggcgcggggtgggttcgggcggcccttggaacgctccggccagggatgcgcggtgagagctgcgggccccgaggcttgggtctggggggtgcggtgggggcgctcctggagggacgggacggcgtgggaccggggcgagggtcccagcccgggagaacccccacagcccagcccaagctccctcccgctttgctctgcatcctctcccttaccaaggaatgcctgcccttccagtgccccggcccagctcgagcctgcatccgagtagcggttctcgaagcagctggggcagcaggggcttcccccaggcagggcataacgtcccccgcccagaggcccggcgcagtcctggcaacagaagtggttctcatgccagcgctgtccctccgcctcggtgcagcgccaggagaagatcagctgggagagggagagggagaggggaacgtttcattcattcattccctcattcattcatccagtaaccacgccttttacccagttaacgctaaagcacgtctgcacacattcccatttaattcactcagccacttttggacgcagggaggactgattggcttagccaggatcccagctagcaagtgggacaatccccagtgcgacctgggggtctggactcccaacccagggctccaggcttccttttatgctgacatcaagggaatttctagcatgatgaggcacagcactgggcactcggcatctactgagatgagcatgtgtccaagactccctgctctagagaaattcgatgagtccaggaacatttgagggactctgcagtgggggaggccagagagaagggcactgggtcctacatgcccagagctcaagtcagaacacagggaacttggtagtcccaggctggttcctacttctccccactccctgatactgggagaaactgtggcccaggagagtgtccctttgtatcctgccactctggactctgggcagacccccagttcctcccctccaggctgtacctggtcacaagccgggcagcgcgggcgcagcaactctgcatgatgacggccgcagtagagttgtccatcatggtagaagtagatgaggtttatcaggg

SEQ ID NO: 585959 - DNA, 4001 bp, Homo sapiens
ggtctgtcctctaatatttctcagacatccgagttagaactgaggttcgttaatctggggtccgcattgatttcatatctgtaatgatacccttccatgtgatccctgcaggcatctctgatgttatgcatccacttttttatccccttgcggttcaaatacaaaaccaggaggaaaatagcgcctatcagggctaaaacaatacccaggaagacataagaggtttgcagggatgggggaagaatcgggtcacagtccaggtcagcactgttgagttccaagaggacccgattcctcattttttccggatatgcacaggtgagccggtctttgccctgcactacctctgtttccttgagccaggtcaccatgtctgccatgtggcagtcgcagacccagggattgttgtccaggaaaaccctaatgtggggtagaccttgcaactcagccagggtgccattgtgaaggaccttgagggcattgtcctccaggtggaggctttctagatgtgtcaggttgcggaaggacacgtaggtcaggctcaccagcgaattattacttaagtccaggtgcctgaggctgggcagttgggccagcacatcccgcggcaggtaaaggaagtggttgctggccagctccaagcggcggagcccctgcagtgcacggcccgccagcagggccgccaccaccatgccctcgaagctccggttctgccgctcatcttcagggggcacgatgtggttcaggatcagttccacaaggggactgggggccgagacgctggcattgctgcccgagaaagcgaagggactgaggtcggccagtgggttgtggctgaggtcgagctggcgcaggctgggcagatgctcgaaggcgcccgcgcgcacctcgtccaggcggctgccgctgaggttgagcgcggccagctccgccagcggcggccggcgggcgaaggcgccggcagggagcacggccagctggttgccggtaaggaagaggttgcgcacgtaggcgggcaggtccgtgggcacctcggtcagattgcggttaacgcacttgactgtgcgcgctgcctcggagcactcgcacagcgcggggcactggtccggcagcgggggctgggcggacacggcggaagccaggaacggcgccgaggaggagaaggaggatgccgaggaggtgggagaagacgaggagacccagcccaggagtaccagcgctagtcgcgccagccgcagacgcccgtccccggcggcggggccccgggagcaccccccaggcatcgcggctcgcgtttccccggagctgggctgggacggcgcccgctccgaaggctcgggaggctgggcccggagggcgcgagccggcggaagcgtctggaaaaaaaaaactttcctctcgtggaaccgagggagtggcgccgcagccggaacttggctaaccccctcgccaccgggcgcttccctcaggggccgattcccccgccccttccctccagaaagtacgcacggcgggtcgggacgctccgctccgcgctcctgctcccgctcctcttcctgccgccgccctggtgccacctcttcgcctcttgttggcgcccctcgctggatcctctgagggacctgggacaagcaggagagaggcgtgaacagcggtggctgccgcggcttccggagtgcaaaaaccggccttttcgagtctagtcgtctccagtctgtcccagagacctccttccaaaagcccgccccggcctcgcctccccaacccctccggtcacttttactccggagggggacgcgcatccgacacccagaccgcaaagtcttccttcttccctggcccacactaaataaacccgaccggcctcccgccctccgcctttcccgaggagactcgtctcccgcgtctaacttaccgcttaatccccaattccttccctaccaaacttctccctctcccgttccttcctgcaccgcctcggcggaaggtcggcctccgggtgtctccgcccccgcccagacctctccaccaggtcccggttaggatgcgagggaagtttcaggttacaggactttttgatctctttttgtaccttctcgcattagcaggaagtggagctacaactgtcgccccccagcccgcgccccgccagcccctcggatctcaaaggggttcaagtcatctccaaagaggaggggagagtctgggaacaaagcagcagtgggactcggggtacagtggcaacccgaaccaaccctactctccacccgaggatggggaggggccccaacgacgcctcccgggtctctcccaggccgcgggctcccactgctcacctccgcgtccgccgcctccagaaccaactctgagttccaccagagtagcgacgacttcccggctccgcgttgcgggcgccgactctcttcgcaccccagcccctggcccaacctcccaacctccgcagctgggaaaaaccaacccggggggcgggggagggccaggactgtcggggagattcccgacgcgcggccaacctcggcagccgtaggtagggggatttaagaagagagactaggggagctgggctgcgcgcctcctcctggtggaaattaacgaggaatgtgccggaaaaggtgagggaatccctttctctcccccctccccgacatccttgggtggttcctcattttgcatactgtatttaccttggactggagcaaaaccgctggtgaatctcgtggaattcaccctgattcaggcacctttggcagtgacgagatagatttaggcatgacagagcagcgcgaagcagcagcagaaagaaatgagctgaaaatctactgcggcagcagcaaaggcacggcaggttgtatggaagcttcagaagctctccccatcaaagtggtacttgaggccgcaaacttcagatttaggtgtaattaatgccttcccgcctgtcccccccgccccctcacttcttgggtagtgatggaacttgtgaagagagcgcgccaactttaagagagagagagagagaaagaaaaaaaaaagattagtggagaggagattcattcctgattcattagcttttctcttaccaaaattaaaagcagatggaagagaaaggcagccaaaggcatcccagaaacaaaaggcaaatagcaaagacttgagtctcccggaaagcggacccgcccccctccccagatgtagcgcggtgtgtcaagtcacttctgtggagaaagctccaaggatgaggagtggggattgcaggagctgacctgggagagaagtttggtttcaaagtcgattgtcccagggggcatctggcagatggtgatggagaggatggggttggggagagggacaaattgaatggttggttaccggaaggatctgttattataccagacaggttttgggttctgaaagccctatcgttgctctctgtaactccacatcccctttgtcccaattaaataatttccccgaagggataagaaggttcttccaggcttcttcattttagagagaaaatggcaattagggaaaacatggttcggaaatttaagacctggtcgtattaaaaaagatcaaataaggatcctgaggcttgtgcctgggacatgtgcctttagtgtgaagaaagaccccaactctccaacggacgcctgattacttttatagaaagagatagtctgcaaagccgacagcaaaaatggctcagacaaaagctgaaaacactggaaactgcagagatttgtgcacaaaagctggtttcattaatttgcatcttcagcacgtttatctacatctcttttcttatttttaaaagtgttttgcaacatgaatgtaaaacactttgaaaaagaatctctaaagctgtagtcatgttctgtatccggattgtggtggtggttacataaacctatacaacgtgttataactcatagaactttgtaaaccaaaagagtcaattttactgtatgataagtttaaaa

SEQ ID NO: 585960 - DNA, 4001 bp, Homo sapiens
agattgcggttaacgcacttgactgtgcgcgctgcctcggagcactcgcacagcgcggggcactggtccggcagcgggggctgggcggacacggcggaagccaggaacggcgccgaggaggagaaggaggatgccgaggaggtgggagaagacgaggagacccagcccaggagtaccagcgctagtcgcgccagccgcagacgcccgtccccggcggcggggccccgggagcaccccccaggcatcgcggctcgcgtttccccggagctgggctgggacggcgcccgctccgaaggctcgggaggctgggcccggagggcgcgagccggcggaagcgtctggaaaaaaaaaactttcctctcgtggaaccgagggagtggcgccgcagccggaacttggctaaccccctcgccaccgggcgcttccctcaggggccgattcccccgccccttccctccagaaagtacgcacggcgggtcgggacgctccgctccgcgctcctgctcccgctcctcttcctgccgccgccctggtgccacctcttcgcctcttgttggcgcccctcgctggatcctctgagggacctgggacaagcaggagagaggcgtgaacagcggtggctgccgcggcttccggagtgcaaaaaccggccttttcgagtctagtcgtctccagtctgtcccagagacctccttccaaaagcccgccccggcctcgcctccccaacccctccggtcacttttactccggagggggacgcgcatccgacacccagaccgcaaagtcttccttcttccctggcccacactaaataaacccgaccggcctcccgccctccgcctttcccgaggagactcgtctcccgcgtctaacttaccgcttaatccccaattccttccctaccaaacttctccctctcccgttccttcctgcaccgcctcggcggaaggtcggcctccgggtgtctccgcccccgcccagacctctccaccaggtcccggttaggatgcgagggaagtttcaggttacaggactttttgatctctttttgtaccttctcgcattagcaggaagtggagctacaactgtcgccccccagcccgcgccccgccagcccctcggatctcaaaggggttcaagtcatctccaaagaggaggggagagtctgggaacaaagcagcagtgggactcggggtacagtggcaacccgaaccaaccctactctccacccgaggatggggaggggccccaacgacgcctcccgggtctctcccaggccgcgggctcccactgctcacctccgcgtccgccgcctccagaaccaactctgagttccaccagagtagcgacgacttcccggctccgcgttgcgggcgccgactctcttcgcaccccagcccctggcccaacctcccaacctccgcagctgggaaaaaccaacccggggggcgggggagggccaggactgtcggggagattcccgacgcgcggccaacctcggcagccgtaggtagggggatttaagaagagagactaggggagctgggctgcgcgcctcctcctggtggaaattaacgaggaatgtgccggaaaaggtgagggaatccctttctctcccccctccccgacatccttgggtggttcctcattttgcatactgtatttaccttggactggagcaaaaccgctggtgaatctcgtggaattcaccctgattcaggcacctttggcagtgacgagatagatttaggcatgacagagcagcgcgaagcagcagcagaaagaaatgagctgaaaatctactgcggcagcagcaaaggcacggcaggttgtatggaagcttcagaagctctccccatcaaagtggtacttgaggccgcaaacttcagatttaggtgtaattaatgccttcccgcctgtcccccccgccccctcacttcttgggtagtgatggaacttgtgaagagagcgcgccaactttaagagagagagagagagaaagaaaaaaaaaagattagtggagaggagattcattcctgattcattagcttttctcttaccaaaattaaaagcagatggaagagaaaggcagccaaaggcatcccagaaacaaaaggcaaatagcaaagacttgagtctcccggaaagcggacccgcccccctccccagatgtagcgcggtgtgtcaagtcacttctgtggagaaagctccaaggatgaggagtggggattgcaggagctgacctgggagagaagtttggtttcaaagtcgattgtcccagggggcatctggcagatggtgatggagaggatggggttggggagagggacaaattgaatggttggttaccggaaggatctgttattataccagacaggttttgggttctgaaagccctatcgttgctctctgtaactccacatcccctttgtcccaattaaataatttccccgaagggataagaaggttcttccaggcttcttcattttagagagaaaatggcaattagggaaaacatggttcggaaatttaagacctggtcgtattaaaaaagatcaaataaggatcctgaggcttgtgcctgggacatgtgcctttagtgtgaagaaagaccccaactctccaacggacgcctgattacttttatagaaagagatagtctgcaaagccgacagcaaaaatggctcagacaaaagctgaaaacactggaaactgcagagatttgtgcacaaaagctggtttcattaatttgcatcttcagcacgtttatctacatctcttttcttatttttaaaagtgttttgcaacatgaatgtaaaacactttgaaaaagaatctctaaagctgtagtcatgttctgtatccggattgtggtggtggttacataaacctatacaacgtgttataactcatagaactttgtaaaccaaaagagtcaattttactgtatgataagtttaaaaataaaattaattactcattggaaaaaacctgtaataatgctctggcatggtattaactctggtcctgatctgaagaccaactgctttgttaggagagtgagatacactttagaatttagaaacataatatatatactcatctgattttcaagacaactcagaggcaagataaatattgttagtattattgcttgttgctattattgttgttgttctgttgtacaaatgaaaaaactggggctttaagttagcttgactgagtgtcttccacttgccaagcactgtgctgatcacagatattatctcattgactcttcacttcggtactcaagttaggtcctctcactccagttttacagacaagaaaattgacgcaaaaataaattacataacttgttcaaatgagtgatggaggtgggaaccaggcccagatttgcctgcctcccatatagtacatcccacattctgcctctaggcaagattaaggagtttgtgcaaagttctactctgttccacttaggcagaacgtaaacctcacctcttgttccctttttacttcttctgcctccaccttcctgcagctggcaattgcttatggctgctgaatagggacccagaaatttagggtcatttctagctctgacacttgcctgctgtgtgtcttctataataggaccactaatgaaatttgaagatatttccatgaaaattgagataaatatgtcacatacttagcaaaatcatctgttttgatagttctctcctaaattacccccctcatgttatttattgtaatccactatatctctgtaactatgttagtaataggaatacaaggataaataatttaaagtctctttaaggtagagttgccagatttaacaaatctggcaaaacaatgaataccttttaatgaacaaaacaatgaataccttttaagtgtgtcccatgcaatatttgggaaatgcacccaaaattttgttgcttatagttgaaattcaactttaattgagtatcctgtatttgatctggcaatac

SEQ ID NO: 585961 - DNA, 4001 bp, Homo sapiens
caggctggtctcgaactcctgggctctaagtgatcctcctaccttggcctcccgaagtgctgggattacaagtgtaagccactgcacctggcctcttaagtatttattaaatctgttcacttttctcatatccatttgcctttttactagtcctctttacacctaaagtttccatccagtcatgaggggaaaggaagagcaccacaggacagctggagattcaggtggggactgaagttttacctttcctccaaaagtcataggctttgagtgagaatgggtccctcacagcatccactttgctactttttacctatctggctgtaaacaaggaacttattaaaaagtcatggcaaaaattgcaattacttttgcaccaacctaataccttccatgcttgtttcctctctgtagaatgggaatgagaatatgaactacctcatgggactgctgcgcacaggaaatgagtccatcaatacatgcaaagcacgaagaacagagacagggacacaataaacaatctgctcttctgattattgcatactagggttatagtttttcaggctctcgctgcactatgaggccctttcttagcatcagcatggcagtgattttacatgttatttttcaaatagctatcaaattaatatttgtctcttcctctactgtaaattttatgaagcagataccaagtctgtctttgctcttcttagcacagtgcttggcaaaggaaagcactgaaatatttgttaagtaaatcttggaagtaaagcaaagcaataaagcaaaccagtgacaccagtggttaccagtctgtagtttcggatgtcttcagaagttgtatgaatgtttcctatctgctatagttcttctccatcctcactaatataagctttcaaatatacccatgttcaggttccaaagattccagtttgactgggatggggttggccaaggccagtaatgaagactctctaaataattctaatatgcaagtcaggttggaaagctccggtgctgctcccaccagcttcagttctggcgtgaaggcctccaacctgacctctgcttttgaatttgaccaactgccctcacccttggttgaattatcatttcctatctacataatagaggaaaaaatatgggaagcggcagctttacgggcaggacttaggaggatggaacaaacgagtaaggttcgtgctgttcagacaattgtaatcctggcagcaaacctgttgggcgactccaggcccacgcaatcgccaacccactctcattcagggcgttctgcccctagagggcgagcgcatcaggtcatgaacctttttttttttctttttaatgagattttatctatactaagagccaacacagagtttcctactgtgtaaaagaatggtggctttgattgccttaaaggctgaactccgcaagccatcccttctgggcgttgctccccaaggtagatcactgagtccgtttccttcccacttgtctctcgctccacatccgcccacctctgcccctttccacggtccgtttacccccattcttgaacgattccatcggaattccccaaccctgttccaagtgtgaccccaagatatgaggccgcccttcctgaagccaccgcaggctcctccagcaggcagccccgggagcagggagctgggcggccgggggccccgcgcgccacgggaggcagaggtcgctccccgatcgcggaaaccgggactcacgtgtggatctgctggaggtcagggggccggtaacgttcacctggcctcggaaggcgggtccccgagcgggaagcgtctcgcgcagccgggctgcggagccaccccctcggcgggcgatcctctcactccctaacttgggagccacaagccgcgagtccacggcgctgggcgaaaagagtcacattccctccccactccctcaagggaaagggagcgaaacacgctttccggacccggcacaacaggtccttcgggcagccgcgaggttgggaaggccaggggcgactggctgcggaagagggtagagcattccacgggcgcatttcctgaggaggggcctctccacttacggatcccctgtcactttattgatccccagacccacagcaaatcctgagtttgggcagcaggcattataccaaaggcgcgggtgggagtggagttctggatgtgcaacacggcaccaatctgttctgtccgagagcgaagttaggtggtgcaggaaaagagcctttatgcgcgccccaggacctgactctcggggcgatcggcgaccactcaccttgtgcctgcgcctccatggtggctgacttcgagctgagggcggcggggacaccctggtgcttcccagagcagatggcagctgcgcccaggctcagaacgcagctggccccgccgctcgctcccactcctggcacgcgtgtcgcgagcgctgcgcggagggggttggggacgcaggcagccgccactagccgcttctggttacctccgccccttccagtccacctggcccaaaccaagctggaacaagctcgccgctgggcgccacctgccggcgctctgtacagccggcggaaggcacccactcccggcgctataagggcataacgcagagatattgcaggttaggttccagacccccgcaataaagcgagtattgcaacaaaacgagtcacacgaatttttcagtttcctaatgcatataaaagttacgtttgcactatgctgtagtctgttaagtatgcaatagcacgatgtctagaaagagcaatgtacctaccttaacttaaaaagatattttatttctaaaaaatgctaaagatcatcttcacctaatgggaatctttttggtggtggaaggcattgcttggatgttgatggctgctgattgatcctggtagtgattgctgaaggctgcaatagctgtgtcaatttcttaaaatgggacaacaatgaagtttgctgcatcaattgactcttccttttatgaaagatttttctgtagcatgcaatgctggttgatagcattttatctacattataacttttttcaaaattggagtcaatcatctcaaaccctgccattgctttatcaactaagtttatataattataaatcttttgctgtcatttcaacaatgctgtgaacaacttcaccaggagtagattccatttcaagtaaccattttctttgcttgtccataagaagcaactcctcaaccattcaagtcttatgagattgagcaatttactcacatattcaggctccacttctaattctagttctcttgctatttctaccatatctgcagttacttcctgctttgaagtcctgaactcccaaagtcattcaggagggttggaatcaactttttccaaactcctgttaatgttgacgttttgacttcctcccacgaattataaatgttcttaatggcatctagaatggtgaatcttttccagaaggttttcaatttactttgcccacatccaacagaagaatcactattaatggcagctatctatttatttcttaaataataaggcttgaaagtcaaaattactcctttatccatgggctacaagatgaatgttgttttgccaggcatgaaaacaacattaatctcttcgtacatctccatcaactgttgagtgacaaagtatattattaaccaatattaagcaataatatttagaaagaaacattttttgagcagtaagtcttaatagtgggcttaaaaatattcaataaaccatgctgtaaacagatgtactgtcattcaagttttgttgttccatttatagagcacaggtggaatatatttagcataattcttaagggctttaaaattttcagaatggtaaatgagctttggcttcaatgtaaagtcaccagctacttttgcccctaacaagagagtcagtttgtcctttgaagctttgaaaccaggtattgacttctttgtagctgtaaaagtc

SEQ ID NO: 585962 - DNA, 4001 bp, Homo sapiens
tactagggttatagtttttcaggctctcgctgcactatgaggccctttcttagcatcagcatggcagtgattttacatgttatttttcaaatagctatcaaattaatatttgtctcttcctctactgtaaattttatgaagcagataccaagtctgtctttgctcttcttagcacagtgcttggcaaaggaaagcactgaaatatttgttaagtaaatcttggaagtaaagcaaagcaataaagcaaaccagtgacaccagtggttaccagtctgtagtttcggatgtcttcagaagttgtatgaatgtttcctatctgctatagttcttctccatcctcactaatataagctttcaaatatacccatgttcaggttccaaagattccagtttgactgggatggggttggccaaggccagtaatgaagactctctaaataattctaatatgcaagtcaggttggaaagctccggtgctgctcccaccagcttcagttctggcgtgaaggcctccaacctgacctctgcttttgaatttgaccaactgccctcacccttggttgaattatcatttcctatctacataatagaggaaaaaatatgggaagcggcagctttacgggcaggacttaggaggatggaacaaacgagtaaggttcgtgctgttcagacaattgtaatcctggcagcaaacctgttgggcgactccaggcccacgcaatcgccaacccactctcattcagggcgttctgcccctagagggcgagcgcatcaggtcatgaacctttttttttttctttttaatgagattttatctatactaagagccaacacagagtttcctactgtgtaaaagaatggtggctttgattgccttaaaggctgaactccgcaagccatcccttctgggcgttgctccccaaggtagatcactgagtccgtttccttcccacttgtctctcgctccacatccgcccacctctgcccctttccacggtccgtttacccccattcttgaacgattccatcggaattccccaaccctgttccaagtgtgaccccaagatatgaggccgcccttcctgaagccaccgcaggctcctccagcaggcagccccgggagcagggagctgggcggccgggggccccgcgcgccacgggaggcagaggtcgctccccgatcgcggaaaccgggactcacgtgtggatctgctggaggtcagggggccggtaacgttcacctggcctcggaaggcgggtccccgagcgggaagcgtctcgcgcagccgggctgcggagccaccccctcggcgggcgatcctctcactccctaacttgggagccacaagccgcgagtccacggcgctgggcgaaaagagtcacattccctccccactccctcaagggaaagggagcgaaacacgctttccggacccggcacaacaggtccttcgggcagccgcgaggttgggaaggccaggggcgactggctgcggaagagggtagagcattccacgggcgcatttcctgaggaggggcctctccacttacggatcccctgtcactttattgatccccagacccacagcaaatcctgagtttgggcagcaggcattataccaaaggcgcgggtgggagtggagttctggatgtgcaacacggcaccaatctgttctgtccgagagcgaagttaggtggtgcaggaaaagagcctttatgcgcgccccaggacctgactctcggggcgatcggcgaccactcaccttgtgcctgcgcctccatggtggctgacttcgagctgagggcggcggggacaccctggtgcttcccagagcagatggcagctgcgcccaggctcagaacgcagctggccccgccgctcgctcccactcctggcacgcgtgtcgcgagcgctgcgcggagggggttggggacgcaggcagccgccactagccgcttctggttacctccgccccttccagtccacctggcccaaaccaagctggaacaagctcgccgctgggcgccacctgccggcgctctgtacagccggcggaaggcacccactcccggcgctataagggcataacgcagagatattgcaggttaggttccagacccccgcaataaagcgagtattgcaacaaaacgagtcacacgaatttttcagtttcctaatgcatataaaagttacgtttgcactatgctgtagtctgttaagtatgcaatagcacgatgtctagaaagagcaatgtacctaccttaacttaaaaagatattttatttctaaaaaatgctaaagatcatcttcacctaatgggaatctttttggtggtggaaggcattgcttggatgttgatggctgctgattgatcctggtagtgattgctgaaggctgcaatagctgtgtcaatttcttaaaatgggacaacaatgaagtttgctgcatcaattgactcttccttttatgaaagatttttctgtagcatgcaatgctggttgatagcattttatctacattataacttttttcaaaattggagtcaatcatctcaaaccctgccattgctttatcaactaagtttatataattataaatcttttgctgtcatttcaacaatgctgtgaacaacttcaccaggagtagattccatttcaagtaaccattttctttgcttgtccataagaagcaactcctcaaccattcaagtcttatgagattgagcaatttactcacatattcaggctccacttctaattctagttctcttgctatttctaccatatctgcagttacttcctgctttgaagtcctgaactcccaaagtcattcaggagggttggaatcaactttttccaaactcctgttaatgttgacgttttgacttcctcccacgaattataaatgttcttaatggcatctagaatggtgaatcttttccagaaggttttcaatttactttgcccacatccaacagaagaatcactattaatggcagctatctatttatttcttaaataataaggcttgaaagtcaaaattactcctttatccatgggctacaagatgaatgttgttttgccaggcatgaaaacaacattaatctcttcgtacatctccatcaactgttgagtgacaaagtatattattaaccaatattaagcaataatatttagaaagaaacattttttgagcagtaagtcttaatagtgggcttaaaaatattcaataaaccatgctgtaaacagatgtactgtcattcaagttttgttgttccatttatagagcacaggtggaatatatttagcataattcttaagggctttaaaattttcagaatggtaaatgagctttggcttcaatgtaaagtcaccagctacttttgcccctaacaagagagtcagtttgtcctttgaagctttgaaaccaggtattgacttctttgtagctgtaaaagtccttggtagcatcttcttccaatataaggctgtttcatccgtattgaaaatgtgttgtttcgtgtagctaccttcatcaatgatcttagccagatcttctggagaacttgctgcagctttgacatcagcccttgctgcttcaccttacattcatgttatggagatgacttctttccttaagcctcatgagccagtctctgctagcttccaacttttcttctacagattcctcacctctctcaggctttatagaattgaagagagtgagggctttgccctggattaggctgtggttaagagaatgttgtgactgctttgatcgggtttgatccagaccactcaaactttccccatatcagcaagaaaactgtttcacttccttatcgtttgtgtattcactggagtagcacttctactctccttcaagaagttttcttttgcattcacagcttgaataactcgtacaagagacctagcttttggcctatctcagctttcaacatgccttcctcactaaatttaatcatgtctagctttcgatt

SEQ ID NO: 585963 - DNA, 4001 bp, Homo sapiens
agggttatagtttttcaggctctcgctgcactatgaggccctttcttagcatcagcatggcagtgattttacatgttatttttcaaatagctatcaaattaatatttgtctcttcctctactgtaaattttatgaagcagataccaagtctgtctttgctcttcttagcacagtgcttggcaaaggaaagcactgaaatatttgttaagtaaatcttggaagtaaagcaaagcaataaagcaaaccagtgacaccagtggttaccagtctgtagtttcggatgtcttcagaagttgtatgaatgtttcctatctgctatagttcttctccatcctcactaatataagctttcaaatatacccatgttcaggttccaaagattccagtttgactgggatggggttggccaaggccagtaatgaagactctctaaataattctaatatgcaagtcaggttggaaagctccggtgctgctcccaccagcttcagttctggcgtgaaggcctccaacctgacctctgcttttgaatttgaccaactgccctcacccttggttgaattatcatttcctatctacataatagaggaaaaaatatgggaagcggcagctttacgggcaggacttaggaggatggaacaaacgagtaaggttcgtgctgttcagacaattgtaatcctggcagcaaacctgttgggcgactccaggcccacgcaatcgccaacccactctcattcagggcgttctgcccctagagggcgagcgcatcaggtcatgaacctttttttttttctttttaatgagattttatctatactaagagccaacacagagtttcctactgtgtaaaagaatggtggctttgattgccttaaaggctgaactccgcaagccatcccttctgggcgttgctccccaaggtagatcactgagtccgtttccttcccacttgtctctcgctccacatccgcccacctctgcccctttccacggtccgtttacccccattcttgaacgattccatcggaattccccaaccctgttccaagtgtgaccccaagatatgaggccgcccttcctgaagccaccgcaggctcctccagcaggcagccccgggagcagggagctgggcggccgggggccccgcgcgccacgggaggcagaggtcgctccccgatcgcggaaaccgggactcacgtgtggatctgctggaggtcagggggccggtaacgttcacctggcctcggaaggcgggtccccgagcgggaagcgtctcgcgcagccgggctgcggagccaccccctcggcgggcgatcctctcactccctaacttgggagccacaagccgcgagtccacggcgctgggcgaaaagagtcacattccctccccactccctcaagggaaagggagcgaaacacgctttccggacccggcacaacaggtccttcgggcagccgcgaggttgggaaggccaggggcgactggctgcggaagagggtagagcattccacgggcgcatttcctgaggaggggcctctccacttacggatcccctgtcactttattgatccccagacccacagcaaatcctgagtttgggcagcaggcattataccaaaggcgcgggtgggagtggagttctggatgtgcaacacggcaccaatctgttctgtccgagagcgaagttaggtggtgcaggaaaagagcctttatgcgcgccccaggacctgactctcggggcgatcggcgaccactcaccttgtgcctgcgcctccatggtggctgacttcgagctgagggcggcggggacaccctggtgcttcccagagcagatggcagctgcgcccaggctcagaacgcagctggccccgccgctcgctcccactcctggcacgcgtgtcgcgagcgctgcgcggagggggttggggacgcaggcagccgccactagccgcttctggttacctccgccccttccagtccacctggcccaaaccaagctggaacaagctcgccgctgggcgccacctgccggcgctctgtacagccggcggaaggcacccactcccggcgctataagggcataacgcagagatattgcaggttaggttccagacccccgcaataaagcgagtattgcaacaaaacgagtcacacgaatttttcagtttcctaatgcatataaaagttacgtttgcactatgctgtagtctgttaagtatgcaatagcacgatgtctagaaagagcaatgtacctaccttaacttaaaaagatattttatttctaaaaaatgctaaagatcatcttcacctaatgggaatctttttggtggtggaaggcattgcttggatgttgatggctgctgattgatcctggtagtgattgctgaaggctgcaatagctgtgtcaatttcttaaaatgggacaacaatgaagtttgctgcatcaattgactcttccttttatgaaagatttttctgtagcatgcaatgctggttgatagcattttatctacattataacttttttcaaaattggagtcaatcatctcaaaccctgccattgctttatcaactaagtttatataattataaatcttttgctgtcatttcaacaatgctgtgaacaacttcaccaggagtagattccatttcaagtaaccattttctttgcttgtccataagaagcaactcctcaaccattcaagtcttatgagattgagcaatttactcacatattcaggctccacttctaattctagttctcttgctatttctaccatatctgcagttacttcctgctttgaagtcctgaactcccaaagtcattcaggagggttggaatcaactttttccaaactcctgttaatgttgacgttttgacttcctcccacgaattataaatgttcttaatggcatctagaatggtgaatcttttccagaaggttttcaatttactttgcccacatccaacagaagaatcactattaatggcagctatctatttatttcttaaataataaggcttgaaagtcaaaattactcctttatccatgggctacaagatgaatgttgttttgccaggcatgaaaacaacattaatctcttcgtacatctccatcaactgttgagtgacaaagtatattattaaccaatattaagcaataatatttagaaagaaacattttttgagcagtaagtcttaatagtgggcttaaaaatattcaataaaccatgctgtaaacagatgtactgtcattcaagttttgttgttccatttatagagcacaggtggaatatatttagcataattcttaagggctttaaaattttcagaatggtaaatgagctttggcttcaatgtaaagtcaccagctacttttgcccctaacaagagagtcagtttgtcctttgaagctttgaaaccaggtattgacttctttgtagctgtaaaagtccttggtagcatcttcttccaatataaggctgtttcatccgtattgaaaatgtgttgtttcgtgtagctaccttcatcaatgatcttagccagatcttctggagaacttgctgcagctttgacatcagcccttgctgcttcaccttacattcatgttatggagatgacttctttccttaagcctcatgagccagtctctgctagcttccaacttttcttctacagattcctcacctctctcaggctttatagaattgaagagagtgagggctttgccctggattaggctgtggttaagagaatgttgtgactgctttgatcgggtttgatccagaccactcaaactttccccatatcagcaagaaaactgtttcacttccttatcgtttgtgtattcactggagtagcacttctactctccttcaagaagttttcttttgcattcacagcttgaataactcgtacaagagacctagcttttggcctatctcagctttcaacatgccttcctcactaaatttaatcatgtctagctttcgatttaag

SEQ ID NO: 585964 - DNA, 4001 bp, Homo sapiens
gtgtcagtttctggcttctggcctgcggctacacttctcagccagtcagaatggctgctctacagtctgaaaccattcatgagaaagagttctcctttctaaattatgaacttctcattcttcagctgacagaccataactgcagatccatctgaatgtatgaggaaaatgcctttcctttcaatgtcaactctgcaatattaaggacaatataacaccattattctaacattccctttaaatcattagtgaaactagtttggattatactagcatgctattattggtggttctaatttaatgattaatctgtgaaatagcaaacattgcataaaagcatgtatttcaggcaaatttccccttttgttgccaaatttggcctcagtatgcttaggatatagggaggaggcatttctctcattacctgggaacatgaattcacttcttagcaaatatttgttgacaaatggcttctgcaagaccctgatggtatcaggaggtgactctgagttttctgagaggtcagtagaaagtatctgatttatattgggtacagaaaagcaaaagaatgttgcagttttctcattttcattcagaaactctggaacctaaattcaaggcttcataaagcagttctctacttaaaagagaagcataatctttatcagagttccacagcagcctggagtagcacaactctattcctttcacacaaacttgaactgtctaacaaaatcatgcacataacttaatcatgtcttagttgtttgtttttgagacagggtctctctctatcccccaggctggagtgcagtggtgtaatgacacttccgtctccaacactggggctcaagcgatcctctcacttcaacctcctgagtacctgggactataagggtgcaccaccatgcctggctaatttttaaatattttgtagagacagggtcttgctatgttacccaggctggtctcaaactcctgggctcaacgtcttagctgttctaacagtttctcagcatggactccacttgtatacatcatttctagagaaataaagtttatttctataatacaaaaaaagtgcacattacaagaattaaggaagggaaatttcacaaaaatttctgcccacaaacaaagtcctcaagttgttctagtctccattctcaccttttcaaaagcttctgctatagttttgtttttaaatttcataaaattgagaagaaactttcctaaggtgcacacatcttaaaagagtatgactcggtgaattttttacatatacatacacctgtgtaaccaccgcagagcaagacagaatatttacagcaccccagtttcccacatcaccagggatcactcactatttggcagtacttattttttcccaaaaatcactaatacaccaggctggggaaaaaaccgagagtccgtttctataaaaaaaaatttgaaaaattagccaagcgtggtgcagcgagcctgtagtcccagttaccgaggaggctggggcgggaagatcacttgagcccaggagttccaggttacagtgagctatgattgtgccactgcacgctagcatgggcgacagagggagaccctgtctctaaaagaaaaaagaaaaaaaaataattaaaacacaccagtgctttggaagcactttaaatcctggacattggattcaggtcatttactgtccgacctcgttattcccagtttccgcttctgccctgaaccccacttcacagggctgattgctaggctgtctacgcttgtaagaattcctgggagccctagcacgggcgcatacactcctagcaaatcgttccctttctcacccgcaccctccgcgcccgagtgagcctacctcgcttacagctggttgccggccattgcctccgccaccaatgacgtccccaggggcgggtacgcctccgcttccacctccgccacttctccgcgccccgcctccgcccgcgccccgcctccgcccgcgccccgcctccgcccgcgccccgcctctttcccgcgccccgcctctttcccgcgccccgcctcagttcccgccccctctcccggcgccccgtctccactcccgccccgtacctcgttgcacagactccacccacttccccaagcgccggggtttgcgcagcggcggaaatgggcagggcggagcgagcgctgcggctaaagcgaaggcggggaccctacccatccctagtcctgtcggctcctcccaccccgggtcacgccgtgacaggggcggaagcggcggcggcggcggcggccgagaagaggctggggctcgcggcgcggctgcagccgtcctgtgcgcgcggcgcgcggctccggagaggcgcccgcagtccagggcggcgcgcaccgcctcgctggcgctcagaggtgggaggctccccactccgggggcgtgcgtgggggccgtggcggatttcgggtgacagcgttgcacaaagcagcttggttggggtgcaagccctccctttccccctgtgcagcgcccctcgccgtggtgggaggtgggcgggtgccccagggacggatacctcctgccccggattaaaagagggtgcggggtgggtatctgtctgaagaagggggaattcccgggctagggtgttggggcgtggggtcgccgggttcgtcgcgatgttgccggtcggctaacccccctacaatgtttcctttctgtacagcggtgccttttccccgagactcccggcacctcttcagcgcaaaggtgagccccggggcagttgcttctccgacttcgaaaagcttccgaaagcttctcggaaagcgaggcggctgcagctggcaccgggagtttggggctccctcctggggactgtcagagccgcgggagaaccccacggtcctggagtaggaactccctcgcttgttcttcccggccgatagggtgcggccaggagcccgcacagccttgcaggtgttgtagtaattctctggcacagccaccacgcgttgagacttgatgagcattgccaggttgctggggtaactcctctgggattggagacctggaggaggggtggcccgattagggtagctgttagtcaacggccgggcagctgacaggtgaaagaggaaggaagaggccgacccagctgtagaaagttggggttcagtgatgtggaaaccagccacatagaagtccagtcttcccttgggtaagcctgcaggactccccagtccactccagttggggaatcccccacaccacgtatacacacataactcaaggctttgaccagttttgttttgtgtttttaaatctattttagtggcagaaaggcgagtgggagagaaggcttcttcaggaggtacatgagaaaattaccatcaataattatttgccttgctgggagaatcaacaaaagatatctaggcaattggggatttaatattgaatcattgaactgcatgttgaatattgaataattcaatattgaattattcaatattgggaggccgaggtgggcgatcacttgaggtcaggagtacttcaagaccagcctggccaaggtggtgaaacctggtctctactaaaaatacaaaaattagccggacgtggtggcacacacctgtaatcccagctactcgggaggctgaggcagaagaatcgcttgaacccaggaggtggatgttgtagtgagccgagatcgcaccactgtactccagcctgagccacggaggaagactccgtctcaaaaaaaagaaaaaatctttttgaataagctgcttcagaaaaacctagggattattataatgaaatctacatattgatatatccacttatatatttaccaaaaaatcccacttttttatcacattaaaagaaaaccaaagccaaattttaaatgcttgaattaaaaattagaaatatatgtataatgttgagcatgaaaccaattggttatatttaggtgtgtttattaatttgaaaaatcaagaaggaa

SEQ ID NO: 585965 - DNA, 4001 bp, Homo sapiens
ccatctaataatgtctctaatcacagtcatcacccttacatggtattaggatgtgtttcatagtttcccttcccctcccattaaaggccccacacacagtgactggtccagctgaggagtggtttccaggtccagctacagcagtaactctggcttctggagctgggcttgtctgccagttctctggcctgccttgactctgtggacaatagcacagactatccttcctgggtaacccaaatgggacatgaactaattcgagaaactccctgttttctcctatttggctagagccagtaataaggcctcaattccaggcagccctcccgcagagacacgtgtctcccagcctttcgccctgactgctgctttacctcttgccttgagagcagacgagtgaaacagaaatcaaagcagttgacatggaaggggggtgagcacctactaggcatttggtagcatgctggattctgggaggtagaaaaatatcaggaaacaaagtcctttcctcaagggggtaaccaactggtagtgggaggtaaaattaaaatatgtgaataatcggtaaacaaaacaagtcttgaagaccacccattaccactacccctctgggactatcctggctttgttttataagggaatttgacacactcatgttagatcaccaccccccatcaatttactgatgaagaaatccaggcttagtggagtcagagtgaattgcctaagtcatggaaccacaagaagtgaagaacttgaaaccaagtttcttgtccttttaaaaaatttggcctcttgttctcctgttcctttaaaaaaaaaaaaatccccctattctaagataccatcttgaacttgaaagtcacaagaagcttgattagcttctaagatcaagttctggcatttctcccccttgttcccaaaggctccgtccagcgccaggctgggagggctggagggcggctgcggagaggggccgggaggcggctcacagccagcacagagctcagcagaacttcctggcccaaaaatgtgctgttgatttttttcccccctgcacgaaacaaggattgagaaaactgccactgacgtgttctggggctgaaagccaattacttaatctttgccatccctggctctctctttggagaagtggggcttgaattcttgagagaaacttgtggggacactaagtacccaaacgaatggttcccaggcagctccgagctgtccccgtgtgcgagcctcctctcctcaaagggttaacccggcggggctcgctggcctgaaatactatactagcaacacatccttgcagcacaaacttcactgtcattttctcagctaagatggtctctgtgcgaacaagttaaaggaggggagacgaacacagaggaaagtagaggcagaatgtttcagtaaaggagaaacagcgtgctttgggaaataggtcagaggtgaagaaataagaccaggcaagtggcaactccgaataacttaccttagatccaccacggacagacagactgggcccggagggtagtcggctctcggcggcttctcgtctccctccaccttctccgggcccaggtaagtagaagaacaggctctgaagcaggaagtggaagctgtatgcaaatttctacggagcctaggaagcctctgctcaaaatctccctgtgggcagtgaatcaacggctgaggagtcactttatttcttaaaacagaaacctccttcattcatgagaaagggccagtgaccaattaggcggcatttttgttttcgccacccagctaagaagctgcccaggagtgggcagaacctcagtgtagtcgcagtgccctcgcctgggagggtgtctccgggaggagattgaactcgaatgttaagaattagtaatcattagcagctccaaaggaggggattgtgggcagataatggggaagaagagggagtcgagcttcttccacctcctctaactgcttaaaacatcagcattgccgagcgcggtgactcacgcctgtaatcccagcactttaggaggccgaggcgggaggatcacgaggtcaggagatcgagaccatcctggctaacaaggtgaaaccccgtctctactaaaaaatacaaaaattagccgggcgtagtggcggacgcctgtagtcccagctactcgggaggctgaggcaggagaatggcgtgaacccgggaggtggagcttgcagtgagccgagatcgccactgcactccagactgggcgacagagcgaagactccgtctcaaaaaaaaaatttaaaaaaacccaaaaaatcagtatttgctgcccataaccactgggggggtgggggggggctcactgaccatgctcctggacacacgtgtacacacagcatacacatgcctgtggcttgtgcacacacaccaccctattgtcaggcacaaaaaaagtggttaattttaagaacacacacacacacatacatacacatgcacacatgcacactaacctcctctggctgcattttcctgacctcaagattttttttctcccctttccttcccattgtttaatcagtagcctgcagaatttattgcatgaaggagcgctgcaggcaggatgatacccagcgatgtgaacagagagagagagagacaactgcctttcggggcagcagtcagtaatgggagcagtgttagctggagctttggagtcaggaggacctgggtacgaactcagccatgtcactggccagctgggcgccctgggcagacacaccatgctcctggtgctggacttgtctgcctgttgaaggggtccaagtgtcagtccactcagccggctatctctctactctcatcaaggggacaggccccagagcatccctgttcagattgtaccaggttctgctcaagcaggatacaggaagcaggttgctcaacattccacaagcagagaaaatgcagcttgtttttaacacagtatacacaggttgtttgcatttggtttgcagaaaatgatgcagctattaaaaatcatcaatatgtatgtattatctgagccactaacatgaaaaagtggctctgagatattatttaactaaaagtattatcttattttttgccaatatatgtgacatatacacacacatagatatgtatatcgattttttttaagagacagtgtctcagtctattgcccaggctggagtgcagtggcgcaatcatagctcactgcagccttgacctcctgggctcaaacaatcctcctgcctcagtctcccgggtaggtgggactacaggtgcacaccgccacacctagctaatttttaaattttttctagagacaggtctccctgtgttgctgaggctggtcttgaactcctggtctcaagggatcctcccaccttgtgagcagcaagccacccaggtgccgaggcaagagaccgaggacacgagctgttccagtacaataaaatataaaacaagaatagttataccagatatagatcttagatatgattatatatgaatatcattaatcattagtttgtagcaattactctttattccaatattacaataaaccttgctctataatcataacctaggaaaaaccaggccatacgagataagagctgaggggacacagtgagaagtgaccaaaagacaagagtgcgagccttccgttatgcccagacagagccaccagaagggctccttggcctagcggcgatgccagcatctgggaagacgcctgttgccaggcggaccgtggtctagtggtagcgaaaagcgtcaaggaacaacacccgctacttagcagacggggaaaggggttcccgggggagtttagaaaagactgcccctccacctcttgtggagggcctgacagcagtcagccttgcccacagttatccggaggcctaaccgtctccctgtgatgctgtgcttcagtggtcacgctcctagtccgccttcatgttccatcctgtacagctggctc

SEQ ID NO: 585966 - DNA, 4001 bp, Homo sapiens
ggtgccttccccctcatgaagtgttagagctgaaatggagcttatcagttctagtccagtgattttccaagcctttttaaatctcagaatccttggtcaacaaacaagcctgagaagtacagaccagctctggctgaggtaggggtgggaggcgcagacccagcccctcctccagcacatatgggcacccactgggaactccacaggacagcctgaaagtcacaagtgtagcaccgcctcctagtcaagcagaaactgtctcacagcgtctctataatcacggggagaaggaggattcgtagcccataaaacagccagttccaacgctgggtgattgtttcggtcagaatgttctagttttatcccatgctggacaagtttaatatcctaaatgtctcccacttatttgaatataaccaggccccatagttccccacctgtcatgagctaagaacactcccttcccttgtttgagcatctgatatgcaccagatattttgaaaacattatttcatttcatcttcacgacaatcctgtaagtattagtgacccattttgtgaatagggacattgaggcacaaagagtttaagcagtggggccacggtcacacagcctgtacatgaggaagccaactttaaccaggcccacatgatgcaacagcaggtgtccctttcactacgccacctgcctttctgaaaaggtagggcacagaacatgatacagctgcaggggccagccctcctcaccaccccgtctcctgcctcctaggacttcatagttgctggtaaacagccaagccagcagagcacgtctttccagaatcttggatcctagagatgacagattgctctccccttgcaactgataggaacaactgagtcccagaggtgcagggacttgcccacagtccctaaggtagatggagccagaaccaacagctcctctcctgacatggcaagcctggagctcttcacccagcatcatgctgccttcagctggtctctggggaagaatgggacttccctggacaaggtatccatccccaggggacagtgaggtgttgtgatcccctccccactcaccattcgatgaatgtacttagtatgtaagccatgctcatcctcgtccagctgcgactcagcgccttccacgtcctgtttgtatttggggctgattgctacgattatcatcacggtcttctgttaatgagagggagaaaggcatgtttatggaagtgtaccagcaggactgtgggcattctctgacacacggggtggagggccaggctcattctccatagaaagagaagcactggcccccactcaggcagactcttatctctgcttctcccttctgtctccagcccagccccaccttgaacatgcagagcaaatggctcagagaggggctctctcaaatagatgtgcttttgcctaccattttccacaaccatcactaataaacctctaatgaaagcccgaatcactgagtgagtctgtgtcgtggcaaaaaggcactgcaacaccaacagtaagaagcaccctccctccctccagctggttctgagctgccagtcactgcactcgactgccctgtcttctgcgtgtacacattagcacagtcagtaggaacagacccttcagcacaaagcaaacatcaggctgcagacaaaaggaaaagtgcaacaccccagcctgctgagactcccgtcccccactggctccctccaaaagaagcagccgacacggacacgctggcagcaatcaatttcgatcttgttaaagcacaacgtgtcccagtggccggtatagattctgtcagtggagaacaaatcacggggctgcacgtgggcacctcgggggtggtgtgctgtgcagcctgcgaggctgcctaggaaacctcttcagcccaattctacaaaacacttggggtggcctcagattaaattgaattctgctgctctctccccactctccgccttcatttccttctttcctattctcgtcaaaagattgtttcctctgattgttatcaaccacctgtgtctggtttgaccgttatttcctgcctgtgcatgtccaagagggcgactccgtccttcctttccaagtctttgcacggcttccaacaagggaggctttgttggggctttctcagcttcagacttaggtgggtatgccagggtttctttaataaaacaacttcataagctcattgtctttctcaccagaaaacaaactctggtttttggaatgtacttacatccctaaggtagcgctccatccatttaatgatatcaatgcctcggattctatcctcaaatatgtcaatctgcaaaaaaaaagatgtgggagttggcccttaatgagaggttctctcaagatgcagagcagaagaaaacacaatactatatacatttaaagctccaaaacttaactaatgctttttgcaagaaggagcacataggtctaaaaaacaaaatataattttctgaaaatattccctatttcaacattagtaggcatttaagtagttaatgttatgtccataattaggatattgtgatacacatcaaaatatatctatggctacacaataatcaggtttttaaaaatctgagggacacggtataccactaagttggatataagccagcaatatacatatattatatatctgtaatttagacatttgaaaggcaaacataattctggaacattttaatggatgtgtggcatacaagtaactgagatacaattgtggtgctttacttgcattagtgaggtcattattatggtattatgtacagtttcaatctatatgtttcaaaaggattgtatgaaacttggagcagagccaaggaacagtcacaaaaacaattactgaaacggtagggaagaggtttatgatgaaagtcagaagtagaactcttaggccttgaaaagactgatatttactatcagcattcaagtttttgaagggatattttaaaaggagaaagatcagttattttttattttataagaaaccaaataagaaggcccttcttgggctcaggcttatactgcagagtgtgtgtgtgtgtgtgtgtgtgtgtgtgtgtgtgtgtgtgtgtgtgtgtgtgtgtgtacgtgcacgtgtgtgtttacgagatgctcttgatgggaagagggattatatactggaatgggtgactcagggagagtgtccctggggaggggttacgtgattcagctgcactgctcccagattacttgtcctaaatgtcattccaggccaggcacgatggctcatgcctataatcccagcacttgggaggccgtggcaggcagatcacttgaaaagccatccatgatccatccatgatccagcctcgccatccatgatccagcctcgcctctcttttcctcacatatcctgtctactttactccccacattggagtcccctgtaccctaaaggcacagcacaaacccccctgctctgtgaatccttcccacatgccaatctcctcctcttcctcacttcacctaactctaccccattgtgaccactaatgatactggacaattaacacgtatgataacattcttttattcaggacatgtttcatttatgtctgctgtgtctcttcaacctgatgctaagcctcctacggaaagagaccatgccctgtgtataccgaactatcacatacatagagtacagagttcagaatatgtgtctttacatgaaaaatggaatggctgttattttggtttagatgactcctgttttcaaatgtgtgatggccaacgactactcttgagaacgcttttgtagctttctgagactgtgtcactaatccattgctattatatgggagagaagcaatatagtgtcagggttgagaagaaacggacagcttgggttctgtcttggctttgccacttcccacctgcatgactttggaaatgttactaaaactctctaaatcttatcttcacttgtaatatgtagt

SEQ ID NO: 585967 - DNA, 4001 bp, Homo sapiens
gggcaaaggaaattctgttattttgttaagctattattatgataaataatcacagggctccaggcgcaagagactttttcatgttggtaggagatgttatggcttttgttgctgatatgatctcagttaaaccttacaaccaccctgtgacgaagaccagttttatgaacgtctttaatgatggggaaactgaggctgcagtcagttttcagtcagactagtcacagaacagggactgagacacacggatatgactctgtgtgacaccacacacttccaggggagaacccagaacaaggtggagcaagcccgacccaatataccactagagagagctgtgagagggagaggaaggagagagggactgaactaaaggagcactatcaaaaagtggagtggagaccccagtcctagcaccaccgtttatttcctacagaccctaaagctcagccacggacacattcattcatccaaccctgacttggccaccacaagaacgttcccagcttgagggcagcttcgccagccaattagggcccttgtcattcgtagagatacagggaacccgagacagagggacagggaaggaaatttagccaggcaagccatcctccatctccaaggaagtttgtaaatgatcacagcttcctaacccaaccgtgagaatgcaataagcaagctgacgcagaagggaggacaaggagtctcaggaaccagaggagaccacggtgagagtgaggggaatgtcgctcacatatctcacttctgagacaagatataccgcaacaaacccatgccaagcttcctccagttcttcccacttttgaatatcacatttttcttgctctgcaagagtagggaatccttcccatcagtcttgtgaattctgaccccttgctggctttctacaactccctgcctgggaggccgacaccaggacattgctgttgggggtgggatccccatcctctgccccccactcctacactataagagaatcaactttccccaaaaagtggagggtatccctgtctctcttcttgtctctgtaaagggggtgaagctctgggtcgccgcagatggatctaaagggacagttcacggagtggtaaaggatatccaaaaattggccttctagagcacagcaaaaaagtgggagcgagacgagagcagaaggccactgctgggatggggccagggccacacgtgaacatccgagcacgttccagagctgagatgcaaaacacccagaaaatcacataggaagtggaaaaggttctgggtctctcccactggaaaagcccagaagagctagtggccaccccttggggcaagagggggttgtgcaatgactgcgggtctgggagtctctgggcttggctcctggacgccagaaagggaaccccacgcgtcaagccatggtggcagcgcggcggttggttcgaggccaggctggggtttcagggctgcagacagagctgcaggatacgatgagtgcccaagggggcggcagagcatggcatggctggcacggcgcggagctgggggtgctgtctgggctggccggggtacaggccggaggggtacagtgcacaaagccggggtgcagataacgtacacggcagccaggagcctccgatcagaggagggcccgctgacctgcaggggtgtgccgggcggtgcacgacagggggcactgtccctccagctccctcctccccaggctctcacctcgaacataagcccgatgaggacgcagagcaccaggcagaagccgatgtccgcatggttgtggatgacgaactcctggctgaagagcgggtaacttttcgtcctcctgcggaaagccatggcagcgggcgcgcagcggccggcggggcccgcaccctgcgctcacgaaccgcagcgcaaacttctccagcaccggcccggtccgcccgccggcccgccgcccgctctcccacagccgctcgcccgcccagcgcggaacaacttcggggcccgcccccttcctccgcccgcccccggccgcccgtaaccgcccccggccgcagcccccgcccagcccccgcccagcccgcggcccgcactcggcgcgcctggccccgccccccgcgggcttaaccctctagccgctgggcacgcgcgggctaccggggcggaggcgtacgggggcggcgagcggggctcggctcctcctcgtcccgcgccagcgccgcgcccggccgcattctcggggcccgaggctcagccgctcgcggtggagaaagcaggccgcggaggaggcgggcgcccaggcctgcccggacaggaagtgggcccagctttcccactcctcgctccgctccttcctccgcgggaagggcaggccccggaggcagcgagcgccccgggggtggccgggcagccggatgctcccggggttgcgggctgtggccccgggggctgagggcggcgcgggtgcggcggaagcagggaagccgcgaaccggccttctggctggccacagcgccctgcacggacgatcagtgaatggagattactcaagtatttatcgagaacttgcagtgggctaggcacagttcaggtagatcaacaaaccgaaagaccctgccctaggggagctttcgctccaatgcggggagagggtggatgattgcagttttgcccagtaatttttgggaccctcatgccaccattaattagctacacacatttcaccgaaagtctaccttacatattaatcagaagaagtggaagaataaacacagaagaagcaaaaaaggaaggaactttctcactgaaagtttctatttaatattaagtcttaaaagtactcctggaaggacaaaaggtgttcttaataaattatattcgcaaatattggatttaatcctaccagtaatgaagcagtcagttactttctagatgtgcagaaatacgtaatgaacaaaaaaaactaattcctattccattttttattaggtccacagttatttcacttctaaataaatatggttttttaaaagtggcacgcggtggaatgtaattgagacaggatggagttcctagagaaattttacttcctcaatctgcactccaccttacttaaaatacagtcttgggtctgtaattcccttatctgactctcaaggaaatgacaaagtaatgcctagattggactaaacctcatttaacttcaaggctgacctttctcaaagttgaaccttcgtcttgtgaggaacagaaagatcaagaactctgaagcacctcgactttccacctgtgaagatgtgttcaaatttgcaacgtgcggccacacctatgaggttgaactttatacaattggtttctttataggtttagatggttgaatttaagttacccccactgctattattattattttgagacagagtcttaactctgttgcccaggcaggagtgcagtggcgagatctggactcactgcaacctctgcctcctggcttcaagcaattctcatgcttcagcctgtagctggaactacaggtatgtgccaccacacctggctaattttcgtattttttagtagaggtgggggtttcaccatgttgaccaggctggtctcgaactcctgaccgcaagtgatccgccattttttgagacggattctctgttgcccaagctggagtgcagtgacgccatctcggctcactggaacctcctccttccaggttcaagcaattctcctgcctcagcctcctgagtagctgagattacaggtgccctccaccccctgctaatttttgtatttttagtagagacagggtttcaccatgttggccaggctagtgttgaactcctgatcttcagtgatccacccgtcttggcctcccaaagtgctgagattacaggccactgcacccagccttttgctacacatttatactaaactatattatggggcagcacagtaggtttgtttacaccagcatcaccagaaacacgtggttaatgcat

SEQ ID NO: 585968 - DNA, 4001 bp, Homo sapiens
aaataaaatgaatttcgtaacatgataacatctttctatgcatttgcttacatgataacttgcaatgtattttcatggaggacagttttttaaaaatactaatttctaacataaatttctgtttttctaaaatatatgccatccatgttttcagttggaagcaagaattggataagacttctcaggcgtctgcacaatccctaatggcccccagatctgccaaggagaccttcaggataaacccaaatgtagcagcaaatttgtgagtttcttttctttttacttagagaaaaaaggggaatgtgatatttccttatagttctccaaaatatgtcccatttttagagtaaattataaatgaaaactaaaacttaagacaatttaggtttggcttagggtttttccaagaacctaataataaatcacaagaaatgctggtaaattatcaatgaaaagtctgctcaacatataagagccacagcagaagacaaagtgctgccatgtactaatgctacagcataaagataagcaaaggtgaagaagagagagagagagagagagagagagagagaatgatgagattgttgtgactagcagtaaaacaaaagaatttgaaaaagagaaaagtagaaaaaatcataccctacctacatgccatggccccaacattgtgtccctttataattaaggccaaactgaaatagtggaatttcttctctgtccctgatgggtgggcactattatatattgaaatctattttatttccagctgagtttctggttcagtacccataaaggccagctttctctattctgcttcatggccaaggactgtaccttgaactatctgttcaattgggtctcaaatccataccacagatgccaggaaaggtcaacataagtttatctttatcgtttttaaaacaataaaaataatcatatgaatatctgaaagaacatcattaactatttcagtaggttatgaatgtatcaggataaaaatacattttaactgctttataaaatcaagtgatttcggtataatatgaactatgtaccatatatttttagcacttgagagtcccacaggaaaataaatcaagatcccagaaggccagaggaggtatctgcaggcatttcaaactgaagtatgctagttagtcactacaattctaaacaccaagtctgaaattacttaattatatcaaatgcccatcagtctcctgacataattaacagaattttaaagttaacagtgagtttttgtatctgtagtatctgagtgactaaaactataagagagtattaaagaatattatttaaaactaatctgcaaaaaaataaggtttataaataactcttaacctggaatatatagaaaggatgatattacataccaagctacaataagactaggaaacatttttaaaggcaatccttttttgatgacctatttcgattcagttttacacataatcaactatatatatacacacatatatatatacatacatacatatatatacatatacatatatatgtaagttcccatttcctgaagtatgaaatagaaaaaattgctaatattttcatattttctgtcagaggtgaaaaaattgacactcatattgatataattagtcagaaaagaagaccttaaagtgtgtataaagaattgattattctttatgtaggagataatcataattattcctagatgtgtcatttatgattcacttcgctgaacactgtctttcctccactaaaaattcttatagcatcagtttttaaaatcaatcagaaatcactcaagaaaacattttctctgaagtagaaaaaatctctttgtagaaagatcttactattttatggtattctggtcttcggtgtgcagggcgagacatagtgcttgatagatgaagaatatgatcttcaatttctcttcttttgcctgtttcttagaggtgtatcagtccatgtctttttgttttgtttttgtaagctcttcctcgctttgagacaggagtgctgcttctgcactctgctgcttttgctctttgctgagctgaagagggaaaaaaaccatgaacaacaggattgtcttatagccacgtaacttgccatggatcaaataactgcttcatttgtaaggatgaattgtaatctagagccataaaagctgataatgtgaagtcagacctgaagcactgcaactcaaaaaattctttagcccgagggagttcaagagtggtgttttgttctcaggccaagacattgttttaaaatcagaaacagaaaccttcgcaatccaagatagatctaaatgttagcattattcagtcttggattgattgttgtaagaattagagagacaagatcagcaatctgtaggtaataaatcctgagttaaaacgtgatccctcaactacaccaatggttatcacactgtccccaaaaccatagatccctatcttgtgtgattacagtattcaaatatatctggtaacttttttgcttttcattagcagcaatcaacaacattaaggagtgatagaatgggcaatattttcttacaaaactgttgttcaaaatgggcgctctacagtatcataatgtataatgattctgatagagaaagtaagcccttagctttcttttgagagctcctgagacgtaagctattgaaggctctctttatttacgcagaaatacttaaagttcaaataaaaaaatcctttcaccttgacaactgcagggtgcagagtaggatcaaaatctttccagaaatggaagcggaaaactcagtttaggaaagtaattttcttctacttatagtttgagtccattagtcctatttgttctggaaaattcttgctataaagtgacaaactcaagaatactttgacgaaaagtgtggtgtagttgaaagaacctaggaggatttggaaggctcaggctgttgcagccctaccatttactggctgtgtggcattgggcaagccattttattgctctatgactcagtttccacatttgcaaaatggcaacaatatcactcacctcacagaataattgtgagaaccaaagagacgaggcgtaccgtaaaacacattaaaatgcaccatataataactagttactataggttattcttgtggttggataaattgaatggaattctacaatacctaaggcatttccatcactgcatatgttctatgacactatgatctcaggaaaattaatttcacttagttgtggggtatggggtggagagtttttcagtagcaaataataacgacttatatgtatatcaaatttacagtttacaacatggttttcgttctcttcatctcattttaattcagatacaatctgtgaaatagtactgtaatcatggccattttacaggataagaatctaaaagtagagaggttgagaaatgtattcaaggttatctggatgttggcaacaagaagggatttgggctaattttgatgattccaagtcaaatttattttgtaccgcacacactctaattatgttagagcaaactattttagaggcagactcaaaaagcttactaaggtgcagggacagcatgttgctgggtcaatttgtgggcaatcctagttctgagtaagataccccagagaataacctacaaagggcctgtgtgcttgctgcgaggtgatggcggtactggaatcaatttcaccaaactctaatggctgtggtatggtcacattatggccatcgggagaattcgggatgtcattggatgtattagaaaaagccggcttttacttcagactgacatggctcccctctgctccattgaccttccagtcaagacacgagcttaaggaaggagcagagcccctgccaggtgctactgtacaaagcacaaccttcacgaccacagctgtactcatcatcacaggggacactggtttgctggttttcagtctatgaaacctgctagtcttcagcagctctta

SEQ ID NO: 585969 - DNA, 4001 bp, Homo sapiens
aaaccctgaacagaggtagagaaacagaagattaagacgctcgtagctatcttaataacttgtgcagagctaaacaagaagtttttatacatagctttctttaaggcaaactaaaagcaacatgacacagaatatctaaggaataggaaaaatgctatttatatttagttagcaaattctgaactaaaattggtaaagagtaaacctgatatcctctcacagaaaagaaaacacacacacacacacacacacacacacaaacaagatttaaaggggctgggtttaaatgttggtaatgctggtcttgagcaagtcacataacattttagttacagttcctttttctgccaaactgagataataatgcctacttaattgaattgtgtcagttttaaataagtaaacacacataacgttctgagcaaaatacctaacacatagaaatctctcagtaattgttattaatacgaggtgtcagactgaatttctcagtgcaaggtacaaataaggcacttcttataaatattgactaaaaatctccaacagaaattactgtgtgtccatactaatttctaccctcaaaaataaaaacaaatattctatttttcagttgtattattcaaagcaaaccagcacagcatttaacttggaagttgttaagagcaccacctgtctgattttcttacagctgtcagaagcaaattttagatccacctccaaaagttttacctcaactagaaccagactgtgtctgtattcaaagtaatttagttttgaaggtttccttcattctaagaaatacgtacatatatatatgaagtatatatgaaatataaatatatataactagcaaccatcaaatagaagatatgtattatagtatgtagctttcagtaaagcattgaaacagaaaatatttattgtaacataaagatagaatttaccatttagaggaaaatgaagaatgaatttacaaaaagaaccagaattctaacacttaattgctttattttaaaaatcatactgattcacagtaagtttgtggaattccagtctttatctctgaatttccattaatggtcaaataaatacaaattttatgggaacacttatgtcttaaattgtatataaatcatatatatgtatgtgtgttttacataccctagtaggaaaggaaaaacaaatttaaggtctccatttaaaaatatcataaagcagaaatgcttcaaattactttttaagtttaagtaagcattagtgtaatattttaagtaagcattagtgtaatattttaagttcatcatggtctccatccttgaaaactttgtaatttttgctggataagatatcggccatcatgttacatgaccatagctatttatagaggtgtgagtaacaactgttaactagtggggcctttggtatagcagagaacagtttccacatgcaaaatttaagagaaatctctttttgctcccccaatatacagatctggcagcctctcagctcctaaatccacttctcagatcctgtatagaatcattgaccaaggcaattaccttaaagcaacattttaaatggacacatcgacagttaatgtggctgtcgatttgcatattttttttccttacttgatactatcggaaaatggtagcaataccttcagcagtgatctcagtcatggtggtcgtcaaaagtaaaagtcagttgaaaagttcccgtcaagttgcactttgcagagtatttggggatttgagaactctggtggagggttctgtgtcaaaacctgggggctcttcgttttcctggctgtttctgctgcttctttgttgtcctgttgaactttgcctctcctctgcagagttctccccctggaaacaacctaagccctttccaagcagcacttgtggctcagctagaagtatcagcttcaaacaaaaatagcctcatctccctaggactcttcagcacttttttttttcttttttggcactctagaggaacacacacacagacacaccagctcttcagccccaaagagagaaaggcaaaaaacaaacaaacaaacaaaaaaaaccaaatgaactacaaagtaccatctaagcccccgcagtttctctaagataattacagatcctggggtctatgtcagaaaacatgaaataaagagttgaaagtaatcttatccgtgagagctcagatttattcttagtgctcttaatgctcagaacattcttctttcccttatttggtttggggagggtcccaaatgtctatcacaggcaaaagggagggtagtcttgagtaattttctagaagttatgttcctgttgatacaaatccacttagcaagtgcagttatttatatagggctacacttaaaattgcaactattaaatcttgaagctttcttttaaagtagtcatattgtagaagattaatattttctgaacactggccaataagaattatgtaatgtgaatttatagtgtgatacttgaaaaacattggattgatgaattactatctttttaattctctctactaccttactaagaactaaatacctgcatttatccatgcagtaaaaaggaagggaaggtgacataaagtttagtagtccacagccaatatttaagtaaagtatttccttatctcaacttaaaaaaaaaaggattatagcagccactaacaattaaccaaattggctgattagcatttcaccttcccactcctagacaggtgttaatgagcaaaaaaatattcaatagttggtagttggaagcaaaaggagaatcgaagggcattgataatcataaactctagccaatctgtgaataatcaagggttgactacacttttattttattctcatattcaacctaataaatgcttgtagtttaatcttttagcttgaacttgatacttttcgttttcagacctcccgaattcctatggtacttcatagatcatgaagcaaagccatgtttgttatttttaaaattcaggctcagaagagtgctgcaacagctatttccataggcaatgacctcctccctgttagtggttctgtcttaatctactgcccccattcctgacacaatagaaagttgctcatttaccagctgaatacataaattagtaacaaatcttaatttacaaggaggaaatgattacatgattacattcatgattttattcaattcctatatctaggactgggcctagagccttttaactacaagtttgctatcttccccaagaaatgaggccttgttgcagatactatgacttaaggtaaagggggtcactgcaaattaggcccactagcgggatgaaaagatacaaaatcctcaagagcagcttcccagagctctgggttggtctaaggaggtatcctaagagaaaagccctccttacattgccccccacaaagaatctccagtcaatagtgccacagcagttccaattgttttgaaaaacgtagcacttcatatctccattcatcagttactttcataatctttcattgtagttaactgaaggaatgacatcttatgtaactcattaagaattttcatgggtcagatcctaaataaaattaggctctggaacaggaaaaaactcaacttttcaaactagttttactcaataaaaagttaaaataagactctagaaaagaaatactaaattcctagtattgatgttagtcttaagttcccaatcactattttcatgttaaacatactggaaggaaaaataaaagaaaacatattctagacaataaacatgttttgaagataatagctttttcaaacctttctgtgagatgagttgatgaatgtcattaggcagtgagaaattggcatggttctcattttgaaaagttattaggactctttcaatttatctgaaactccattcatgaggtatgtctttgaattccaaatggaaccctgccaagctttctgaaaccaagcaactgacattcttacaagtgt

SEQ ID NO: 585970 - DNA, 4001 bp, Homo sapiens
ggagccccctggcatgcccaccccaggataggccaacagatctgcctgaccttaggaagactcaactcagggactcacaaggagtttaaaggtgaaatcagtcttgaaagccagttcttctgggagcagactccagtttctagggaaacctcggaaacagacctcttgggcaactcccacacactccagtcaggaatgtgcctccaagagactgttgaccagaggctgagtgttgtctgaaaccaagcctggttccctcatttgttcactcactcatcagactggctgggagacttctctatcataggcactgtgctgggctctttggaagacacacagactccatcctcaagttgccaccactgaagccctaacctctgaagttaatgttacagataaatctcttttatttgccagctccccagggaaggtgggagttacaggtgactgagtttgcaaacttgcctgtctctcacagaaggaaggagacaataagaaatgaaggctgctgagctgtctgtgcacaattgcaagaagggaattcctttgaatatgttaattaaaagggtagcaaatactacctattaagtattatgtgctaagggtttttaaagactatcttatttaatctttataaagtaaaaagttgacaccattattctccccattttatagataaggaaactgaggcacagacagattaagtgatttgcccaaagtctcaccatagttaagtactagagccaggattcaaacccaaggactctggttccacctaaagcactgagctacatggtccaacacagtctgatagggattagagaagtcctggcccaagtgtgaataagtatccagttgcaaggagcattgaggttaacccctaacctatccccacagggcacaatgaaatatataccactggttttctctcacacaggtacataaccttcagccctctgccatctcccagttctccttcagaaaaacatgaatcaaacacaaggaaatgcacttgtccatgaggagctaactcccttctgcccatctagattatcaccccagctccaagaagacccagagcaatgtctgagcacaggctcttcaaggcagttgtccatgactttgctcaaagtagagagcccaggaggatacctctccctgatttttcatgccttcccaaggcaagcctcgcttttaactcatattgacactttcctcctgttattcataaggattaggaggaggagtgaataaagcccgcatgcttctggtttgggtgcagatgtgagctgtgcggatcgtaagaggagacacaagaaagagctggggcatgcgccggctctgctgagcctcagcaactgtgccctccaaccccagcgtgccatggagagctgggatgatcacctccaccaaaatgagcaccagcctcttctggtcacgtctgtgtcctcagcagtagtatatttgctgtcccatagtagacccctgggaaatatttgttaaatcaattctgtcttttgggtttaacagattgtcaacatcaaacacatcatgatggaatataagaaaaaaatttcaacatcaaataaacttattgtagatcatgccatgatgagatctactctatcattattcccatactaggctttgcatgtctctaacaacatcgacatgcacagacatcttttttccctgactctctccttcttttacttttgtgtgcagacactgcatgttctcccaattctgggtagagcagcacggtctgccataactactggttggctctatcttggatggccctgtgctctgaagcttcaacagaaaagggctccccgagatcctggaccaaacgcctcccctgctcagtcctcttccttgtcttacctgagacaaagagcatccacagcagcccccagagcctggtcttcctcatccttcctgtgcaccagctccaactgctgctgagggctcccgggacagctacaaggcaccacaatgacctagaggcttcggaaagttgcacaacaggatatgaggccattcctgggagtcactgagtttgggttctgtttcatcaccagttgctctgactcctgacatcaacacaataatacagagaccaagactcacttctcagttaagtttctttgaactccagttttcctttctgtggtaataatgacaattacctttcaaccttacaaaatctaagggagaatgatacttgaatgtaaatcaaagtaaggcattcatattaggaaggggaacagagggccctttgctctccagaggccccctctccattcacatccagtttagtgtagtgaagagagtcaggcccacatagggagaggctgcgacaatcgtatctcatcttcagggtttttgtgagaacatgttgcttcatcctgccctgctcagccccgtgggttctcttggcttctggtgacctggggtgcacctcctcttcatcaccaggagggccacaccctgcatttgtccttcagcattgccacagacatggcctgggagctcacgggggtgtagggaccccagaaacaatttgagaggacactgccaccacccaacaagaacagacttagatttaaaaaggaaacttggttcaagacgctgaagcaagaagaaaaaatccagcaggttttgtactagaagcaagaaaagacagatttgacagtgtgaaaatcaaatcaataatggagaggattcacttcagaaatattcccaaatgtgaaatgaataaagacatttagaagagctcagaaatttaagggaggacaaatcacagaattccaatctacaaatcagagatgtccttaaagcataaaatggaatggtggatcacaagcaagattaaaaattttatcttaaaaaatatgctttccaggtctgagaagaaatctaaaattggaggttgagagttcaacatgggcaaggaaaaaattcacaaagtgagacctagaataggaagtttccaggtgaaaatttttaaatttaaataaaaagattcctactgctaaataaacaaaaaaataacttggtttcttcaaaggaattgaaataatcaggactcagatttcttctctgagtaacaaataccatgagagagtgggatgaggtataaagaacattatgaccctaatattttacacccaaattgattgctactcaagtataggaacagctaaaaggtactatcatgtctgtaaattaaaacaaacaacaaccaaaaaaattttcaaggctaactttaattttttttattaaagctgttcaatgcagcaatttataaaatatagaaaataatacataaacttaaatcatgttattacactttatagagatcatttgtagtggagattttactatgtttattttttgttctacaaataatgtcggaaaacaggcttcaaacatgcttgaactgaaatctgctggcccctccttttgctgtactcaagcagtccctaaagaggaaaaatagacagaaagctcttgacattttctgactcagagaggagcctacgtgacttctgtggcgatgagtcaaattaataaagtttatttcagtgaataaatcccctccttacaacaaaattaatattccacacttaaataatagctatttcacatactttctacatttttgtgtcttcatatactttgtgtggaggattaagctcctggaagattaagagggagctttgaactaaacagtccaagaagaatttttaattagacttgaatatcactggaggctgattgctccttcacattttcctaactacggacagcacctgcatttaaattagaatgaagtagaatgaggtctttctccacttgtctgatctatttgtgtacttgaggtcaacagtgcaaatagtcacgtgtcacttaatgacagatacattctgagaaatgtgttgctaggtgattttgtgttgcaggaacatcatggagtgcacttacacgaacttaac

SEQ ID NO: 585971 - DNA, 4001 bp, Homo sapiens
tggttctgcacacagacgcccaaaacatgaggcctggaacaggggcaggccagagaggcagccactgcccactcacctgccagcacctccaccaggaccttcctgagggtgtcagcctcactgccatggaggctctggcactggtagagacccgcatcatggggttgtagattccgcagcgtaatggtgagagtgccacccagggtatcgtctgtgatggctgtgctcccattccacctcctcaggaaggacagcagccacaagttgtgcgtgctgaccacacgctggcatgggcccttctctcccagctggcggcaccaggccttgcgcctcccccagtgcttcatggagtcataggggcaagacacctgcagggactggcccgccacgccctggaacactgtggtgttgtgggctccggacagctctggggaggagacattcattcactcctttgtttaccaaatacgctttgaacacttgctctgtgcagtgacctaaacagacaaaaatcctgccctgaaggagcttaggttcttatacaagttgggagcggatggcacagcatgtgtttgtgggaaattgggaaccaggaaacctgggacctgggtttggttttctcactgttgctcttgctgggcctccttggagaagtaactgaccttctctgggtctattctggaggcacttggtcttaaaaccccctccagttctgttctgcacatctctttgccatcatttgggactgggacctctcctctcggcctggggctggctctccctgccccgccactcttgcttgctctgcagccgcccacattggtaccgactttcctgacctttaacttccagcttccctatttctgtggctttgttcccctttcaggaaggacccgtctcggagatattttgggggagacatgaggctgctattttgggaaccctccttagggcgggggagatgggcttagagcaccagcctgttgctggggcagcccccagagccccctgctttgacttctctcttggtcctcccttgcctgccatcttcaaccattactgtgacagaggcttgaaagataggattgggaagttggtggcttgccttttggaactagagagaccagatgggccgtggccctctcccatctgaccacctcccatccatgcctcagaaccccgccttccccctgaccaccatctaagaagctgcaggaacaagactccatttggcaccgtctctcctcttgcccaggtttgtccagtgctctgggggagcaaaaggtgcgctttcctcagcgggaagaagcaattgtgtacaaaaatttggtgtgtcaattcccctcaactcagcaacggaaatctctacgctcctcacctcccatcaagagctgaggacaaggggaccttcagagcaggggagagagtgccccaaagatgcagatgaacatcctcaggttctttcctcctttataactgtaggggctcataattagtggcttataatttcagaggctattaccagtgccagtgccccccaaagcttcccccaactgccagctagtgcctgggatgccactgttagcactccttcccttccaatgcaaccagagtccaccagccccttacatgtccacatgcagaaagagtctgagggtaggttttgatactggggagggaaggagggtgtgaagaatatgggcagggtggggaggagaggagtgcagaacagggcactcaggcatgcgaggactgccaccgccttcataattcaccccagggcccaccacccgcgccccaaccacatgctcaaagtgagggagagaaggcatcacagggcacggaggggatcctacctgtgacaaagagtaagatgagcagccggagaggctccatgccacccttccccagccaagggcagaagcagagtgccttgtgcaagatctcgtctttcccttgaactgcagaaaagagaggatcaggcatgtcaggcgctgcccacaggaactgggctcctggggattaagcaatagtcaggactggggtctggaggcggtgcagggtggggacagaggggaggaggagtcggccactgcagccctggcagaaggaggctgagtctcccagacctctgagaagccagcccaccctcctgctggtgccagccagggtggcccccagatggttggggctggtaaggccctgcactgctcagtttccttgcagagcctagcccagggatcactatcctcacagctgtattcagaccctccaccagctgcaatgcccgccatcttctggtttcagccttgcaagagttggagaacagctgtgcctttagaggccaggaccctcatccagcacctcttagttcatccccccagggctgtcattcctgtagtgtggcagcagttaagtacacagctctggagccagacttcctgactttctgggtgtgtaaccacacatccaaaacctacctgtgtctgttccctgatctatacagtgggaataatgatagtgcaaagggttatcaggagcaccatatgggttcctacaggtaaagtgctttccagtagggcctgacacacagcattcaacaaatactaactattaccattatcctagttagaagggaaaagggaaatgggctgtccataagacagaaaattttctctcccacctggaattttctgcccaagtttagccttcttggaactgttgggtgtctcctgtgcacacatgctcacactggtgtttattttgtgcacacacatgcttgaactcctgatcatcctatcctacaggacaggacaggatatttctcagagttctgggggtaggggtgtgtttttctacacgtacaggttcccatggtgatccaagcacagggacccacgtgtgcaaaggcacaaaagtgtgaaatggcccagtgagtcggggattggatggaggaggcttgagtcaattctaggagtgggaaatggagttgtgctgggagtggcagaagaggctggagaagcctgcaggagcctgtagattatcagggtctactttagtttcctgcaaacactcacttatttgttcttttattcatttatttactcatatttactgtgcatctaacttacggacagggaatgtgcttggagatggggaattcatagtgaggagaagacaggcctccactcaaagggccaactgcccggccttgccccaagggcctgggggctgaagtctgaggctgcctgaagatcactctgtaggtactcttctagggtctttttctagaagtcaggtttattggcccataatttacatatacaaaaatttaccccttttaaatgtctagttgtgtaaatgttgacaaactcatgcatctctataacaaccaccacaatcaccatgtctgtgtaacacaataccataatatagaaagtttcatttagcttaagcgagagcctttgtgcccattttagccagtctctttctctccaatccagggcctggcaactactaagctgacatctgtttctgtagcttcctgcccttcctaaaatgtcatagacatggaattaaatagtatgtagcctcttgggtcagtctttattcactcatcagaataaattcagcatgcgtgaagtttcacttctcaagaatgtattcctttttattgctaaaccatctttcattctatggttgaaccacaagtagcgtattcattcacccgctgatggatatttgggttgtttccagtttgggacaattataaatgaagccactataaacattcatgtacatatgttttgtgtggacatatgtttctattacccttggataaaatcctaagaatgggactgctgggtcacatgtaagtgtatgtttaagtctataaaagctgccaaagtcttttccaaagaggctgtaccatttttacatccttgtcaacagttaatattgtcaggttttaaaaagcctttctaataggtttaaggtgatat

SEQ ID NO: 585972 - DNA, 4001 bp, Homo sapiens
cccaggtccctgcctccctgacgctcctcccagggagtctcatcttgtcacaatttgccttttagtgagttagaacctgaatttagtaactcaaagtgtcaaggaatgaggagggcaaaggatgacaaggattaacaatatatttataatataaaacaataaccacaggcttgagatgagaaggattctaatgacaacatagtctaccctcttatttagagggaaaaaaaacaagggaaggggccaggggtggtggcttatacctgcaatcccagcactttgggaggccaaggcgggcagatcacttgaggtcaggagttcaagaccagcctggccaacatgataaaaccccgtctctactaaaaatacaaaaattagctgggcatggtggtgggcacctgtagtcccagttacttgggaggctgagacacaagaatcacttgaacccgagaggccaaggttgcagtgagccgatagtgccactgcactccagcttgagcaacagagtgagaccctgtctcaaacaaaacaaaaaacaagggaagggaaaatgctctacttaattttattatttgggggttgggcataaaatatgagaaaaggaagacctaaaggtgaaaaaatggccagtatccataaaagaaaaggagtggctgtctgtgcttcaggtagctgaccattttttatttttagaacatcctatctttcttaaaaaaaaaaacccaagtttttaatattttaaaattttcttttaacaaatgcttatatactagaaaagttatgggctgtgggaatgaaacctgcaaaaacagtgtctttaatactgaaaatagggtcaagaatattggcttaaaatattaatgacatttttccatttttaaaacgaaaggagttgaagttgttcaggcactgaatgtacctacttgtaggtgagacatactagatggcctgtgaagacttataaaattaattaaggtatgaattccataattcttaagccatcaagcccgctattacaggaataaaacactggaagctacaaaaattaattctggttttatacactcagattcaacattgtttaaaatatttctaattaaaaaataagttagcatcaagtatgttgaaaatgctggaagaagaggccaagtccctggagtgggaaggacatgccttcctgtggggaagcgcagtagtgtggaagggggaaagggatggttttcagctgatttatctcagacttcccacccagtttggtttccgctccctgcagagctgtcaagaggatatctccttggaatgcctcctccccaggggcccccactcctcaagaacccatgagccctggcaataggcgggggtggggagggtaggtctaaggggtggtagctggcctaggataactcacctgggggcagtatgttcagagagactctgtgcaaaatctggggccccctggccccatccaccatgcagccatactcgccagcatcctcttcctgcagggtaaccatttccacctgcagcaggcccccacccaggtctgtgagaaacgtacgcctgcccgctggagctctgcgatccacagctgaggacaccaggggctggcacccctccggcaagaaccggcaccacaccttctgagctttgacatcctggagcctgtagtggcactgcaccagaatggagcttcccacgggtgcctgcagcacctcagggaggctgccaactatgccctgacctggggaaggaaaggaggtgggaattttgggcaggagctgggagcatctcccagcccagctgctggtatgggtgtggcattcacaataacacgttactcctggacatggggctgagcatatggggcccagagctgcagctcctcctgaaccttaccttctagtcccaggagcagcagcaagagcagggtgaggcccatggctgggcagagaaatgtcaactcctgggcttgcctgggcactgatgcagcattcgcctgagggcaggaaacatctgcctcagaaagtcacttggggtgggagaaaggaaatgatgggcacctccaggggtggggaaagggagttcttccaagccctggttggctcagtgctcaggaactgccctgagggtaagggtgggcaagacaggatgagaagacccgaagaaagctagaagcctgcaggggctggggcccggctaaggggtgagatgggaggattgtgacaattggaggacaggagaggaagaggaaagatgatcttcaggatcttcctaatacagaatctgagggtgcacagctatgaaggaggaaggtagagtgccctgcacctcactcaatgccattcttgctctcaattctttgggagtgccccacgaccacccaagcttttaggaggttgtatgcagtacaacctcaaacaggaagtttcaccttgatcctgtgccctggactgggtctttcttcatttattgtcctggacactatagaacccttccatctggatccacattcttcagttctgggaaacaaattcttactttgataattacatgtccattttcttctccccttccatttttctgcaattccttaactagttggttattgaatgtcgtgtgttcatctcattttcatatcttttctatctcattttccatctttttgtctcttttgttctgccttcaaggagatttcctcattttcttccatccttctatttttgtcttttaaaatgttattttttaatatttttaatttacaagacaagatattccttattctttgagcatttttaaattctggcatactatttttgtttcatgaatgctctatcttctctgttggaagacaattcttcacaaatattttcacattgctgcatgttctagtccttctgtgcaaagggtattggccaagttttgctgaagggtgattgaatagcaaacataccttgagtgcaacgtccagagatttgctcgcattcttcctcttcttcaccggagatttacattccagagtaaacgtttctctctctctctctctctctctctctctcttccagagaggaagatataccagattctctatataaactccaagtctcctaatttgggggtttctctcctgtgatccaaactcactgcctgcacaggaggcacctggctctcattcatgttgccctgtggaattgggctcgaggaactgggacaaagtgtgagtaataaacctaataaactatctgacctcagacacaggggaagcaccagtggtcagagagactacagcagctggggatgggtgggaggggcgtattgccctaatctggagggtaagacctagaaaagggcctggaaaggccattctccctcactcccatctcctcccgtctcaccttttttcctctttttccttccttcctttgggaacaagggagtgaggaatgggaaactgggagcaggagcatgagaaaatcagttaatgtgttaagctgggccttgtggaagtgggagattgggtgaccaacttcccgtttttgcttgggattgaggggtttcttgggactttctgtgcaaaaactgaaaaagtcctgaacaaaccaggacgggtcaccctagttggtgatgtgcttatgtctgtcttgccaatgcatatcaggctttctttgatttccttataagaaagttattttcatactaacaagccacccaggcgtgttgtgtgaagaggtgaactgtattcaacactggactaagtgttgaatatggtccactgctgggtgctgagacagaggtgaccaggcaagatcctggccttcatggagacatcatgttgctgggcgttagatgaaggaaaccagtgtttattgaggacctactatgtgccagtcacctggccaaggaccttcacaatgttatttctttcttttttttttttcttttgagacagtctcactctgtcacccaggcgggagtgcagtggcgcaatcttggctcactgcaac

SEQ ID NO: 585973 - DNA, 4001 bp, Homo sapiens
ccaggtcatgccctcagtgagacagatgcagagacacaaacacaggtcattaagttgtgaaatttcagtgcccaactaactaggtagataagaaaatctagtatttgaaaatatgattaacagttatttatttcacaaataggttcacttagtcctctttaaataataactctccttagttcattccatctggtgtttagttttaaaatattctagttacataaaacccatagatcaagcctgtctaaatatacatgtaaacaaactcccaatggagtgtgaaccacaggattctacaattattcactttccacctgcaatatctttctctctatgctgaggagtaagatgtggtccaagccttcataatccacagtctggtagagacagagcagaactggggtgtgcagggtgactcaggggacagagagagggagaaagctgccttgggctccctccacccctctgcctgccttaagctcagctgactcttctgataatttcaccccagagtcttccaaaaaaaccacatataaaaagactctcccccatagtagagaacagagagcacacattttggagtcaaaataaacaagggttgaaaccctgtttctaccacttagtggtgtgattaggtcacctgtttgatacagaaatatcaaaacagacacttgactgatacagaaatatctctgtttctttatcagtcaagtgagaatagcaccacacccctcacaggttgctgtgagaattctgccccaggtcagtgctttgcacacagtgcatgctcaactcatgcttccttttcccacatgctggggcctcccagttcccccaatggaacccagagctgtgacagtcaagggcccagaatccaggacatctgtcccaccagaatccaggatatccgtcccaagtcccagccagcagccactagagctgaggctctgtgtgaagcagcaccctctctaagcatccctctgtcccttgcaaactaaacagaatgatccaacttcattatttggtggatgagcccaggatttcttagcacaagagagacccctttctgccctggcagtgggaagctgtttctctaccctctgggaggtgcagagttgggtgaccttgggatgggtctccagggcaatgtcttcatgtgtgcctacacctcccacccctctcacaggcagtggtgagttttgccaacccccaccatgcccagaactgaacaggaagtggtaacttggttgccatggcagcgagaggggcaggaatgggtgaggttcctcaaggagcattggtatctgtgaggtgggaaaggcattcacacactggtcccttcaggacagaggcagggacaggatgtggcatcagcatttcaagaaaaatgttcaaattcagttcaaaacacacatgatgcaatgattgctgtcataactaagcagggcttcctgacagaggccaagcagagaaagctatttgtgtgaggaaattgagggctctgctttaaagcctgaggaagcctagcagataaaggagccaatgcagagagggtccagagctttatcttggcttgggaggcctgggttagcttcgcctggggcctgatattagggtaaagagctaagtcagccctaatctcctccttccccaacccacaaaacactaaacaagaaaactgctggtaaggagggtaagaaaaaggccctgagctcctgcctctgtacccactccctcctccacaagtcagccccttctcccctcacctgagacgcaaccctgtggccacagcagcagcagcagcaggaaggctggggccatggttccatccagctgggcagtgtcaggcctggagatccaaggtgagggcccacccgacacaggatgtgccacctgggcctgccagggaaggacccggggttctaaaagtgaagctgcccatttagggaagtgaggcagtgtgggacccactgcccccagccaaccgcagggattcattgagcctattatgagggcggtgctggcagctgtttccgcccttttcctcggaacttcaggcaggtgtggctgctccacccagtctggggccccaagccgggaggactcacagtcagagggctccccgccctccccaacctcccccagaaactggtccctaggatccagcaagggggctggggtgaggcttctggaacgtcaggtatagaccttcctggaatcttctgggctcagagacccaggggtgcgggctcttaggctgagatggagcatctcagaccctagtttcttacatatatacattcacagggaagttcttataaactctcattcattcattcattgcagattctttctgttccttcctctctctctctcccaggctcctggctgctcagaacagtcacttgtgttcactgttgcaaataacctcttacaggctcacttgaaatcttacttttgtcaagcgggaaaaatgcaaattgttaagactcagggcataaattttgggttgagggaggggttcctgtactctcacacacaggtgtgcatgcacatgcactcacactcacagtctcactttgtcttttattcactttcacacacacacacacacgcccatgcacacagtctcacacacaccccagcagcctctccttttccctatccatacgtctcctctctctgtccctctccctgcctctcctcctgtcgactctactcaccatcagctccctctagactcctagtccctcgtgcaggcttcctacagcctccgcagtacttcccctcacccacctcatctcaagacccccttcctcccctgcctccagcctacgtcagcacgcaggcaagtgccctccacttcctcctgctcaatgctatctcgcctgtacagccaccagctccagtggaaatgacccagcactaggcccaagaccacacccttcacttaccccaaggcctagaatcagaagcatcaatttttgatgtccggtacctgtgtcatctgctccttcagtgtgtggggacccagctggactcccgtgattatgtatgctccccctactcactagtgccatgtttctactccttagatgggactgtcaaaaggtaaactgaggcacaataaaattttaaacagattatttcagcaaacaacaattcatgaatcaggcagctccaaacagaagaggttgaggagctccactgggggaatgcaaggggaagactcctacaggacaagtaaactgaagaaaatatttaattagttatagttatatagttcccttatttggcctatcctgttggaaagaccctagttaattatataagtttcttttgattggttgagcttaagttctatttttccttaatatacacatttacaagaaatagctcgtgttaagtttcactgatatttgcaaatcaagcaaagttgaggtcacttatgaggcctaactgtttttttaatttttgctcagggactcttcaggcctggtctccattttcattaattttaacaggactcagagcaaaaagtcctcaagcttgcatggccacaatcttaaattgaccttgaagccccaagctccaagcaaagaagtctatctcggctgaccctaagcttttgtagtctctcaactcattcactcactcattaattcattcattcatttgttcattcccacaacctcattgctatgcatggggctaggtaggcactgggggcgtaggaatgagacacgattgtcacttgagacctctcagctcacagacgtgttttgttttccttattcacccttcctttttcaatgtttctcacccagtcctcagaacttcctgagctccctgagttcaggggccatctcccctccccagcacacacagtaagttcctccatcccttcccccatcagaacagtaagttgcttcaggagtgggggatttatctcttgtggggactttatgcgcttggaatccatgattctatgaaactgatac

SEQ ID NO: 585974 - DNA, 4001 bp, Homo sapiens
cacaattaacaacctgcatcctcttcccctttcctcactaccaaattttgagtcatggcctgggggctccacggctgtaacctatgccccaacccaccagagaaggatccctgggtgccctggacttgattccaaggttcaggagctaatcaggccctcccttcccaagacctccctcccagtgttaaaacctctgacctacctggtctcagagccattgatggagggatggccagaggtcccctctggagaagtgatcagaactaaagaggacacaaagaagacagtggctgcccagggcaccagaatagagaatgggattgggtcccaaaagtgtgagaggaaggggagaggggccagaggcagcccctaagggtccctcaggctaagggtaactgaggcctgagatctccataaccagctgaagtcaagtctggcactgtcctctccatgctggcgggaggacaggggcaggagggctgggacacacgtgtgcaaggtgttccatatggacttccctctggggacaccctcccatcatcgtgagaacatggcgatcttctgatcacatcagatagtgcatgtttctctccctaagagacagtgggccctgaaggtagcttcccacaagcccaggccccaagagatcagtcctcagaggcaggcctccctggtttccccttccctgaatctgaggctcccaagctgcctggtgacccttctaatcttcccccaccgaggcctccaacctacctgtgcttgttgggagccagggaagagtccacataggagacgtggttggggctaaagagaaaagacagcagacaatgactctccaggggcccagaagagagtagggtctaccccatacataagaggaggtaggggcccagagccagaccctcaggatgtcttaagccaggagtggtctgtgcctaagatctgcatgacagagttgttggtgtgtgtgtgttagtgtgtgtgtgaaaagaagagttgtgggtgtgcctgtgtaagacaaagagagacgcagagtgacagacagactgtgtctctgtccagggacctctgagggtaccttcccaacaattgaggccaggatgtaccgggtggaggagaggtgagagtccatgtttggggacaggatctttgctccccttggaccacagcagaatacctggcaggatgggggatgatagaggcatgggagggggtgcatgacatttccttcaggtccctggggggtggcacagaggtatttcctcaagaaaagagctcacctggagacaccaccaggctgatatttctaagaacagtgatgatgttttcggaagcgttgtagattccacaccagtagaatcccgagtcattctgtgtcagctgaatcatggtgatgttgaagaagccagcattgggcttgtcccagattgtgtaatgagacttctgaactgctgtccagggcttggagctggtgacaagtaaggtacaccgacttggagatgtctgctgacaccaggatttgggctgatagggccctctcttgggtgagtactggcattgcaggaggagggtctgtcctgggtgtttgtgaagttcttcaggcacagcaccctttacccaggaaccggcagaaagaaacccaggtcagagctctgaagggacccaacctcccccatcacaggctggggaaggggagggggaactagttctgatgcccacacatggaagagggcccctaaattctgtcctatggtcacacagccatgctgctccctgccccactcattcttcatcccactccttacaccccctgcactctttccctccatgtcacctgaggccaggagcagcagcagcacaggtggaagcagcaggtgtggaccccaccccaggccattccagcccagatctgtttctgacagcggaggagaggagaaaaaagggagccctctcaggaggagtcagacgctgggtctgattctgccccaggttcccagtgtctctcagctggtaaaattgaggaagtcaatgtcttgctggggaaatggtcggcctgggagggcgggctctgcagaccaggggaggaggggcagccaggccttgaaaggggccaccagctacagggtctgtctctgggcctgggcacctcagccctgctgtgttgctctgccgcctttcactgaacttctccccatgtctgctgctttatgccttccagccagtcatactgctcctctattgctaggggcagctctcagcatggccaagaataaagctggtgaataaagctggggtcatccctctttccttctctctgtgcacttcctataggtggtcagggcccttggaggcacgaccagacccctgaatccttctggtctagccatggtgggttgatgatgagttttgaccctgagacattttgtagagggcagattttaatcccaggaattacaagatgttccctggaaatggtggggccaggaaagcagggaggaaagagagtgctggtcagggaaagttggaggggaaggcaggtaggagtggatcagttatggtagcttgggatcatctcaatcagtgcttgttggatgaatacatcagtggatgaaagaacaacgcgtgtgtaaaatgtacagaaaaagaaaatggccgaagtgagaactatctagcaacaaaaccaagtggtactggattactacccaatgtatatattaaatctctaggagtccatgctgatgtaagtaaatgactgaataaagaactgggggggggaatagacaaatatcccatgcataaggattctgctgtgttcagaatgttgttcccccatctcatatattcaaacttaatttccatgtgatagcgttaagaggtgggatcttgtgggaaaatcttaagtcatgagggcgtcatcctcaagaatgcaattaatgcccttataccagagattgcaggaagcagatttgcgctgtctgccatatgaggacagtgttcatgccttcagtcaactgaggttactgcaagaaagcaccaccttggaagcagagagcagccctcagcagataccacatccactgacaccttgatctttgacttcccagactccagaactttgagaaagagatttctattatttagaaagtctccagtctaaggcatcttctcatagcagcctgaagggactgagagagattgcaaacaattcttataggtattctgccctcaaggcagaagcataaattcccacggcttaagcatgggctgtgcaggtgactttcctccagaggatagcatgggaaggaagagaagagtaactgtacagtggagaaacctgacacttactgtggcagccaggcaaccaaagtgcagacccacagggataactcaggttgttagaatgtgtcattgacttgatgtgatgacagggcaattagctgtgcagtctccttccccaaagccgctggccccaggagaaaaacatcaaacaaattccacatgagggacattctacaaaatacctgagcagcgttcctcaaaactgtcaaggccatcaaaactaagaaataattctcagaaactgctatgaataagaggagcctaagcagacatgaagactaaaagcaatgtggcttcctaggtgggatcctggagcacagaaagtacatgaggtaaaagccagggtaatctgaatgaagtaaggacttcaattaataaaatctaccacagaaacagagtagaatggcattaccagaggctgggaattggacaaactgggtaggtattgttgaagaaacacaatatgttagacagaaaaaataagttcaagagatctattgcacagtatggtgagtgcagttcataactatgaattgtacaattgaaaatgacagaaaatagattttaaatgttctcaccacaaaacaagtaagtatatgtggtattgcttgatttagtaatttcacagttaatacacacatcaaactatcctaccacgcatt

SEQ ID NO: 585975 - DNA, 4001 bp, Homo sapiens
acctacaactcttctgcagaaaccagtaggctgaggaccaagaaaacagaggcaaggagaggcaaaggctgctggttaactagttaagcactgaggactcctgctgttatcctctccagtcagtgagcatcaacaccacacttcctatcgccaaactcctttcttaaaagggtcagtgatgcagaaggtgggtgctaactgggacaacttaaaactccccttcttaaaactctcctcaatgacctgctgaaaagtgcacctggaccggttttcaggagatattttttaatgaactctttagccactacaggggcggtcattcctaagcacgacttccacgcactcacaagacagcccaggccatgctgaattgaagccatccccttcagtactggcacttgccaaagctgcgtctagtctggggaagagtttccacaaagctggctctaacaggccggtagaagacacacggaggaaccagaaagcgttttcttgtaacctaaggatggcaggcgcacatgctccagtccagtgctggccagaggctgcctgccaggtgctctcggcctccgctggtgaaggagtggtttggttggtttttaatatctgtttcttaagaccaccggcagtaacttcccagtctcccaaactgaagttggggagtgaaggaacaggtttacccccttacacatttctcccatctgggtggccacactaacttctggggagtacccagcccccacagagcccgcaggcgcgtatacatacacatatgtatcatgtcaaaaaccccaaaaggcagagtcctgcggtttcttagctggagaatgaagcctttataacatcacaacctcaaatgcaagcccaccatcactacctttaagccagggttgccaattatagcgcccacctcatccctccccctttgctgggatgctgtgcagcccggagagggaagaagggaagaagggagaaggcctgcttgcatagtgaaagtaaaggggggggagacttctccttctgtctccccactcttccctccccacttcgccccacccccgtcttctcgaggagcatccccaaactaattttttaaaaatgaaacttaataagcttcttgcctaccttggctgtttctgcaacaagtgcatgggcaatccgacgagaagaccagtatccgcttggggggtgagatggggggcgagcagagctgatggagtaatttcaatattaatttatgtcagccgccttctctcagcgctactcacttactgtactgccctcagcctgtaaacaaatatcgctccgccaggaaacatactccccagatgcaagcccctctccccagcagggaacctggcccctcgtccccccgacaagagtgtgctcccccacccagggtaggaagctttgggtttccaaagcaccaacccaccacctcctccaccaccccagcaagaaacttactcggtccgtctacgcctccaccctcccttcaggaaatctactctccatatgcattcagcctccccgcaggaaatctgctcccccctccccccttctatatacatgcacccctccctctcctcctccccatgcgccctccccggccagaaacttactagtgagcaagcgtgcaggctctcctgatgctggaaacttactcccagatatagcgcccgccagccccctttcccagccctgctccccttcctgccctccgccgcaagcaactccaaactctccgcatccagccgttctccctccccagtggaaatttgcagcgccgggctgcgcgcgtgcatccaccctccccttcaggaaacttactccccatctgcatgcaccgcctctcagccatcgcttagagggaagggggtgtgctggggagacagaaatacatatgtatctctcgcccctcccccggtcgcagcccactcggggccgagccgcggtaacctggccttacctttgcattgctccccatcctcgccccctcccttaaccctccttatccgctccccggtaccccccttttttcacccattacccacccctagcaaccgttcccaagctcctctcggccttttttttttttttaaatccaggatgcaaattcctcccttgtcagcaaatcgactgtcaaattattttcttgcaaaaggagaaaggcggggtggggggggggagcaggagcaaaaagagggggagggcgggggaagggagggggaagggagggagagggaccgaggaggggagatatccctccgcagagctgggtctggccgcgggcggggaagcaggaagtaaggtgtccagcgccgcgaccggctggtcgtccgcctcggcccccgcccgcgtcccctttcccccggggcgcagcgctacggcgggcgcgggccgcccggcgcattgttcgcagccttcgcggcggtgcgctgctgactttatttgtgcgctttgcgtgtgcgtgaggttgcaccttttgtaggctggcgagtctctggacgaggatgggacgggggacacgggcccagttgcggccctgcgcgagcgggacctgtcagccctgaggtgcagcggaccctccggcatggccggaaaatcgaggccggggagaaggcagcgtggccgggaagctgccgccttaaacccggaccagtgcaggattgcttcctgcgtagccgtcccggttattgtaacacgctttgcaagctaacgactggggtttgtgagggggtttgtttatttttctaagtgtttgcaaagatgccgaggtcgaggcgggctgcgaggagacggtccgcgcctacccccaccgcaccctggcctcggtggggctgggagagggctggggctccggagaaggggctggaggttcgcgaagcgcgcgtctccatccctccgccccgatgggggcggggaaggggtgcagtagaccgcgctggaagagcagctctctggggaggggtctcccttgccgcggcaggcgcagcaggccggggaggggggttgcctaggagaggggccgggcggcggaggggaggggaggagagggggcgcgggtgcagccgccgcgcgcgctcgcccctcctcgcgcgccatgactgtggaacgtggtgccggggaggagggacggccaccgggggccgcccggggctgctcggcattggtgcggaaacccgagcccggagtcgctccctcgcgctgtctcctcctcctcctctgcgggggaaaccgctgcacccaaaccgggagcagctgcgagcagggggcagggcgcgggctgaaaggcgagccgaaggttcaaacctccgcggcgcgggcgggggcggagggcaacagcaggacggcccccaggtcccgagaaggcgtggcagtggtcggcccaggtgtcagggaacctggcctgagacccctgcatttccaagcttctttcctggtcagaggaaacgtgaaccaaaggtagttcagctaaacagaccacctcgagccgggttcgaggcatctgtctcgagggcaagacagtattttttgcacgacagaaagttacaccatccatttttttccgtgggggaaatcattgcgccccttcccccaaaatgtcgcgcaagaagaatgacctcccgctacccagaccttcgccagtgtcccccaccccacccccacccgggcgctgggtgtggattgggcggagggaggctatatgggagcttaaagcatgaggtcatgagcggaggagactgctgccaaaagcacccgaggtttttgtgttttttgaggggtaacggttctccatcttcagcagtggaaagtcctcccgcctaccctaccaattctggggcacgtggaccacagagtccctgaaaagaggaggggacccgggctatttcgcttaatgagcgtttggcgcgtgcccagccctttatggagcccttccacataagcaaagaaagccgagggacagcgcacagtgttgcggcgactgggaaaggcttcag

SEQ ID NO: 585976 - DNA, 4001 bp, Homo sapiens
tacagtaattcaatgaggtcatgatgatttttactctccattttacagataagtaaactgaagttggagagttgcttgaggtcatagagttagtgtcagagtcaggatttaaactcataataacttcaaagccctataatctatgttgcctcagtttcaggaagacactggaccctgaggaaggggaggaacctggggaaggggtgatgacttaccaggaggacttgcatccttttattttctcttgactggatttcttgaatctcctctctctcttttcttagacatttaagacacttatggatttgttcctggggagaaggaacataaaatactcaagatggaaaatgatttgttcaggtttgtctggtcatctgaccctctgcctccaggaatgaaatggccccaggagaggagtcccttccttagctgacaatccccgagccttcaccaccctgacagcttactccctttgggtcttcttcctcttgatttgtctctaagactttggatcaggactttccccctttatcctgtgccattagaggctgtgacttggttttcccacttgagtctttcttcaggtttaacattctattgtgttttgcttcgggtaagtggtatctggggtctgtactgagtttgatatgccccgcactgaaatcattctgagtttccgactcatcccaaaggaacatgtgtaaataacaaccctcccttgttactgaaatcaattatctgtgtatgactccagaggggagaagaaacttgggtaatgtaaaaataattgataaattgttttcaaaattatttgctccagaatagagttaggaacaggtacacacacgataaatatgtgtgttcaaagatatattagaattctcactatcaactgctaattaactaattaagacatccacacacagacttgtactaaaacataattcataagcacaatgcataaacaactaaaaccagcacacattcatttaatgacagataaaatggcatgccacatacatttacccagcctgaatatatgtaaacacgaatttattcacaaacaggagctctcagttacacttacacactcaaatatatacatactcagactcccatccaaacacaccagacacacttctaaacatgcaaacattaacacatatacacactgtttgtacaatcattccctcaaatgcaaacttcagacacacctgatccatggcacagacacacacactcatgtttggtcactcattcattcaacaagtacttgttgaactcccgttatctgttggccacaagtgaacacagaacacactcaaaaaaacataaaacataaacacaattttccatgcctgggtctattgcctgggtgatcatgtaagtaaggagaaagaatttggcctccgggtggcctaaataatccacaactctgctgtttctcttagtccagtccagtccaccctgggatcccccagttcccctttcctaccctatagggagccgctgcatcctccaggaagcgcatggtgtgggtagcgtgctccccagcctcccggcacaccacgcacaactgcatctcatcatcctcacagaagaagtagatcttctctccgtgctcttggcagacatcctcctctcccaaacccagtgtggacaccagctggaggcgctcaatgttctccaccacgttagccagctgccagttgggccggaagctcccaggacggaagggttctttgcagagtgggcaagtaggggactcctccaggtctgggcctggtatctcacagtagcgggtaaggcaggcccggcagaagttgtggccgcagtcgatagtgaccggctccctcagggtaccctgacagatggggcagttgacttcatctgccaggctggtcacagaggcagcagaggccatgctggtcctgctgctatggcttcctcaaggccactctctctgcttggccacgggggaagggctgggtcacacactcacacacccacacatgcacatggctggacacaggcacatactaaatatgcaccagcacccatatcgtcacacacttgcatctctggcagccagggttctattctcctgccaacagcagagatgggaaatagcagaggagaggaaggaagaggggctcacagcatttcagaggtgaccttagatgaccataaccaggggctggccattcctttctgcccatccagagacactcacagtagaaggaaagtggtgatatgtcagctgtccactgtcagaagaaatattcttttgggggcaagtgggagactgggtcacagagtggagatgccattccagcctttctgccatatggccagctgtctccaaagagattggaggtatcagccagcccagggcttgcccatcagcaagcaggagagtgtgggggctcagataaggtccttgtgccagggtgtacactgcaccagcaacttcaatggtgatgcctcaactggcctgctgcaggcctcaaaagaggctggaatattccctatgatggggaggagaaagaaaactactaacggccagaatttatttacaatgacggtacaacttacattgatacaagcaatttggccagaatttatttacaatgacggtacaacttacattgatacaagcaatttaaaagtatgatcttatttctgtgtctgctctgcaacatcagtgctattaggatctccatttcataaatgagaaagctgaggcccagccaggttattcagcttgccctaggcacacaagtaagaaggtgagtgaccataaataatttgctgtcagatctgtcttccgagcaatgctattcaacataaacgcaaagtgagccacatatgcaatttaaaatttcctagtggccatataaaaatagtctaaacaggtgaaagtaattttaatgatgttattttatttagtcctatatttccaaaatattatcatttcaatatgtgatccatataaaaagtcattaataagatattttacatttttaaatttgtgaaaagcctttgaaatccggtgtgttggccgggcgcggtggctcacgcctgtaatcccagcactttgggaggcctaggcgggcggatcacgaggtcaggaaatctagaccatcctggttaacacggtgaaaccccgtctctactaaaaatacaaaaaaattagcctggcgtgctggccggcgcctgtagtcccagctactcgggaggctgaggcaggagaatggtgtgaacccgggaggaggagcttgcagtgagccaagatcgcgctactgcactccatcccgggagacagagcgagactccatttcaaaaaaaaaaaaaaagaaaagaaaaaagagaaaaagaaaaagaaaaaaaagaaatccggtatgtattttacatatacagcatgccgccattcagaccggccacatttcagtgctcagtagacacatgtggctggtggctcctgtattggacaaactagttcctgggctgcactcgtggcaggaagagcagagattggatgggaaggggaggtaataaagtgattagagtaaaaagggagcaaccacaaggggctaggctgatcacccagtgggagaatgggggaaggcctggttttatccacagatgtgtgcatgggtgaaggaccgtggctgcagatcttggtcttggcatgaggtgtgggaggagcgtagggctttaagccaggagactgggatcgtccttaacgtgatactttctagctttgtgacctttggaaagtcactttacatttggaaagtcagtttacatttctttctctgtaaaatgaaggtaataatgtttgcctagagggttattaaaattgaatgtagtaatataaaaatactaaaccctagataaatgtggttgaaactgattatctgactaatcgttttctaatgtgtatcaacataaatcatttgcattatggtttcttgccttctccccgctacagtaaaaat

SEQ ID NO: 585977 - DNA, 4001 bp, Homo sapiens
tgatgggtgcagcaaaccaccatggcacgtatatacctatgtaacaaacctgcacgttctgcatatgtatcccagaacatgtataataaaaaaaaaaagaaaaggacttagtgcccctgaattgtatacttaaaaacagagagagaggtgggaggaagggagaagagtattctaggaggaagagactatgtgcaaaaagtattggaagcaggaatgaataagacaactcaggaaaaaacagcaagtgcagctcagtctggccagacacgtggtgccttgaggagggaggctgagcgatgaggccggacagggaggaaggatcccgactgcaaagggccttgaatgtcttgctaaagaccttggactttctttgggcactaggtatacatgggaggattttgtgcagatgagtgactttgtgttttaggaggatctgtctcccagcagattggaaggtgactggaaagggtgagaatggagacaggaaatgccatggagactgcaaagtctgcgcaagagatagggagaacctggctgtgaggataaggcagaattaaagatttgggagatgtttctaaggtaaccacttccagacctggtgactggatgacaagagagagatctgagaggctgacaggaaagtgccccaaggccagatggggaattctcacaattctggactactgccaccctccctttctcaagaagaagagcagtgctagcaggttccccttcccagctcctccctcccctctgcgccctggcagtcagggccctataaaccccatttccagtctggatcctgggagaacaagtttaccctgcccataatctgcagaagatcccactcggcattggagctttctttccatagtgagtgaagccaaggctacagttctttgcactccacctctgtggggtcctctgagagctggagctgaagttccccccagaccaggaactaccacacatccaagtggagccctatctgccttcagtctgggaatgcctcgaaagtccctgtaaccttagggttccctgatgtggaagcctttcatccagatccccgcccgatttcctcccctcataacaggacatcatcctgccccaaacaggccctaggtaaagctacacttcttacccggtagggctgaatggcctcgtccaggaaccccacggtgtgcgcctggtgcgtgggaccctccctgcagaacacacagaggaactcggcatcgttctcgcagaagaagtagatcttctcgccgtgctcctcgcagtaagtttctcccagcgggcccaggggcacaggggccatgggagtctctgcctgctcctcctcttggcagagcgggcagagcaggatcttgcccgaggattgggcccccatctgggagagcgcggggaggcagagccggcagaaggtgtgtccacagggaatggtcaccgcatcctccagcggccccgcacagagggtacaggcaggcagctcatggaccaccttcagggacggggttgcgggcatcacggtgccttccccagcccgtccactccggtctcctcagcccacgcgagttccctttccctgaaatcgagtcacacttacatgaatcgcagagggaaacggctgcaaggctaagagacagagagagagaaagagagagagaggcaagaatgccagcacagggaagccacctggctccgcctcttgtgttccctagaaccctggccaccacctatcagcggagtgggtccaaattccagggcgtctcgaattacccagaatttcccagtggcggccaagtaagccagttctttactcctggctccttctggtccctagggtggagaacagagcacaccatgaggtcacagggggatgggtttcctggaatctgtagaccacagtggctggggagaactggggagcagaagcttcctgtcagattgagcaggtgggagccataaacttctggctctgaggcgtgcccacagcatcaaagtccaggctggagtgagaggtgtggacttcgggagattctgccggaagtgtgtgggcgggacgctgtttcgacactgcaggtagggtgtaaggattgctcatcgggtcccctcttctgctctcctttcctccctcaccacatctgcccatggtggcccctcctacggtcccaaatcccccaccacctggcacaacagtcccctttggggttcgggtaacactggactattttatttatttatttatttatttatttatttatttatttatttatttttactgtagcggggagaaggcaagaaaccataatgcaaatgatttatgttgatacacattagaaaacgattagtcagataatcagtttcaaccacatttatctagggtttagtatttttatattactacattcaattttaataaccctctaggcaaacattattaccttcattttacagagaaagaaatgtaaactgactttccaaatgtaaagtgactttccaaaggtcacaaagctagaaagtatcacgttaaggacgatcccagtctcctggcttaaagccctacgctcctcccacacctcatgccaagaccaagatctgcagccacggtccttcacccatgcacacatctgtggataaaaccaggccttcccccattctcccactgggtgatcagcctagccccttgtggttgctccctttttactctaatcactttattacctccccttcccatccaatctctgctcttcctgccacgagtgcagcccaggaactagtttgtccaatacaggagccaccagccacatgtgtctactgagcactgaaatgtggccggtctgaatggcggcatgctgtatatgtaaaatacataccggatttcttttttttctttttctttttctcttttttcttttctttttttttttttttgaaatggagtctcgctctgtctcccgggatggagtgcagtagcgcgatcttggctcactgcaagctcctcctcccgggttcacaccattctcctgcctcagcctcccgagtagctgggactacaggcgccggccagcacgccaggctaatttttttgtatttttagtagagacggggtttcaccgtgttaaccaggatggtctagatttcctgacctcgtgatccgcccgcctaggcctcccaaagtgctgggattacaggcgtgagccaccgcgcccggccaacacaccggatttcaaaggcttttcacaaatttaaaaatgtaaaatatcttattaatgactttttatatggatcacatattgaaatgataatattttggaaatataggactaaataaaataacatcattaaaattactttcacctgtttagactatttttatatggccactaggaaattttaaattgcatatgtggctcactttgcgtttatgttgaatagcattgctcggaagacagatctgacagcaaattatttatggtcactcaccttcttacttgtgtgcctagggcaagctgaataacctggctgggcctcagctttctcatttatgaaatggagatcctaatagcactgatgttgcagagcagacacagaaataagatcatacttttaaattgcttgtatcaatgtaagttgtaccgtcattgtaaataaattctggccaaattgcttgtatcaatgtaagttgtaccgtcattgtaaataaattctggccgttagtagttttctttctcctccccatcatagggaatattccagcctcttttgaggcctgcagcaggccagttgaggcatcaccattgaagttgctggtgcagtgtacaccctggcacaaggaccttatctgagcccccacactctcctgcttgctgatgggcaagccctgggctggctgatacctccaatctctttggagacagctggccatatggcagaaaggctggaatggcatctccactctgtgacccagtctcccacttgcccccaaaagaatatttcttctg

SEQ ID NO: 585978 - DNA, 4001 bp, Homo sapiens
ggtcacacacaatctgagtccaacctgttactcccctgcaggaagtgatatctaagaagtcacccactgccttaggccttcagtctccttacctcttaacaaggggaaaatattttgccaagtttaccaggctatttgaggttgaggcaaggtcacataagtacgagtgtctcattagcaaaaagctctataaaaatactatgaaagagcacaggagccaatgtgaaaagagctcccaacagccaaagccacagtaatttgagcaacaaaattaagtagtattggattataaaccaaagtataaaataaatgtccctgagtctacactgaaattaatgattgaataaattaataaattgggggaagagagaaacaaatcttccatgcagaataactgcaaacaataatatgtagatacttgccctcaagaagggggaatataactcttggctccctaggtatgggctgcacttagtgacttccttctaaagaggacaatacacgcaaagagtggaaaagagactaactgtacagtggagaaacctgaaaaacactatctcacccaaatcaatattaagtcataaatcatgttagtacatgcccttgatacgatgggatgataatggcaatctacctctgtggtcttcctcccagttacccataagcccagtcttaggagaaaaacatcaaattccaatagaggggcatcctacaacatacacgaccagtattcttcaatgctgtcaaggtcatcaaaacaagtctgagaaactcccacagccaagaggagcataaggagacatgacaactaaatgtaatgtggtaacctccatgggatcatgaaacagaaaaagtactgaggtaaaaactaaggaaatctgaacacactatggactttggtcaataataatgtattgatattggttaactgcaacaaatgtaccacactgaggtaagatgttaataacaggggatccggtttggagcatgtgggaagtttgtactatcttctcaattcttctgtaaatctaaaagtgttgtaagaaataaagtctacttaaacaataaaattgcaatttttgaaacataaaaagcctattttttttaaaggtgatttttttgaacttggggaaaaacatgttagggattatgatttcagctaagagttaaaaacaggaggttaaggcatgcataaacgaatgtcattctcccctcttttgaagtacacacaaatcgtgggtcaaaatttgaaatctactggagatttggaagtgtgtccctcccatttactccacagagttaaatttacactttttttctaaggccaaatagggagaaaatcagtaagaaaaatgctaatgagctggaaggagtgaaagcacagctccaagtatttgtggctaaaccggtttactccgaacaaaaaaaaaaaaaaaaaaaagaaagagaaagaaagcatgacactttggtcagggagctggattagtcgcctatctaccaggctccaagcaaccggacggtcatccaggccccgcttacttctggttccgcagactagaatggatgggagtctgagtaggataccagaaagcgagaaagacccaagaggagggggagaatgtaaggacaagcaaacaggagggatctggctggcagggaggacgcagcgaacttgaccccctcctgagcccgcccgggggcctggccccgttttgaacccgggcccggcggctgcgttgggtcgccccaaacccggtgagcgtacgagactgttgcttcgctgtatgtctcatgtgcaccccctactcaccggtcccgagctccgggccgcgaatcccggccggcacccctcctctctcacggcggtctgttccgggtcccgctcctgcacgagcaaccagcgcgacagctcgtccccgccccgtaatctcccggctattcggggcccttcgccgagatttctcccggaccagccccgggattggctcctgccgaacttcgccatccaatgggaaccttagtctcttttacgtcactgatcaccgggcaaatccccagacagccgcgggcggtggggcaccaggggcagcgaaatggaaactgaaatcaggcgggaccgaggctgcgccaagagccgcagcctgagtttggcgcgtaattggggtggcctgttacacggtctaagggagtaaatgctaaggcttaggagtcacctacgtaggactcttgagagggcaataatcccctttccacctctcgagacccctcactgcccaactctggccttatgctggatcagggtccgagggcgctttgaggcgaaggtggcgctcgccaggtgctcaacatcaaatacgaagtccccgcccctaacgtggcctaaatttgcttccaggacaaagcaggattttagcaagcaaatactctcagagacctatttacgaaaattattacttcctaggtaaaataacgttcaaccagacagccattgtcgccattcgacggaaggaaaaactgaggttccaggagcttaagggtctgggcccagttcaggggggttgttttcgctcctcgacgctgaatttagaaaccagaggctacaaagcgggccgagacttgggttccccaggtccttggtggggaggtttccaggaggctcgggcgcgcccccgtccacggccccggaagctgacgtcgccgaagcgtacgccgctgcccagcctgcgctctcttcctgctctgcctgcagccgccgcgtccggtccagccgcagggccatgccctgtgctgcggttgccgtgtcccaggcgccgccgcgtcaagatccccgtctttcccggccagccaggcggcagcggcattcagctcgtgcactgggctggcagcaggctgagaagaggcggcgcaggttctccgggtcagccagtgccctgctcctaagggtagagatctagctggggacactggtcgtccgcctaggcagtggtgagagggtgggctacagttgtttgggtattcatgaatggaggagctcagggtcctagaccctaaaacctgctgaatcttcacccctcctccgctgggggtagggaaatttgcactgcatttaagcaatgtatagtggagtgggtgggacattcagaagaaaccacgcccacatttaacacccgcgtccttcccttctaccccagcccagcattttgtctttttcccctttgtccagcagtataactcacgctgcccctccgggctgagaggagtgtagacctcacctgctgagcacaactctggcgggcctgtgctctggaggtggtctcagcacctacctagaccctcttgatacctgcttttttagttggtggtgtgggaagaaagtgtgtttaacatgctccttaaataatgctctgccgccgagcgcggtggctcacgcctgtaatctcagcactttgggaggccgaggtgggcggatcacgaggtcaagagatcgagaccatcctggccaacatggtgaaaccccgtctctactaaaaatacaaaaattagccgggcgtggtggcgcgcacctgtagtcccagctactcaggaggctgaggcaagagaatcgcttgaacccgggaggcggaggttgcagtgagccgagatcgccccactgcactccagcctggggacggagcgagactccgtctcaaaaaataataataaaataaaaaataatgctgtgccactaagcgttttctccctgtcctgaggtctttggcctattcacagaccattctgggcagactccagccacaaatccaccaccccacttaaaattctctatcctctcagcacacttagaggggcatggaagactcttgcaggggctggggctcctgacatgacagctctgcttaactctctgacctccctcatgccacttctccctcggtccctgtgctttcaccttacacctggtcttgaaactccctgccccagccccttgcatggctgcccgcttc

SEQ ID NO: 585979 - DNA, 4001 bp, Homo sapiens
gaaaagcaaaacagatgggcagttcaaaattaggtagaccttagcatcagcatggtacttcttatcacacatggagtccacacacctgatgccaagtctccagttggcgcttgtccttaggccacactgccacccacaagagactcagggcgcaggggcaaacaagccactcctttggcaatctgtgtctatcttagcagcctgtggcttcaaccactcagctacctcgtcaggactatttgtgtctatcttaaacaatgagtcatctacctgtccctggtaggatattgcatgacttagcggaactgtgactggagtaggaggcttagaactatgttgtattgtagctcttccatataggtacactgtgaaagtgacttatttccctcatgtgtgaaatgggcaaacaccatcttcccaacctactcaagagttctcaccagagtgagtgaaataatatagctgaaaggtccataaatgttaagtgattgcacatgaatgtactcatatttaaacacggacataattgtgtacgcattcctgaagccctcaacgtacagaaaatacacagtatcatggactccttgaaggtcaccttacaactgttttatatgtaatactttgtttccacgtttctgtttagctgtgccagttcacaaagggctctgtgagtcacatgattccacaatattcctcataactgtgttatctcctgagtctcagagtggttaagtgacttactccagcagcgaaaagctgttcttttctgtgagtttctagaccaggacggattgcaggaaagtgctggggaaatgcttatagactaaggaatgggcataagtcagttaacgtccaactgcgttttgtctgagagccgatgggagtaagagtgtctgcagcttgtcgatgtgtacgcggttttatgcacttcttttaaactgtcaaaaggatgtctccgtgtacaatgtgtccgtgagacaggtaacatgggggtaaacagagaaaagagagtgggggtggggacactcctggcttcctcgccagctacaggttttcctccaaatctgagtgctgaggctctggagcggacagagaggaaatgacggctgtgaaccacacgtccggctcagccattttctaggcggaaaaaaggaagcccctttggctctctcctccctttgtccgactcgcgctcccgccctcccggatccgcgccctcaccttgaagccctccaccgcctcctcgagcggcagcacgctgtggccgcggtgctcgcgggagcggtcgcacaccacgcagatgggcatctggtcctcctcgcagtacagcttcaggggctcgcggtgcttctcgcacacgcccatctcgccgccgggccccgacggccgctcggtgcgcagctgctttaccagttgggtcacgttggccaggtgccggttgggccgcatgtgcctctgcgggaaggtctcccggcactgcgggcacgacacgttagtctctgccgtgccccagcagcgggcgaggcacgcgcaacagatgttatggccgcagtcgagcatcatgggctctgcgaagtactgcaggcacacggggcaggtggtctcctgctgcaggcactcggccacactcccggaggccatggcgccggcctgcgggggcgcacgggcatgggccccggcgccgagctctgcactgagcccaactctccggcgctctctccggttcgctgttcctgagaggcaccgggcggacggagggcggcgcctcccgggcccgtatcccagacgcgcccgcgcaccgaaggcttggagtggccgggccgatgcctgcgcctgtgccccctaagcgagagcgggaatacggccggctcaccgaggctcgcggccacgctagtggggcaggaaagggtagccgagggtcagagtcccagggccaggcgggcaaagcgcgcaagacaacgtggccgcgtccgagcggatgccggcggcagcgtaaaccccaccccagcgcgagcggaagaggcggctcgcgggggcggggcttggctcgcgcttccagcgagtgacaaggtttcgtggcctgggggcctgagctgtttcctcttggaaaggccgaggaggctccgccactctcctttggactggtcgcgctgaagctctatcctagggcactggtcgcaagagcagatggtgccacacgctccgggcctacaaacttcagcggctgccgggcccgggcccctcgtcttttgttgggtttcctcttggtgccaggtctcagcccctgcaaaagaaagctggctttggccgcgcgcagtggctcgcgcctgtaatcccagcatttgggaggccaaggcaggtggatcacgaggtcaggagatcaagactatcctggccaacatggtaaaaccccatctctactaccaatagaaaaattggccgggcgtggtggcaggcgcctgtagtctcagctactcaggaggctgaggcagcagaatcccttgaacccaggaggcggaggttgcagtgacccgagatcgccactgcactccagcctgcgggacagagggagactctgtctcaaaaaaaaaaaaaaaaaaaaaaaagaaacgaaaaaatgaaagctggctttgtataggtgctggggagcgcaaacacctggcctccccaagaggctggaggatgaggagggtcaccgactgagcccacctgataagtgaggccttttattaaacagccccatttgtaggcacttgcagttttgtttagaaaaagaaaggtttaattatcagatggtaacatttctgtgtgtcaataacaagcccagttctgctacctctcacttgtgcccaagcaagttggtttaccattcatttacctcagtttctcctcgtgtgaaatggggatgataattgtaccgcagtaagaagtagatttcgttacatcttttactttttgaaccataagattgtttatccattaaaatggtattaaaatgcccactacgtagggttgttgtattgagtagcaactaaaaattgcttgctcctttctgaagtatagagaaactaagaatcctgcggtgacccagggtcttggagtcccacaatactcattgtcttatcatccagtagacctccagcatttttaagttgctttcttatcccttacttggtgtttcctagttttctttgagattttctcaatattgtcttgctatctgagcaaggcgggcttctgcttccagaccatcactttatttttattttttcaaagtgaaagtaagattattaagaaaataaaggaataaagaatggctactccgtaggcaaagcagcccacatcatcactttagagagttccactctggtcctcttccccatgggacaagaagtctgagggattaagtggacttgccagccccaaacccacatctaccttctcaaccatactctgagtacccagtcattcaaattccagtcccaaatagctttagcccatttccagaaaaatgtagagtacttgggccaggccacaccacagtctggtcttggtttgagattgggtcaacaatgaaatttgtaagaattaaaggatatgtctattctcatttactccaaaaaggactaataagcattgcaatacagtgcagaaatatgagagatatggataggtagataaagctgcccttcatcttctcctttacttgggggatgcaagccttgagtttggctttgtttttcagaattgattgtgtttatcttaccaaccctttattacctctggaggcaggtgacctgggggtaaagaaaggtagaacaggcagggtgtggtggctcatgcctgtaatcccatcactttgggaggctgaggcgggtggatcgcttaagcccaggagttcaagaccagcctgaccaacatggtgaaaccccgtctctaccaaaaatacaaaaactcgatgggcacagtggtgcacacctgtaatcccaactactctggag

SEQ ID NO: 585980 - DNA, 4001 bp, Homo sapiens
cacgatcacggctcactgcagcctcatcctcccaggctcaaacaatactttcacctcccagcctctctagtagctgggactacaggcgtgtgctaccacgcccggctagttttctttctttttttttttaattaagaggagagtctcgctatgttgcccaggctggtctcaaactcctgggctcaagcgatcctcagcctcccagagtgctgtgattactggcgtgagccaccgcgcccggccaatgtcttcattttctaattggggaatccgttgagggcgcagctcggccttaaaaacctgtacttgcgattctaagaccagcgcgggttttccgtgccccaccttgtctgccggtggagactgagcagtcagcccgctgtaatagcgaggccgacgcgggaggtgatgccgcctggccggtcaggtgctgaggcgccgaggagaggacatggctcactggatctttttctgaggggtcagtgtaataggggattccaggagctttggcagagatgtttctgcttccagagatcgtgggatggagtttttcttaccgtgaagacatcgaccctgtgtacaccttgtgccttcacttgtactgtctccttctccttttgctgcaagacttggatctgctcttgaatctgcccctgcggaaagagggccgtttggacaggctgtgcctggagatttctggcctcataaaatcctcctggtctcttaggagagctggtgacactctccaggtgagtccttgtgtaattattaaggactcgcctttctcaagctggcggggaaaggggttgctgagaagggagaaatctggagcctaagtgacctaaatgaccagaacatagttatttatgactaactaggactatggatggtgctttggaattatcaaagaactacaaacttcccttcatctgtcctaccaacaactttaagagagttgttttgtttttgccatttgaaaggtgaggtacctgaggctcagagaggtaaagtgattccttgcaggttgtacagtaaactcacaagactgggcttgagcccaaaccttctgagtcaaattttcacatcctttccattctccattgcaccttgatttagagagtcagcagttccccagactcagctctttgaacccactgtgcctgactgcgagctgcccactcaagcccaaggggtgggggcaatggggtgcaaaccctcagtgggaaggtagcagtttccagggcctcactgaactcctgggctgatgggggaacagggaagaaacctcaaatgcctacctgataattctgggcagcttcttcgatcaagctgacattatgggatttgtggtccttggattcacgacacacaaaacagaggaacttcccatcatcctcgcagaaatagtggaacatctcctggtgcctcgggcatgtagcctctttccttttggactgcacctcagaggcttgtagagcttggattttctccaccagattccgcaacagcgagttgaacctgattgcgttcttccttacggaagttttgcagaggggacatttgaaaaatccacatgatgtttccccaatctgagtgatgcatttgaggcagaaattgtgcccacagtcgatggtgacaggtttctgcagaatgtccaggcagatggggcagatcacttcctcttgcagtttgttcacaaactgcccactggccatgacagaacaacagggctgtttcaagactgtaggaagctgtgccaagtctgtaggagccccggagtccactgtggatactgtttctaggaagggagaagggagtcagagaaagtggaggtcagagattctgccaattagttagaagagcagagagagaggaaaagaagagggagaaaaaaataaagaaatgatagaaaagcgtaaaatttaggatctagaaaatattataaagagaggaaaacagatgggcagtcctaccttgctacctcttgagaacaaatggatactttgaatgtgtaataggctgcttataaagtgaaataagttgtcctgaactttggactaaaggtatgtttgtatggtggttgactaagatcagaatgaccggggcaccaaacaccacttatgggggatttcccaatcagctctgagtagggagtggaggggtgggtggtgatgcctactgaaaggtcacagccagttcactgcaatgctttgggcatcttgtatgcaaagttcaagccttggtagagcatctggaaagtaggggaagggcaattctctacctcaggtgctttggctcctcacagaattttgtgaaaatgtggaggttatcatcacctaccttggggaatttccagtcacagggtcaaccaaccactccctagctcagtaggataggcaaggaacttcctttctaaagagttgttctttgtttttgcactttgctcttgcccctggtgatcttctgtctccccacaacacctgtagtagtctgtcctctgttgattttttctctgtatgtctccagtatgctggtgtctccgtgcccattctttgctttgccaattctgtctatatgttcttcttcttccttcttggtgcttctctgatccctgacttgccttctatggcttttgttatgactaggaatatatcaaccagtgttacatacattcccttctgtacattcatgtcctaaccttccctccttgcctcttgtcttaaggaaaagggtgcttcctccctaccccttctcttggtatagcttccaccctcacctcctcactctccattatcagccgtctgtccccagcaagaagtacaccattaatttttgtctgatcttaatcttaggtcaaacagggcttgtggatgattattataataatagccagagtgatcatacactctgctttgcctggaaccatcctgggtttcactttgtcctggtgtaattattaatagcacctcctttcactttcagaaatgtccagtttggactataaattatgtggctccccttatagcaactgctgtaaaccaaagactttcagaaatgttatacctccagacctttctttttgtttgttttagggttaaattaaaacagtctaacatctgtaaattgttttacttacactcctaaactgctggcccctagaagcagaatttaacttttgacaggttttgtttgactggcatgatgatttagaaaataatgataatgtagatgcctttagagagggtggctatgttccccaccgctctgctacctcacgtctccttggcccttgaaggcatttgacattatgactctgatttatagatttattttgcttatattacctcatttaagtctcacctgtaagaaattatctttatcctttctcaaaaaaggaactcagtattcttcagaatcacttggaaaacttgttaaaattcagatttgctgaactccagtagagactttctctttcaacaggtccttggtggagcctgatgattgacatcttaagcaaattctctggagaagtcgatgctcctgatggaggctcacacattgataacccctggtttagagacactactaattgttccagctcatccagctaataaatgacagatctcagacttaattccaggtttcctattccacattaagtcttctttattctttcttgtttcagcattaatgaaaacaaatagtaatctttaaaaatgataaacaaatattttaaaagaacattggtatttcaatgaagctgggcaacccagcagagagaatgaaaatactcatatgaacaccactggagagtttcaaagaactgtcaccaaacaggtactgatggcttcatgaggaaggaaatttagacataaaaaatgagaatctacagtgtttcaaaggtgctttactctctcagaattattattgttatcctgggtcatccatccactggactgaatggagatatatatatacatatattttttttctttcttctt

SEQ ID NO: 585981 - DNA, 4001 bp, Homo sapiens
gagtattttgaattaaaggcccttagagatcagcagatgctggaagagacttttcccctatctacataaagaccagtcacactagacaagaagaacaattgtttttccttccaacccctattatctcattttgtactgaagaaaagaggactaagaatgtaaccagacctaatcagacactttcacaaaataatgtctgtctctcaggctcattcattttccaaagagaaccatttacaagttaaactctgttcctccattcattcatcctcccaaatattcatttattctccctagtaatcatttactgcccctcaaagaattacctatattctcctgatatcacccttcccctctgaaataaatatgtatacatgtataaacgttatacatacatatttatacagtatacatacatatttatacatacatacatatgcatacatatttatatttatgtatttatacataagtatttataaataaggctatataagtatctacccccattggcagagggggtaatcactctgtgattctagcccatgtacttgttaataaatttgtatgccttttctccaattagcctgccttttgtgagtcgatttttcagtgaacttcagaaggcaaaggggaagtgttcccttggctcctacaccatcatgacaataaaatttgactccacctcgaccccccccatcccccacaaagaacaacaaccaacactggttaataaggtcggttgttttttgtttgtgtttttgttgttgttgtttttgctttcaggagcagaggtataataggcaaaagaaagagaaaggagaatagtgaatacctcttctgcagagaggggtgcctaagtgggacttccctggctaataacgtcttgctagagacccaaccaggaggataatggaagcaatcaaggcaaccagaacaaccagaagaaccggtttatcctttttgtgccctctccctaaactgagggaataagaattggaaagaaggctgcagagcagagggtttgctcctgaggagcagttatttctatgggatcagagctcctgcagaactggggagtttacttttactatctcttctccaggacaggacctatctcaagagacatgttcagagtgattgcaacataaagagtttgcagacccaaggaggtagggaaggcagaaagaagatgggggaggccagggataggcaacagaggagtgaccaggagcgaaaaagcctgcctcttctgagaacctagctgggctctccctgtacccccgatccctcccccccgcccgcccccacacccctactcctgggagctcctctaggacaggggcagagtcaggaggaagtttgaagagtgcctagaataaaaaacagtaatttaactacaattaccgggtaggctgttttcctctcacaatttgatcagtctcttgaagccacacagaatttcttctgaagacgtgtattccttggcaggctatttcctccagtgatacaccaggcccctctctgctggggtcactgctcttctggggagatggggctcccctccttccaaggctccagggttcctgtcctgggccccactcatctaagttctgaatcttctgagatttggtgtaaagtctggtgaaagaaagagcaggaaagaggtgagagctgtaaaacaaagaaagtcctgaccattttcagagttggaggggccctgctgtcacgaaatatattccccaccccacttgccatcagtacacactcacatatccactgagaaaaccttagcctggaccttttccgtaaccttcactgctcagacacttacatattcgctgctagtcccctctgttgctgccacttcctgggtcaggaagttaactcagaccggattaaactgagaagtgaaactactgtgggaggcggggctcataagatttaggagaaaactagtgacgttgttcatatcatttgcactccgcctctccggtaaaggagggggaaacgtaggaagaaaatatccttcttttacagcaataaaaagaaggaaccaattaataaccctgtaaactatcatgtgaccccaacacagagtatctaaaaacaggaagcctgcagaggttcagttcacagactctgatttgagatctttctacttttgccaccaactcccttgggagtccttaagccttcctagctgatgttacttcttttgctatttatgggttgcttgtggttctataactgctctgaagggtgtggtggaaaaaggggtggtaacagcagtaggactcattggcatcacaaaattcatctgagtcagctttctattcttctctgtcccgttctgtgtcttgtttttctccttgctgtccttctgcaggactcagatcttcttcaatagcgagggtcagccaggatagaaaatgggagtcactagtggcccagcagtgagtgcccccagcttagagctgtgtgggatccctgggaccatcactctgctttgtgctttgtggagaaaaggctgtggggtccagggtcaagtccttaatgacttagctccagcttctccacttcaaaatgaaaggaaaagtactatcaccacccgttagaattattatttcatggggaaaaaagatggattactatctcacaataagagcttgtcacatttataagtctcaggtgtaagaggcatttatgataacaacataataaatgctggcttaagtagatgcagtggtccaagggaaccagtaaggggagctcaggacacaggtgggaggagaaattaaacttgaattctgggagccactggcctgtctgggcccctggcctgcctgctgaccctgatagccaatggaacatggagtttggcccagctgcaatccctctggtccaactactcaaaataaaggcaagattgggaaacacgttcctttcttcctataccaagcagaagactcttcagcactgcaccctcctgggtgctcacagagccttctgttgttttgccacctacgattcatcatgccctggcatgatggttgcagaccccatgcatagcatgggacattctactcctgaggcaaccagcacacagagagaggagaaagaatgagcccctgaatccttggtcccacgatgagtccttgcagatatctacaactttcattgttgtggatgtgactctgtacccaggcatggctcattccagatctgtcctattgtcagaggtgttcaaaccagaatgactccattttgaatgggggctaggtaaaataaggctgagacctactgggctgcattcccaggaagttaggcattgtaagtcacaggatgaaataggcagttggcacaagacacaggtcataaagatcttgctgataaaacaggttgcagtaaagaagctgaccaaaacccaccaaaatcaagatggcaacaagagtggcctctagtcattctcattgctcattatacacgaattataatgtgttagcaagttagaaggcattcccaccagctccatagtggtttataaataccatggcgatgtcaggaagctaccctatatagtctaaaaaggggaggaacgcttggttctgggaattgcccacatctttcccagaaaacatatgaataatccactccttgtttagtacataatcaagaaataactgtaagtatctgtattagtccattttcacactgctgatccagacatacctgagactgagtaatttataccaggaaaaaatgtttcatgctcttacagtcccacgtgtctggggagacctcacaaccacagcagaaggcaaggaggagcaagtcaggtcttacatggatggcagcaggcaaagagcttgtgcagggaaattcctttctataaaaccatcaggtctcatgaaacttattgactatcatgagaacagcagtataaattactcagggaaagacctgcccccatgattcaattacctcccaccaggtccctc

SEQ ID NO: 585982 - DNA, 4001 bp, Homo sapiens
aaccatattttaaagtttaatgttataagagctttatgattaatccactggagtctaagcttgattctctgacactgttctctcattcttctaaatcacaatatccaaccttttggcttccctgggcccactggaagaagtgtcttgggccagacataaaatacattgacactaatgacagctgataagcttaaaaaaaaaaaagtccatgcataacttttgttctatcaccaccacagaaggtccatgcataatttttatcagccaccacagataagcaaagagagtcctcatattgaaagggttagataccactgctctaaaggctaacaaatggaatgaatgaggcaaaggcaacctcctcttttcaggaaaatctgaaattattcttccttttatccatcagactagcctaaaggaaatctgctctcttcttggaatgacatttcacgcaacattccatttctcttgtgttcatctggacactcagaactgctgaaaactgataaattatggcaaccatattaaatattgctgagctcaggccaacgacttcttgaaaagagagcaacgagtctatttgtagtgactggaatctttcaatatagctattgataactaacaccctgggcatagtgtgtctccaacttataggtcctggagtggttgcgaattaagagacacaaaagaggcaatgagatctccctcaagcgcagcctcagaagaattggaaatgcataggagagatttataaaacacaaggctggccccctactccatccttaaaacatccatacttttagccatgggtaagttgatttaactatccccataaccttttctcctcccgacccccatccttctccagggacctactggaaggaaggaaatttggtagatctatgtgctgagagataagtggccatgtaatgaggtaggttaacaacaattgttcctgtatatattgttggcacacacaaatgtgtttgatttggagtaggaactgataacttctttggatttgaatttcttctgtcagcaataggagagaagttcagtcagatgatttctatctgtgggaatccaactttgacttgtggtgatcctaccccttcctcagtcttttacaaattaagtggcctcctcacctgagacgagtagaactgtatgcacagtaaggcaccaggacggatctagactggcaaagaagtggtgagagaaatggggaaagggttagggaagaagggagaggactctcaactacagtcatagtgagaccttgagtgcctctgcgttagtccttcctcttcctctactccttgtgtctcagctgaagggcaaacttcagggacaatctcattttgtttctaccactgttcagggtcccaccttgcgaccctctcctgagaggttgtccacaactctgtcccacccccgttctccatcttcttccgccagatctggggctggggcattggagaggggaaagaggaaacgtcgtggctggcagggtaggaagggatgcgtgtccaggtgagaaagaggtgtgacgtgcagatgggatgcccgccgctatgacgctgccgagacccgcggtgactgcgtcagagtttcacccggggaggtgagcagcagcgggacgggggaacggcggggtagccaagcaacgccggacgcgctgacgtcgccggggcggcaaaacgtccgcccgggcccgaggcgggcggaggcagctgtggttacgtgcggggggccggtgacgcagtcgcggggcgctgggacgcggcttgcggagccggccggcgagcgcaggccccaggctcgggcgcggcggcgggacagcacctaccttcccggcttcgggtccgggagtgcggggcgcggagccgccggagcgctgcctccctccttcctcctcccctcgcccccgccccgcggcgcgacacacaatactcgccggaagcggaagccgcgccgaggctcgtgtcagtggaagctggggtgtcggcgggcggccgcggccgggtctagcggtgcctgcggaagaaggaggaggagggctggcgatgagaagcagcagggggaatcaagggcaagaagggacccagaggggcaggtggctgagatgctggcgtccaggtgacccgaggaatcctctggagatacaggcccgcgcatgcgcgtgctcgagcgctgaagcccattgcccgcagggcgctggactggcgccccggccggcgaggctgtctagtccaggctccaggccccggctctggccaggcgccgccgcctcccggtgcagctgaaagtcgacgaagagggcggggcgggggcggcttgtggacttccacacttttcctctcttcgggccagtctggggagagggtggctagctgtggcggcggccaattacgtggcggacctgcggggctaagctggcacgtcacttccgactagtggagtttttagccttttaacattcaaggattaggtaagttctccccgcggtagacttcaaatactctttgtcctgcccctgcttggcgaaatttaccgaaattatctacctatcccgctggagtgggagccgggggagagctggaaccgcgtctctgctgctcacctttgtgtccttagctccttcgcatggggtccgaccgcaacacgtgcgctggataaacgcttgttaactgggtgagagccaaggcctgttctttccacttctggggctgtgacttgagtttctccgcaggagcagatagtgtttgtgtagggactgcggacttttgcattacagcctccctgctttgcccgcctgctgctggaagcttagcaggtcagtgattttggaggaagtgggtgaggtgatgaggctggggaagagtatgctgggagaggtgtgaggggcccgggaagaggtgatggggctggggaggggctagtagtgggtagaggtgtgaaaaggctgaggaggaggggttagtgctaggaggggtgtgacacggctggtagaaaagatagcttgctccgcctccccgccgccagcactagtcatggagaatattcattgaaagagatgagcagattttgctgtactctcctcggtgagaaagggccctaatttccggtgtaaattgtgctgctgtttacaaacaccctgcattatttaacctctcatcttgggagccagaaactatttacttgctgaaaatataatccagtatctaaggtataaagatttgggatcacacatgctaattacagttgtctacctttactgttcctttttttgtgccaagaattgaagaagattaaatttgagaaaattacatttgataccttttttcacattgctatgtagccgttagggattttagcagcagcacttgttctaattcacaagatgtctcacttgtaagggtagtttgaaagccactaactgggcagtgagcctccttagccgtggcttcggagggagagagagatttggttttgatttgttaatttgtggcgcttaagatgttgatagccctcctttctggctttctgtttgtagataaccaggaggaatgtgattagactaaggaaattaacaagaggaggtccagttctaaggactgtgaagaatgtgcttgcctagagactgatattaaggggattttatgctgaatatggaaggaaaaaagggagactgtctaggtaaaactataaaattatgaagcgcaagtagtatgacatataacagggcttggcaaatctttgctgtagagagccagagaggacatctttttggccttgtggtccatactcagctttctccttgcagtatgaaaacatcattagacagtactaaatgaaggctgggcgcggtggctcacgcctgtaatcctatcactttgggaggccgaggcgggtggatcacctgaggtcaggagtttgagaccagcctggccaacatagcgaaaccctgtctctactttttagtagagacaaaaattagc

SEQ ID NO: 585983 - DNA, 4001 bp, Homo sapiens
cccgacatttatccctatgttaagtcctaactccagatttgccccttcttgttattctccatcttctcttccaatcaattcaacctctttgtttctccattttcaaaacttgtgactcccagccatcaaccttttttttcttgttagtaaactgacacacaacccccaattgatctatcttgtctcttacctctgctttctcttgttagaaagagaagcttccttcaactctagctcagcatacttctcctgatccaggctcattccacttatatcttagaaccaatagttccagacactgtatcctcgtttgacatacgtttctaacagacaagaaaggaatctgagaagtaaaaaagtcataaaaatattaacatttcttaaattaaccatattttaaagtttaatgttataagagctttatgattaatccactggagtctaagcttgattctctgacactgttctctcattcttctaaatcacaatatccaaccttttggcttccctgggcccactggaagaagtgtcttgggccagacataaaatacattgacactaatgacagctgataagcttaaaaaaaaaaaagtccatgcataacttttgttctatcaccaccacagaaggtccatgcataatttttatcagccaccacagataagcaaagagagtcctcatattgaaagggttagataccactgctctaaaggctaacaaatggaatgaatgaggcaaaggcaacctcctcttttcaggaaaatctgaaattattcttccttttatccatcagactagcctaaaggaaatctgctctcttcttggaatgacatttcacgcaacattccatttctcttgtgttcatctggacactcagaactgctgaaaactgataaattatggcaaccatattaaatattgctgagctcaggccaacgacttcttgaaaagagagcaacgagtctatttgtagtgactggaatctttcaatatagctattgataactaacaccctgggcatagtgtgtctccaacttataggtcctggagtggttgcgaattaagagacacaaaagaggcaatgagatctccctcaagcgcagcctcagaagaattggaaatgcataggagagatttataaaacacaaggctggccccctactccatccttaaaacatccatacttttagccatgggtaagttgatttaactatccccataaccttttctcctcccgacccccatccttctccagggacctactggaaggaaggaaatttggtagatctatgtgctgagagataagtggccatgtaatgaggtaggttaacaacaattgttcctgtatatattgttggcacacacaaatgtgtttgatttggagtaggaactgataacttctttggatttgaatttcttctgtcagcaataggagagaagttcagtcagatgatttctatctgtgggaatccaactttgacttgtggtgatcctaccccttcctcagtcttttacaaattaagtggcctcctcacctgagacgagtagaactgtatgcacagtaaggcaccaggacggatctagactggcaaagaagtggtgagagaaatggggaaagggttagggaagaagggagaggactctcaactacagtcatagtgagaccttgagtgcctctgcgttagtccttcctcttcctctactccttgtgtctcagctgaagggcaaacttcagggacaatctcattttgtttctaccactgttcagggtcccaccttgcgaccctctcctgagaggttgtccacaactctgtcccacccccgttctccatcttcttccgccagatctggggctggggcattggagaggggaaagaggaaacgtcgtggctggcagggtaggaagggatgcgtgtccaggtgagaaagaggtgtgacgtgcagatgggatgcccgccgctatgacgctgccgagacccgcggtgactgcgtcagagtttcacccggggaggtgagcagcagcgggacgggggaacggcggggtagccaagcaacgccggacgcgctgacgtcgccggggcggcaaaacgtccgcccgggcccgaggcgggcggaggcagctgtggttacgtgcggggggccggtgacgcagtcgcggggcgctgggacgcggcttgcggagccggccggcgagcgcaggccccaggctcgggcgcggcggcgggacagcacctaccttcccggcttcgggtccgggagtgcggggcgcggagccgccggagcgctgcctccctccttcctcctcccctcgcccccgccccgcggcgcgacacacaatactcgccggaagcggaagccgcgccgaggctcgtgtcagtggaagctggggtgtcggcgggcggccgcggccgggtctagcggtgcctgcggaagaaggaggaggagggctggcgatgagaagcagcagggggaatcaagggcaagaagggacccagaggggcaggtggctgagatgctggcgtccaggtgacccgaggaatcctctggagatacaggcccgcgcatgcgcgtgctcgagcgctgaagcccattgcccgcagggcgctggactggcgccccggccggcgaggctgtctagtccaggctccaggccccggctctggccaggcgccgccgcctcccggtgcagctgaaagtcgacgaagagggcggggcgggggcggcttgtggacttccacacttttcctctcttcgggccagtctggggagagggtggctagctgtggcggcggccaattacgtggcggacctgcggggctaagctggcacgtcacttccgactagtggagtttttagccttttaacattcaaggattaggtaagttctccccgcggtagacttcaaatactctttgtcctgcccctgcttggcgaaatttaccgaaattatctacctatcccgctggagtgggagccgggggagagctggaaccgcgtctctgctgctcacctttgtgtccttagctccttcgcatggggtccgaccgcaacacgtgcgctggataaacgcttgttaactgggtgagagccaaggcctgttctttccacttctggggctgtgacttgagtttctccgcaggagcagatagtgtttgtgtagggactgcggacttttgcattacagcctccctgctttgcccgcctgctgctggaagcttagcaggtcagtgattttggaggaagtgggtgaggtgatgaggctggggaagagtatgctgggagaggtgtgaggggcccgggaagaggtgatggggctggggaggggctagtagtgggtagaggtgtgaaaaggctgaggaggaggggttagtgctaggaggggtgtgacacggctggtagaaaagatagcttgctccgcctccccgccgccagcactagtcatggagaatattcattgaaagagatgagcagattttgctgtactctcctcggtgagaaagggccctaatttccggtgtaaattgtgctgctgtttacaaacaccctgcattatttaacctctcatcttgggagccagaaactatttacttgctgaaaatataatccagtatctaaggtataaagatttgggatcacacatgctaattacagttgtctacctttactgttcctttttttgtgccaagaattgaagaagattaaatttgagaaaattacatttgataccttttttcacattgctatgtagccgttagggattttagcagcagcacttgttctaattcacaagatgtctcacttgtaagggtagtttgaaagccactaactgggcagtgagcctccttagccgtggcttcggagggagagagagatttggttttgatttgttaatttgtggcgcttaagatgttgatagccctcctttctggctttctgtttgtagataaccaggaggaatgtgattagactaaggaaattaacaagaggaggtccagttctaa

SEQ ID NO: 585984 - DNA, 4001 bp, Homo sapiens
ctacattgttctttttttttttgtttgttttttttgtttgtttgagacagagccttgctctgttgcccaggctggagtacaatggtgtgatcttggctcactgcaacctccgcctcccaggttcaagcaattctcctgcctcagccgcccaagtcgctgggactacaggcatgtgccaccatgcccggctaattttttgtttttagtaaagacagggtttcaccatgttgcccagggtggtctcaaactcctgagctcaagcaatctgcccaccttggcctccagaattgctgggattacaggtgtgagccaccatgtccggcgagaactgcatttttctaatgaaccggaactggtggattaaatagtgtacagttaattccctcataggcaaatacccttcagagcagcctacatgggattgcctgcctttaccttgagctcaccaggcttcttctcctcagaggacttgcagcgagtgatctcctgcagcttctgttccaggggctccagacacttctgcagtttttcctgaggggtagggaggaagtgggagaggtgacatttggggttgactggtatacctaccattcagagattaaaccatttgttttaaaccatttatttgcttcctagccatcttactgcctcttgatctgacttccttccttgcctgtcatttgggatgtcaactttctacagtccctcctcctgccactagcctgtccacatcaccttctctgctcacccaactgtccttttactgaatctgagatagctgtcatcaactctgtgtcctttctcaactctttccattttcttactgaggcaactgcctattaccatccaagcaaccttctgtaccctaatatctctctttaaacctgtcctcccatccacctctgtccacctacaataaaaacatggttattatactgtaagttacctgaaatcttgttttcaagagtaacataactaagcaaagtatatgataaaatgctaacacattcatatctctgttccctttattcaaacattttcctttgtctcagcagtaagttaaatgatatgccatgttacccattacctagagaagctgcaaacaattgaatggttcagcttagtccggtaggtatcagtctcaagcgatattacctatgcccaataaccagtgtgaaaacaaggagcattctgagcaggcaggcagaatgaagaaaccagactacttttcagttcttcctaagtttaatcttttccatgtggtttcattcatttatgaaaaatatgaccacacataccaatattcacccataagactcacatgtattgcaaaagtcagagagaaattttagggcacttctcaccattgctctttttcaggctagaggacaactgatcacacatactgtgtgcccctgcatatgcagctctgagaatacaaagtgagtagtaggagcttacgatctctacctagggagtatctcatcctctgccgcttctccctttttacccacactgacatcgtgtgtctgcttccccaccttgtactcctgtgtagcatcgtccagtggcacaacggtgtgggcccggtgggtgtgggaaattgcacatatcaagcatacagcctcctggtcctcataacagaaaaggctgagggcctcatggtgttgggggcagaggctctcatcccggatcttccgcttgacggcctggagctgcttggcaatttccaccatactgcctagttgccgattaggtcggagactgcggtagcgggatgtctttcgacagacaggacaagggaagtccctctctaggtcctcccaccagcgggtgatgcaagctttgcagaagttgtgcccacactcaatgatgacaggttccttcagatactccaggcacacagagcagctcgcctccacctgtaagttctccaaagccgcagctgtagaggctgcagaggccccagcctctaacagacttgtctctgccataatttaacttgggagtggggaagaggacagagaaaataaaaatattaattggaggttttttcttttttttttttttgcatccctgacccgacatttatccctatgttaagtcctaactccagatttgccccttcttgttattctccatcttctcttccaatcaattcaacctctttgtttctccattttcaaaacttgtgactcccagccatcaaccttttttttcttgttagtaaactgacacacaacccccaattgatctatcttgtctcttacctctgctttctcttgttagaaagagaagcttccttcaactctagctcagcatacttctcctgatccaggctcattccacttatatcttagaaccaatagttccagacactgtatcctcgtttgacatacgtttctaacagacaagaaaggaatctgagaagtaaaaaagtcataaaaatattaacatttcttaaattaaccatattttaaagtttaatgttataagagctttatgattaatccactggagtctaagcttgattctctgacactgttctctcattcttctaaatcacaatatccaaccttttggcttccctgggcccactggaagaagtgtcttgggccagacataaaatacattgacactaatgacagctgataagcttaaaaaaaaaaaagtccatgcataacttttgttctatcaccaccacagaaggtccatgcataatttttatcagccaccacagataagcaaagagagtcctcatattgaaagggttagataccactgctctaaaggctaacaaatggaatgaatgaggcaaaggcaacctcctcttttcaggaaaatctgaaattattcttccttttatccatcagactagcctaaaggaaatctgctctcttcttggaatgacatttcacgcaacattccatttctcttgtgttcatctggacactcagaactgctgaaaactgataaattatggcaaccatattaaatattgctgagctcaggccaacgacttcttgaaaagagagcaacgagtctatttgtagtgactggaatctttcaatatagctattgataactaacaccctgggcatagtgtgtctccaacttataggtcctggagtggttgcgaattaagagacacaaaagaggcaatgagatctccctcaagcgcagcctcagaagaattggaaatgcataggagagatttataaaacacaaggctggccccctactccatccttaaaacatccatacttttagccatgggtaagttgatttaactatccccataaccttttctcctcccgacccccatccttctccagggacctactggaaggaaggaaatttggtagatctatgtgctgagagataagtggccatgtaatgaggtaggttaacaacaattgttcctgtatatattgttggcacacacaaatgtgtttgatttggagtaggaactgataacttctttggatttgaatttcttctgtcagcaataggagagaagttcagtcagatgatttctatctgtgggaatccaactttgacttgtggtgatcctaccccttcctcagtcttttacaaattaagtggcctcctcacctgagacgagtagaactgtatgcacagtaaggcaccaggacggatctagactggcaaagaagtggtgagagaaatggggaaagggttagggaagaagggagaggactctcaactacagtcatagtgagaccttgagtgcctctgcgttagtccttcctcttcctctactccttgtgtctcagctgaagggcaaacttcagggacaatctcattttgtttctaccactgttcagggtcccaccttgcgaccctctcctgagaggttgtccacaactctgtcccacccccgttctccatcttcttccgccagatctggggctggggcattggagaggggaaagaggaaacgtcgtggctggcagggtaggaagggatgcgtgtccagg

SEQ ID NO: 585985 - DNA, 4001 bp, Homo sapiens
agagagaatcctttgagggtgtgtgtgtgtgtgtgtgtgtgtaagagtgcattcataagcacacacattttttggaaggatgtacaaaaatcaaacaatggttacctctgaggactatgaatggagggagaaaggaagacaaatttttagtcttgactttatacctttcagtgctttctgaatttattacctacagcatgtaacttttgtgatagaaaatttaacagaataagataaaataattgccatagcaaagaaaggaaaaggaaagataagacaaatgcagaaggaagaaaaagagagaaaaaattatgtagtaactttcaggttttaatatatttgcaggataattactagtgtatataaaacctgattacatttctagccaagtttctagtactatcaaccaggagttcacacagttttagtcctgaaagggttttgcattagttagtccaattactctattctacagatgagcagactgggactctaacatcacactgacaatatcctcttttagacagactcacattaatgcatggaaacatcagcctcaaaatatacacagaaaagcaagacaagggtccaaaacaggatgaagcagaagaaacaaagagagatgtccattgttgagctactctgaggtgccaggcatgatgaacatgtaggatgcagcacctcagcgaggtggaggcagggcctggctgcggtgacccaggcttaccttgtagtggctgagggcattttcaatggtcagttcatgatgagacatgtgttcaggggacaccaggcattccacacatagaagaagtctgctctcctcacagaacctgcacaccctcttctggtggttggggcagatatagcctgtccctagcacctcctcagaacagggcttccggcagagggggcagcagaagaccccagaggctgaggccttctccacatgctgtgtcaggcacactcgacagaagagatgtccgcagttggtgctcacggcctccttcaggctctcctggcagatggggcagacaccctcctcctggttgtccttctgcaaagggatcatggcctcgttcctaccctgtcagcctcctgtttgcagggcctccttcttcactggtcttcggaaggcctgttgccctcaacagtcccagataagaaggcccagtcggaaggaggcagccctggagcagcctggggacaggacacagcctccaagttcaggcaattgcccactctccctcaagggtgccgtgacatagaccacacaaaccacaattctgcacgagtttcagaaatagctcatcagctttgacatggaccctgcggtttccttgtgtttgttaaacttgaaattatttttcatacacctagaggaagcaagtgattcaataaccaattctgttttcctcttgacagctttcagtgaatatttgcacgggccccaaattaaaagggcaaggtgtcattgtcatggccaaaagccagaccactataaacttacaatttgagtctcctctgatttgccatcagtagagagagtttggcaggagtttggactgttttctcctacactgtcacaccgggtggctcactgctgcccattattaccaccaataattacagcagcatctccatcagctggtcattcttccaaccaacatccctcccagggtcatatagattccacactgaaagaatgagaaagaaaacaggacacagaacagactagagacttgtataatgtttgaagccactttgttccttcctgtcaaatcaccaccaaagatgacccaaagaaagaagtcccccgccacctgccacctcccttagatactgaggattcactcttattccctcatgctgcacctcttgcctagccccactcctgaaaagctttcttagtatcctacctcaatttctcctgctacaatttcagatcatcttctctggctccagacctggagagatggccagcagatgagtggttcttatatcatgccaatcatatgtgttcatatgtcagtaaatctcagggcggggggtggaaagactcatgctttcctagaaacactgaattaccaggaaaattacctagggtagctggaaggtgagatggactttggtgcagggcgtggcttgtttgctcaaggggaggaggaaggtcttgggcctttgacgtcgatatgacaggaaatgagactcaactaagaatggacatcctagaaccccagcttatggaaccccaggatccaggtgtcacagaataatggcacccactcaagatgctggaacatcaaatgcccactccattgtctaagttccctccagtcaggctagtcttggcattgagtttgagggagcccctaaggggtgccactaataagggctgtcacttgaaacttctaagggtccaagacgcttgttgaaaacctcatttcagagcctcctccctcaatcccactttgccactgtttgctgtgggttgtgtgatcttgtgagatatatatataattagtcttggcacagagctcctaaaacccttgaacagatgatccttaacttatgatggggttacgtcccagtgaattcactgaagtcagaaatattgtaaggtgaaagtgtactcaataccccagtaaacccatcataaagtcaaaaattttaagttgaatcatcttaattcctgatgcacctcaacttaccacatggttatgttctgatgagtgtatcttttattattcataataagcccttttcaaccataccagggtttatgctaatgaggtgactcttggaggaagaatgggggctggttggcagaagaaccatgtgattagagggtgggatctttctttctttctttctttttttttttttttttttgagacagagtttcactcttgttgcccaagctggagagcaacggcactatctcagctcactgcaacctctgcctcccaggttccagcgaatctcctgcctcagcctcccgagtagctgggattacaggtgcacaccaccatgcccagctaatattttgtatttttagtagagacggggtttcaccatgttggccaggctggtctcgaactcctgacctcaggttacctgcctgccttggcctcccaaaatgctgggattacaggcgtgaaccaccacgcctggctggttggaactttcagtctcacctctgacctctggggaggggagaggagcccagggactgagttaatcaccaacagccagtgatttgatcaatcatacctaaataatggaacctctgtaagatcctgaacaaagaggtttggagagattccaggttggtgagtgcatccacatgctgggagggtggcacatcccacactccaccggggacagaagctcctgtgctcaggatcctcccagaacttgcccttcatctggctgtgaaattaccatgatcctggtgatttcaaagactatgtacatgatcatttaacaccaaggcctttcagttcttgtcctgctcacatccaatgacctttgcttttgccacccaccctagtggccactctcttgaccttgtcaggattcagatttcaccacctgaaattataaatgtaggcattgtactcacttatagttctcttcctaaggcatttccgacaatgtctgttttttaaccttcaatccttgacccctccacaatctacgttcctgtcgtatctcatgaaatagtataagaaacaaaaatgtggacagattaagtaacctgcccaaggccacagtggtgtaaacatagagctgggattcagatctgggtgtctcttatcccagcccatgggcttcattaccataaaatgtcatctctctatatataccttttcttgctcttagaaaggattcagtaaaagcttgataaatggatggattaatggacagatggaaagatagattgataattagatgtatggatagacagatgaagaaacagcactttgtaccaacttata

SEQ ID NO: 585986 - DNA, 4001 bp, Homo sapiens
caaatactaactggattagggtcaggggaaaggttgataaaaataattccaaagctaattggcaaaataaagatatacaaatatctgcacgaattctgaaaaataagagtattgtgaggattctatcaaaatacctgacattaaaatatatggtaaggataaaatctctaaaataccttggcttataggcaagcatagacagaatagaacagcacaaagaatcaaggcagtatgcaagaaaatatgcatatatggtatattatgacattggcattcaaatcaatggggaaactatatgaatcattcaacaaatggtgataggacaaattgattataacttggaaaaactaaagttagatttctaccttatgctctcaccaaaatatatcttggatattctaggtcctccaatatatatgttgaaggatattcattagaacgttctgtgtaatcttaaaacaaaacaatagcttggaaatgacccaatgtctgccaatttatggtacattcatagaatttaataccacacagttcttgaaaataattcagaagatctatacatgctgatgagaaaatgttcaagccacacttttagataacaaaaatgagttacagaaaaaaatatagagagaatcctttgagggtgtgtgtgtgtgtgtgtgtgtgtaagagtgcattcataagcacacacattttttggaaggatgtacaaaaatcaaacaatggttacctctgaggactatgaatggagggagaaaggaagacaaatttttagtcttgactttatacctttcagtgctttctgaatttattacctacagcatgtaacttttgtgatagaaaatttaacagaataagataaaataattgccatagcaaagaaaggaaaaggaaagataagacaaatgcagaaggaagaaaaagagagaaaaaattatgtagtaactttcaggttttaatatatttgcaggataattactagtgtatataaaacctgattacatttctagccaagtttctagtactatcaaccaggagttcacacagttttagtcctgaaagggttttgcattagttagtccaattactctattctacagatgagcagactgggactctaacatcacactgacaatatcctcttttagacagactcacattaatgcatggaaacatcagcctcaaaatatacacagaaaagcaagacaagggtccaaaacaggatgaagcagaagaaacaaagagagatgtccattgttgagctactctgaggtgccaggcatgatgaacatgtaggatgcagcacctcagcgaggtggaggcagggcctggctgcggtgacccaggcttaccttgtagtggctgagggcattttcaatggtcagttcatgatgagacatgtgttcaggggacaccaggcattccacacatagaagaagtctgctctcctcacagaacctgcacaccctcttctggtggttggggcagatatagcctgtccctagcacctcctcagaacagggcttccggcagagggggcagcagaagaccccagaggctgaggccttctccacatgctgtgtcaggcacactcgacagaagagatgtccgcagttggtgctcacggcctccttcaggctctcctggcagatggggcagacaccctcctcctggttgtccttctgcaaagggatcatggcctcgttcctaccctgtcagcctcctgtttgcagggcctccttcttcactggtcttcggaaggcctgttgccctcaacagtcccagataagaaggcccagtcggaaggaggcagccctggagcagcctggggacaggacacagcctccaagttcaggcaattgcccactctccctcaagggtgccgtgacatagaccacacaaaccacaattctgcacgagtttcagaaatagctcatcagctttgacatggaccctgcggtttccttgtgtttgttaaacttgaaattatttttcatacacctagaggaagcaagtgattcaataaccaattctgttttcctcttgacagctttcagtgaatatttgcacgggccccaaattaaaagggcaaggtgtcattgtcatggccaaaagccagaccactataaacttacaatttgagtctcctctgatttgccatcagtagagagagtttggcaggagtttggactgttttctcctacactgtcacaccgggtggctcactgctgcccattattaccaccaataattacagcagcatctccatcagctggtcattcttccaaccaacatccctcccagggtcatatagattccacactgaaagaatgagaaagaaaacaggacacagaacagactagagacttgtataatgtttgaagccactttgttccttcctgtcaaatcaccaccaaagatgacccaaagaaagaagtcccccgccacctgccacctcccttagatactgaggattcactcttattccctcatgctgcacctcttgcctagccccactcctgaaaagctttcttagtatcctacctcaatttctcctgctacaatttcagatcatcttctctggctccagacctggagagatggccagcagatgagtggttcttatatcatgccaatcatatgtgttcatatgtcagtaaatctcagggcggggggtggaaagactcatgctttcctagaaacactgaattaccaggaaaattacctagggtagctggaaggtgagatggactttggtgcagggcgtggcttgtttgctcaaggggaggaggaaggtcttgggcctttgacgtcgatatgacaggaaatgagactcaactaagaatggacatcctagaaccccagcttatggaaccccaggatccaggtgtcacagaataatggcacccactcaagatgctggaacatcaaatgcccactccattgtctaagttccctccagtcaggctagtcttggcattgagtttgagggagcccctaaggggtgccactaataagggctgtcacttgaaacttctaagggtccaagacgcttgttgaaaacctcatttcagagcctcctccctcaatcccactttgccactgtttgctgtgggttgtgtgatcttgtgagatatatatataattagtcttggcacagagctcctaaaacccttgaacagatgatccttaacttatgatggggttacgtcccagtgaattcactgaagtcagaaatattgtaaggtgaaagtgtactcaataccccagtaaacccatcataaagtcaaaaattttaagttgaatcatcttaattcctgatgcacctcaacttaccacatggttatgttctgatgagtgtatcttttattattcataataagcccttttcaaccataccagggtttatgctaatgaggtgactcttggaggaagaatgggggctggttggcagaagaaccatgtgattagagggtgggatctttctttctttctttctttttttttttttttttttgagacagagtttcactcttgttgcccaagctggagagcaacggcactatctcagctcactgcaacctctgcctcccaggttccagcgaatctcctgcctcagcctcccgagtagctgggattacaggtgcacaccaccatgcccagctaatattttgtatttttagtagagacggggtttcaccatgttggccaggctggtctcgaactcctgacctcaggttacctgcctgccttggcctcccaaaatgctgggattacaggcgtgaaccaccacgcctggctggttggaactttcagtctcacctctgacctctggggaggggagaggagcccagggactgagttaatcaccaacagccagtgatttgatcaatcatacctaaataatggaacctctgtaagatcctgaacaaagaggtttggagagattccaggttggtgagtgcatccacatgctgggagggtggcacatcccacactcc

SEQ ID NO: 585987 - DNA, 4001 bp, Homo sapiens
tctcattctctccatggggagaatcctcctttcaccctaggtcctcttcaaactgttaaccaatttcttactttcccttatgctctagctaaggacactcagtctatcctatctccccttcctcactttccagtgattactaaaccaagccacctggcttctcctactaaaactcaacatattcgctttagcaaaaatcaccaattaattatcttctaattgagactatcaatgacactttttcattcttttctcactaaaaagcaactgcattcgacatttatccatttgtccctgcttcctaaaactttacccttctgatttctgcggtctcacatccttctggcacttgcccatcttcttcatggcctcctccgactttcccttaatatcaatgcttccaagcatctatacttggcccgctactcttttgaccttatcctttgagtaatttcttccccgctcctagttttcatatgaagaagactcccaaatatttatcactagtccagatcactctgccatactctatgcatattcatatatccaccgcctcttggtcatctcaggttgatgttacacaaccacatcaaattcagtgtaaacaaaatttaaatcttacatctgcctatgttctctattttaaatggagacactcctacctatatacaccccaggagtcatacctgactggtgcccctttcccacatattcaatcaatccagccttaatgactgtatggcctaaatattttcccagtctatcccatcctcttactccttgccctaggtcagaccttcttaatctattaacaagactattcccacagactcctagtctctggctcaagtcttattcttttcaaatccatcctccatagtgttgtcaaactgatttaattttgtggtcacttttttacttaaggcttttcaataaatcccccttccaagctccagggtactcaaggttttcattttctggcctcgatctacttcccttgctctcttcttaccactctgccacataactagtgatccagtaataatgaacaccttgtaattctaatttactgatttatctccttggccctctaactcctattcatcctttatttcaagtgtcatctcctctggaagccctcttaaaggccaacatccccaacccctcaggtagattagatttcccttccacgtgctctcatatttccatgtgcatctatcactgcacttaccgacgctcttttgtcattctacgcctatgtgtctgctcagcccttactctaaacagtaagctcctagagggcagagattgcttacatcatcgttacatgcccagcgtaccgatcttcgactacatgcattctgaaaacgtttcttgaataaataaaacactcttctcaacttctccatcatctaatccccaccaccatcccctccactgagcttgatccgcagattccaatacttcaaacaccagcctgagcatttgttagctgtctctattctccgctagacgaagagctccgggagtgagatgaccggtcatattcacctgcctaactccggtacttgatacacgggcaaaagaatgaaaagtttaagcaggccgaggggtttggtctcggacttctctcacacacaccctccgccaagctcaccccgcccgaggactggggacgcgtgacccgcgcagaccagcgaagacccccgaatcccagcttcctcgggctatgcagatcacctccacccactccactccactccagcgtcctcttccgtcggaagttccggagggcgctacggactcaccggcaggcggaactccagatgctcctgcgccatgaggagcagatacctgttaagggtacacgacagcgccattgcagctgcccaccgtgcgcctgcgcggcccgcgctaggtccctctttctccctcccaaagcccagtctccacagagacagagcctgaagggccggaagcggaagctctgcgaggcaggcgctatcccgacgtttctcgcgctccgagtccgaaactccggccgctgtgggaggggcttcctcacctgtgaatgcctggtggttaggggtctcccagcgctggtagctggtgagcggggacgcgtggctttcaggagcagcctgtgataataagacagtatatttccaagttatcgttccacttggagtgtgcttccagctttctctacagcccttcaaaacctgttcttcaaaattggactgaaatttcaccatttccttggaaatttcaccatttccttgtaggtttgtctaaccagcacagctttgggaactgatttagttgggccagtcatttaacagtatatttttcgtatttatgtaacaacttttcgagagcacatgccttataacccaattataataaactcttgaggtctgatataatcttttatggttcactctattcttaacaaaaaccaaaagaatatcttcctcaaagtaggcaataattattaggttgtgttatttgttagactcaggactaaatccacagccagccataaattaaaacttggagaaagctcacactggcacagatttcatagcagatagtttatgaaatatattttaattgcatattctatgtatatatgtgactttttttttttaagacaatcttgctctgtcacccaggtgagtgcagtggcgcaatcatagctcactgtaaccttgaactcctggtctcaggggatactcctaccctagtctcccaaagtgctagaattacgggctcaagccctccctctgggctatttctgcttttgagagtaccgagccctttgccctattaaaaattatttattttgcatttctctgtggtattgtacaaggtgcaaaagagtatgtatctggcatatccccagcggcatgtgccagaaacgtagttgatgcgcagtggtagtgattaagaacataggctgtggtgtcaatattagattcaaacctcacttccaccatttaccatgtatatgctcttaacctctccgagcttgagttttcttttaaaaatggaaaaacacactgcctcctgcaaaggattgttacaaggattaagtggaataatgttcataaagtgttgaatataacatctggcatattgaatggggccaataagtggcacttgacatttttcttaagaaaatcacatgagaatttttgttagcaagagatctgtttttgttaggaatatgtctcaagttcacttgtgctaagtgactctgagaagcatagctgtctcttgaccccaaaacttcagaaaagggggtaaaagtactttgagacaagaaaagttgtttactatttgagaagagaggccaaggttgggacagaaaaccaatgagatgttggggaaatgatgtgcagtacttgatatgccccatccccagaacttgtcaaatcttcagcaaaattaatatggaattttgatggggcaactttatagagaatatcaaagaattgctgattttcatgcctggattaatatgatgctatatagagacaaatgagactacaaggcctggagaacccaaatggaatcaggtgtcactgatttttcacccagctcctttgtgctacagttcaggactaaatctatactaaatctccacctcagaaaccagcaggagagtatttacatcatgaatctaaattgttggatacctggtctggagaagtagagattaaccttgcacaggccactagagttagtgtggaactactgtgacatcagtgaaactgcctttgagggactcacagccagacctgttcaaagttcttgagcttacaagagtggttaagaagcagcaggagaataaggactttggaatttggtgatcaaactgcatccagagacttgctttttttttttttttttttttttttgtactgtaaggagcaaggaggttcatagtctggcttctgggaactgatccaaagttccatccatgttccatcttctag

SEQ ID NO: 585988 - DNA, 4001 bp, Homo sapiens
ggcatgtgaatggaggcgagctggtgtgcccacccctcccccatgggccttcacacattcattcacgcgcacacactcacacagaggtccagaagcttctatcccactctgccgccctagtcatcatattatgcattcaaatacacacttcacatcataccttcagagttactaataggattttattatttaagtgtaaaatcagtttccccccctttcccatttctctgatttctaaggaaaaacggcaccaggggacccaggagggtggtcccattggggtgaaccctaactccacagccctgcttgcagactcttcctccccaccctgggcgtccctcctctcccatgccctagggcctcagtcactcttctccgtgggctgaggctggtgcactggacaaaggctgtccctccacaggtggtaggtgagggctgaagtcacggtgagccaggctaggtagggcagcagtaacagggcagccagtttgttgatgggatgccagatcagtgctgtgctcaccaccagcccatacagcagcagcaggtgcagcagggcctgggcatagaggccgggggtcagctggctgcccgagaaccagcacctccacctttctgcagtacccagcccagcaacgagctcagtccctggggctctgtgcacaccatgggagtgcagagaagtctgcccacccattacctgcctgcactcaattgctctgctgaattatgtgcttctggagccaggtggtttcaccctctcccacattacttctgctactgagcactgtgtgccttaccagaccagggttgtggactgtgaaaaagagaaccaggacagtccagctgatggtgagctgaacagcatagaggccaagaggcagggccaggggccaccccaagccccctcccaggtccttccacaccaggtaggaggcatagctgtggagacatggtggcaaaaacattcagtgggaggaggttccgtggcaaatggaggaggctctctggcataaggactcttggatacccttgtgggctgaaatgggggcagatgggtttaggcatcatgtaagggccagggagggagttggtgggaggagctgggcatggtgaggtggaggaggggctggggagacttagagagggtggaagaagggctaactggaaccccaggcaggcatagagggtttcttactttctggaggacccactatggtggtgagaggcaagacaaagcgcctacctttggaggccaatatatgggagtaattcagatatagaggacttgttcccaccccattgggtaccagggccatgtgtgagaaacaagtactcaccccacgacagagtagatggctgtctgtacaagcaataagactttgtagaatgggcaccaggacagcatcctcgggccctcacaccaaccagacatgtgatcacgagtgaacagccagaccaggatgggccccaggtggggcaggagcacaaagatagccccttgaagccgcattcaccttgaagaggcaaaatctggggaggcagagaacatgctagtgatgagccttcccctgcggctcctcgtctgtctctgcctcctaacctgactcatttcctggcctgagcccctcagagaaggtctactcacggaggtccttcctctctccctggcccagctccagtcctgtacctctgagctctctccaaccccaggccacaccttgcccatctcctggcttccatggacttcttttctccacagcactcctctggcacttggaggacactgcccagcactggtaactgcttctaagtgaataggccttcctccaagtgcttctgagtcctggagatcaggtcccgggtgatgagcttttctgcagtgggcagcgcttagccaggtatgtagctggccctcaccgagaactgttctacctaagctgatctaccaacctggaaagttcacaatctgaaggcaggagccagaaattcctggggactcttttctagtcacgaatgcggcagcacatctgtcccaggcttatctcaccatatcagactggcacactcatggggcccacccaggctgatctcctgcccaaattcaaacttggcctgttgacaccgtggattcctttttctgaacttttagctctcttctacccctggagccatggggtatgagcttcctgctccatctttccattcccagagtgtcaggatgtaagcacaagcatccaggtttcttgtggcctgacttttcaaggaaacaactgcctggtctttgattaaaaagctgccaaggtggcatgttgctttgcatgtcatttgcatgtgggacaatgtacagaccctcctccagccaaggccccaccaaggccccacaaatatcattcttctcatttgttcatgatatttcagcctccccccatgattaaccagatttgaaggagagaaaacaatctgattattttcagtattctggactgactatctaatccatcctttttttttttttcttttcatacagagtttcactcttgttgtccaggctggagtgcagtggtgcaatctcggctcactgcaacctctgcctccctagttcaagtgattctcctgtctcagcctccctagtagctgggattacaggcgtgcgccaccatgcccggctaattttgtatttttagtagagatggggttttgccatgttggtcaggctggtctcgaactcctgacctcaggtgatccacccgccttggcctcccaaagtgctgggattacaggcatgagccactgtgcctggccctaatccatccttttctgtcaagggtcagggacactggtcctggaggttctgggacagagctgagcagcatgcccacctgtgcatatttctacttgtctttctgtgctcctgactgtccgtttgctcatcttctgccttcctgtttttctacatttctgtccagtggtggaggccccctccctgcccctccctgcccccatcctcttttctcctgacacctgcctctcccagtgcctcctggttcctaggcctgtgctccccttacctctggcagcacacctcccaggcggggggcctgatgacatatgatgtgtggaaggcagaggagggtggggctgggaggagggtggggctgggaggagggtggagtggtgctccctgctgatctgcctttctcagatgagaagggtggtgacactggctgggaagtccaagttgctgtttcatggccccaaagagttcctctcaggaggagcccctctggtctgccagaccctccttggtgcctggcctctggaggctaccccttgatggaatgtttgagggcttgtggtgagggtttgacactggccctcctgtgacagctcagcccccagttataatgctgttgatgcctgtggtctttgcatcccatgaaccagctctgtggccatgggagtgagtggtaggagccttcacatttcttcagagcctccttataattgggattgtccccaagagtggcaagaactagcttgggaagtgagttcataatccatgaacacagcccctggttatagcctcctggttggcatgaccttcctggcttagaaccctagcttgacagatctttcacaaacccctaggactttatgactcagaggagaaggcagctgacaagtggaggtgggtggggagtcaaggaggagtgacctggcgcttcctggcagaaagtcctgcctcccagccgccctaaagaggggtaggggagagtgtccctgtctgttggcaaagtccagcctcctgtgtgactcagacagagctttgttcaacaaagacaaacacccctaccccactcctttcattccctatcaaagttctgagcaccccttcctggcttgtctttaggcatgaggtctgcttcccaggttgcccgctctctaccatctctgcactttggggtactgggctcccctgggaggtttattccaccctc

SEQ ID NO: 585989 - DNA, 4001 bp, Homo sapiens
accatgttggccaggctggtctcgaactcctgacctcatgatccacccgccttggcctcccaaagtgctgggattacaggtgtgagccaccactcctggccccctagtacccttttttaaggtgtatttttctgttttggcttttttgtcacttttaaaaagccttttgtttttcaggtaattaaacatctgagtgctaaatctttatgccaggtggggaggcatgtgaatggaggcgagctggtgtgcccacccctcccccatgggccttcacacattcattcacgcgcacacactcacacagaggtccagaagcttctatcccactctgccgccctagtcatcatattatgcattcaaatacacacttcacatcataccttcagagttactaataggattttattatttaagtgtaaaatcagtttccccccctttcccatttctctgatttctaaggaaaaacggcaccaggggacccaggagggtggtcccattggggtgaaccctaactccacagccctgcttgcagactcttcctccccaccctgggcgtccctcctctcccatgccctagggcctcagtcactcttctccgtgggctgaggctggtgcactggacaaaggctgtccctccacaggtggtaggtgagggctgaagtcacggtgagccaggctaggtagggcagcagtaacagggcagccagtttgttgatgggatgccagatcagtgctgtgctcaccaccagcccatacagcagcagcaggtgcagcagggcctgggcatagaggccgggggtcagctggctgcccgagaaccagcacctccacctttctgcagtacccagcccagcaacgagctcagtccctggggctctgtgcacaccatgggagtgcagagaagtctgcccacccattacctgcctgcactcaattgctctgctgaattatgtgcttctggagccaggtggtttcaccctctcccacattacttctgctactgagcactgtgtgccttaccagaccagggttgtggactgtgaaaaagagaaccaggacagtccagctgatggtgagctgaacagcatagaggccaagaggcagggccaggggccaccccaagccccctcccaggtccttccacaccaggtaggaggcatagctgtggagacatggtggcaaaaacattcagtgggaggaggttccgtggcaaatggaggaggctctctggcataaggactcttggatacccttgtgggctgaaatgggggcagatgggtttaggcatcatgtaagggccagggagggagttggtgggaggagctgggcatggtgaggtggaggaggggctggggagacttagagagggtggaagaagggctaactggaaccccaggcaggcatagagggtttcttactttctggaggacccactatggtggtgagaggcaagacaaagcgcctacctttggaggccaatatatgggagtaattcagatatagaggacttgttcccaccccattgggtaccagggccatgtgtgagaaacaagtactcaccccacgacagagtagatggctgtctgtacaagcaataagactttgtagaatgggcaccaggacagcatcctcgggccctcacaccaaccagacatgtgatcacgagtgaacagccagaccaggatgggccccaggtggggcaggagcacaaagatagccccttgaagccgcattcaccttgaagaggcaaaatctggggaggcagagaacatgctagtgatgagccttcccctgcggctcctcgtctgtctctgcctcctaacctgactcatttcctggcctgagcccctcagagaaggtctactcacggaggtccttcctctctccctggcccagctccagtcctgtacctctgagctctctccaaccccaggccacaccttgcccatctcctggcttccatggacttcttttctccacagcactcctctggcacttggaggacactgcccagcactggtaactgcttctaagtgaataggccttcctccaagtgcttctgagtcctggagatcaggtcccgggtgatgagcttttctgcagtgggcagcgcttagccaggtatgtagctggccctcaccgagaactgttctacctaagctgatctaccaacctggaaagttcacaatctgaaggcaggagccagaaattcctggggactcttttctagtcacgaatgcggcagcacatctgtcccaggcttatctcaccatatcagactggcacactcatggggcccacccaggctgatctcctgcccaaattcaaacttggcctgttgacaccgtggattcctttttctgaacttttagctctcttctacccctggagccatggggtatgagcttcctgctccatctttccattcccagagtgtcaggatgtaagcacaagcatccaggtttcttgtggcctgacttttcaaggaaacaactgcctggtctttgattaaaaagctgccaaggtggcatgttgctttgcatgtcatttgcatgtgggacaatgtacagaccctcctccagccaaggccccaccaaggccccacaaatatcattcttctcatttgttcatgatatttcagcctccccccatgattaaccagatttgaaggagagaaaacaatctgattattttcagtattctggactgactatctaatccatcctttttttttttttcttttcatacagagtttcactcttgttgtccaggctggagtgcagtggtgcaatctcggctcactgcaacctctgcctccctagttcaagtgattctcctgtctcagcctccctagtagctgggattacaggcgtgcgccaccatgcccggctaattttgtatttttagtagagatggggttttgccatgttggtcaggctggtctcgaactcctgacctcaggtgatccacccgccttggcctcccaaagtgctgggattacaggcatgagccactgtgcctggccctaatccatccttttctgtcaagggtcagggacactggtcctggaggttctgggacagagctgagcagcatgcccacctgtgcatatttctacttgtctttctgtgctcctgactgtccgtttgctcatcttctgccttcctgtttttctacatttctgtccagtggtggaggccccctccctgcccctccctgcccccatcctcttttctcctgacacctgcctctcccagtgcctcctggttcctaggcctgtgctccccttacctctggcagcacacctcccaggcggggggcctgatgacatatgatgtgtggaaggcagaggagggtggggctgggaggagggtggggctgggaggagggtggagtggtgctccctgctgatctgcctttctcagatgagaagggtggtgacactggctgggaagtccaagttgctgtttcatggccccaaagagttcctctcaggaggagcccctctggtctgccagaccctccttggtgcctggcctctggaggctaccccttgatggaatgtttgagggcttgtggtgagggtttgacactggccctcctgtgacagctcagcccccagttataatgctgttgatgcctgtggtctttgcatcccatgaaccagctctgtggccatgggagtgagtggtaggagccttcacatttcttcagagcctccttataattgggattgtccccaagagtggcaagaactagcttgggaagtgagttcataatccatgaacacagcccctggttatagcctcctggttggcatgaccttcctggcttagaaccctagcttgacagatctttcacaaacccctaggactttatgactcagaggagaaggcagctgacaagtggaggtgggtggggagtcaaggaggagtgacctggcgcttcctggcagaaagtcctgcctcccagccgccctaaagaggggtaggggagagtgt

SEQ ID NO: 585990 - DNA, 4001 bp, Homo sapiens
gctcaatgcagagctgagtaggtggaacaggctcccaaagctagaaatccaagtgacagcaaccagttcagaggccctgggaataaacagggtccaagcagtgcagataaaggcagtacaatctacagtatcatttgcttggcttacaagtagtgtgaaggatgacctcgtagcatgtgatattccagaacagcatgaaggtcatatggaagtggagaagcatacccaccaccgtctcaatcttgaggttgagagaactgaatatccaaaggaaacagggtgcagaaaagtcagcaaaaacaaagcacaatagaaggcatactcattgctgatgcccaagcacaggtccagcagaaggtggtaggagaccttgtgcaggagtattcccaagggcaaatgttaaccagactggaacccaaagggcctggggatctctacaggctcccttagcgggcgacgtcgggctctacggactccttcacgcaacaggtagtattgcagtggatttggccacagatcctctttaataatctcagcaattttgtcggactctggaaggctgtggtctgaaaaccaagtgaagaagctgcagatgaggtcttggtttctgcgaatgaaggactggggttcatgccccctgcgccatataattggagtagaaagagacaccactcggccggaggatcttacctcatattccttgacaatcagcttgtttctgaagtaggggtttcttctaaagaagaacttgaacttgcaaccggttctagggtgtctgagttccttcacctctaaattggttatgtaccttaacatctctgcatcttggcccctaatcatggcggacaactgggggtggtttcgaaaagcagtcatccagaagcccgggatattctgaatgatgtagttcctccgctccaggtagtgtcgacgcatccgcccaaacttgtgctccagctgttggaaggccctgtcggcctgagcattcacagtgtccagttccagctggatggcctccagagggtccatgcggagagcctcatgcaaaggccagggcccttcttcctccctcgcctcctcctccaatctatcctcctccgccacttctatttcttcaccttctggcggctgctcctctacctccatctgctcctccattacctccttctccgccaggccttccttcaccacctcagcgctctccctctcagccacggctgctgagacggtggcgcactttcctgtcttcacctcctccgcctcagcctccgcccccgccgtcagctcagacgcggatctctgggcgccacagatttctagggccttctctccaccctgaacgccctttttcaggctgcggtcggctgccatcaccacagaagcggctgccaggccttcggcgggaggctggccctcttcctgcccggctttgatcgccacatgaccgcgacccccaacaactcggatctggggagtaccgccacggcccgcggcatcctggggtacgcccccctcctctgaaggcggtggaggcgggagcgcgacggtctccgagcctccctcacccggctccgccatcacctgtgtcgcctcgctttggtcgcggagcctcaggtactggtgtgcgtcctggtcgctcgggacttggtcagaaataatgatgctgtgggtttggaggggagtggtcctcttgaccccatccaggccgctcatgttgctaacagtcggaccaaccgcaggcgaacgcccgttttcctcagaggccgaactgggagctaaccgccgctcgcaccgcccaccctacagtctcactaacatttcagcggcggtgtcgtcaggactggagatctcacggtatcgcgagaacttgctgagcccgggattggttccgccgctccctgccagccaaccggattctctgggctttatttctgtgaatttacccatagcaacagtaattttacctacgtaaataaatgtcgattgtgctgagtctggaagcgcggacgacccaccttgagatgcatctagcgactgctcccagcatgtaggagcagttgtaaaatcacagccgtaacagtgcctgctctccagtgtctgaaaacaaatgtttttctggtcttcacttttttgaggcaggaaggtaaatctattccctgttactccacgtaactagcagcaaaagacttctctttaagattaatagcaaaatgtttccccccttcttagtaaaagtgacataaaaatatcaattcttgcctctacggttactggggaaaaaaagctactcagcagcctcttaccactaaagcgatgcatagtattcattgctaattttcgatttataatctgcatcaaataagagtttgtgctgcatagtatcggtagaaattaagccaggatcagtttgctaaatgttccatgccttttcactgcaagaaagaggaaattataactatttccagccccaagaacttaatttattatcatatttagttatgtaagataggaatgtttggctctaacgaagcatctgtctttagcaatcagctgagttcattagagggggatgtcaatgtctctggttgaagtgttccagtttgttgacttgtgagttaaactggtgctgtcttagagagctacaaggcctcagagaaatatcagtggggggagccacataccaccattttgtgaggaaaggctagttaaaatggacaactaagatggccttgaagtagaaaacaaacttgcaaagggcaacatgcagctggtggactcaaggtataaaagaggcaaacgttattttctacttaatttgctttgtgtggtagtagcctgatggccctcaaagatgtacctgtcttagttatgcggccaaagggacttcgcagatatgattaagttaaagatttggagatgagaagatgattctggattatacaggtgggccctatggaattacaaatttcttataagaaggaggcaggagggtcagtcagagaagataagaggacgaaagcacagagagagggaaggaatggtggagaataggtgtgggagggaggaaagggaaatcgctatgttgctggctttgaagatggaggaaggagccaggatcgtaggaataaaggcagcctctagaagcttgaaaggtaaggaaatagattcaatcctagagcctccaaaggaatgacaacaccttgaggttattacctctaaactccagcactataagaaaataaatttgtgcattttaagctattaaatttgtggtaatttgttacagaagcaatatgaaatgaatacaccttggattaaggtttggttgcatctatgggtgcctcaagttgtttctaatagcagccccttctaccttgctcatggcttcccgtgagttcctgcccaacagctgtgatgtattacagcttgaatctgtctttcaatatcaagaccagaaatatacttaggcaaatgcacagaaagacaaaattaaagcctaaacataccacaaacgatatctgaggagactgtaaactgcaagaggacatgatcatggtttcgtttccctctgtttatcgagtgcctagcacactaccttacacagtatcccatagattattaaaatgttaaataaaggagcaaatgagcagaaaacagtttctcttgcttgcaacttgctccttgcggaagagaagtaaggggcatatgggttgtcactctgctctccttcctatctgccactggcaaaccagagggctgctctattctatatagtaacagtttcctactcaggagaatgaatttctatatatgtttcaaaggctctaaaaggataggaaaaacacagagaaaacaattttattttacaaataatttaagtttgtgtggtcacactgtatgacaaacgaactctgaaaagaccagcatatttaggtgagtttacatatcaaagcctcggactaccagcactgtatttccaattctctcctttctgaaaaagt

SEQ ID NO: 585991 - DNA, 4001 bp, Homo sapiens
tgtgataacatagaacacttttcatctattacctcagtcacgcctagcagtcacccatcagccaccagcttgttctatcagataaccagtagggtggatggcacaagcccaggaaggcagctgggatccagttggtggtagtctggaatgtccaatttgggttgatggccgggttaagatatcagttttgtcttgcagtggtaatacccaaatagcttaccataagtacatgggtatcaggacacagccagcataaagtatgaagcccaatcagttatttgtgaaaatgtatcaagattctttgtggtacagaaccacttaaattgggagaagagcatggtcacagatagggtccaagccatgcaaagaaaggcagtatggtacactatatctatagtatcatacgcttggcatagaagccgtagaaggccatgcacttgaaacatgttaacacaatgcagaaaagcatgaaggcccagaggaagaatggcacaggcaggtaagccaacaatcttgcaaccgattactgaagatttagaaccaaaggaaaagataatccacagtatgaagagaaagcagatggaagactgcatgctgttggccaagcataggtccaagaggaggtggtaaggaaacttgtgcagaagcttctcacaggacagagattagccagactggaacctgaaggatctggcgctctccactggctgccttggtgggcctcgaattcctctacggggcccttcacccatcaggtagtattgtaggggattgggccacagttctcctttgataatctctgcaattctgtcgaattctagaaggctgtggtctgaaaaccagttgaagaaactagggatagtgttcccttcccggtttctgtggatatgagcctgggggtcttggcctcggtgccagcggattggagtggaaagagacaccacccggccagaggatctgcgttcatattccttgacaagcccctcatttcggaagtaggggttgccctgaaagatgaacttgaatttgcagcctgctctggggtgtttaagctcctccacctccaaattgatcatgtacctcagcatgtcttcatcttggccactgatcataggtgacagctgggggtggtttcgaaaggcagtaacccagaaacctgggatattctggataatgaaacttctgcgctgcatgtggagccttcgcatgcggccaaacttgcgctcaagctgaaggaaggccctgtcagcctgggcatttacgtttgacaactcttgatcgatggcctccagtgagtccatgcagttattgatcttcggggccctgggccgtgtctcctctttcacccctcctgccacctttttttccttctgcactaccttcttttcctccatcgccgcccctgcttctccctccttttccactgctgccgagatggcgcgttttttagtcgtcacttccttggccttcttccccggtatcatctgagaccccaagccccctgcgccacaggcttctagagccttctgcccagcagggccacggggctctccaagctgacagccatttttctggctgctgtcagcagcctcggcggcagaggctgcttccagacctttcgtagaaggtggagcatcctcctgcccggctttggtcgctgcaccgccgcgactcccggcaactgggacgcggagcgcggggccacagtcgacaggatcctgggatgcacccccctccgcaacggtctccaggctgcccccacctgtgttcgccatcacctgtgtcgcctcggtttcttcacggagcccttggcactggtctcggtccggatctcctgaggcatggtcgggagcagccaggccgccggtttgggcgagagggagcttgttgcccccatccaggccgctcattttggaagaagtcagactagtgggagagggagagttccttgtcctccgcagcggccgagctctgcccgaaacgtctagcaccacccctcctttactctcggcggtgctaccatggcaactggtgatgtcagggcggtagcgtcgtaacatcgcgcgagaactctctgcgcggttgactacgcttatcaatccatcgtattcctttgtcttcttgtcacaaaaagaatttcgtcagtctggaaggggagttttacttacgtaaatggatgtagaccagactcaagcatgtaagaactgtgttaatgtggatttctaagcctctgaatgaatttctaaggcacctaacctattgtttctgaaaatatttactttaaggtgagttactgtctattcaagtcagttcatagggcttctcctgagtaggaaagtggattcacgaactcacaggccttccttcttttaaggtgtggattcatggctattaccaaagaatttaaatgagcagagtttgattttaaagagaagtgttgctgtgttgttatttttaaaattaaggagcagctgaaaggcaaacttctctcatcctaacaagacataataaaggaatatttcaatttgtcttacagattttaaagtttatataatttggccaacatctacaaaacaagtggacaatatttcctcttcacttttaacaaagagtagcaaaatgtttttccttacgtagaggtgactggcacacgagcacaaatttaggcttttaagcattactgaaagaaatatctcaggggattttaatttctaaactgatgcatatgttcttttcctcaggttacaatcttaatctaaaagtggttcctgcttcataatgcctgtggacatgaagctaacaaatcttttcaaaatgtgttcatgtggtaattcactgcagcacaggagcaataatcagctatgtgcaggcatctatgctactgtctcttaaaatactttaaaagtaaggttagttattgtctattcgagtcagttagctcttacaattcatttgatagtgattatcagtacaatatattagtttgttggagtgtgagaataatggtgttaatccttagaaaaatgcaagaccaaagggaaatttaaattttgcatatttatgtttaatgtcaaatttatattcaaataaacggttatgattataactctttgtaaaagaaactccattttaagccccccagattatgatcactttcaaatacaggctcagaagtacagatttagagaaaaaggattcctcttagaggaatacatcatatatactgagacttctagcgagggaaggagtgtagttctggttcaactaagataaagtactgatgaaaggtcactggcagacaatacggagaaacagcctgccttgcaggattttttgtatgcctagtcagcctacccaaggacaatgtgtccagaatgacctctttactgcctgccagctaatcagttatcccataagaaatatgcaaacaagattcacacagcagagagcaattatttttctctccctctttcctctttgtcttaataaacgctctttttttatttgtggggtgaaatcaatctattgaggtatcgtctttgtaaacacataaacagcgtgctataattgactttgtgactttgaattattgacactgctctgtttcttttccaaagaacctttgcactgttgaaagagtaacttttccattataacctgagtcaagatgaagagaagcagggaatactgaatgaaagttacttttccatgcagcaggaaaaaacaagtttgctactatacaaatttatagaaaagtataaaattacatgtgaacttctttttctttttgtgtgtgccaaagttttttaaagatttatatctctactactcaaagcattcccatctctagcctgtattagttctgtcacctgaatcatttttcactcataaccacctggccattctttaacactcagttcatgtagattgtactaggcagtttaaatacattagattttataaacaaagacccagtgagcacagagcagttaacatgccca

SEQ ID NO: 585992 - DNA, 4001 bp, Homo sapiens
taatttaaatgaaaagatacctttttctaatattttctagaactcagagtcagttgttcttttccattgcagtgtcacttgactgggctgtgtgtggtgattacttgtgtctgccttccctagaaatgggtgaactgagctgcagaggctgtatccccagcaggaagcccggcagtttaggagcttaataaatgattgatttttcatgtttgagacaaagtcttgctctgtggcccaggctggagtgcagtggtgcaataatgactcactgtatcctagacctcccagacttaagcaagtcctcccacctcagcctcaccggtagccgggactacatgtgtgtgctaccatgctgggttttttttttttcttttttagtagagatgggggtatcactatgttgcccaggctgatctcgaacccctgggctcaagcagtcctcctgccttggcctcccaaaatgctgagattataggcgtgagccaccacgccagtcccagagctcaataaatgattctttttttaaaagacagggtctcactttgtcacccgggctggagtgcagtgatgtgatcttggctcactgcagtctcgacctcctgggctcaagtgatcctcctgcctcagccctccaagtagctgggactacaggtgtgtgccaccaagagcagctaattttttctacagacagagttttgccatgttggccaggctggtcttgaacttctgacctcaaaaagctcagcctcccggtgctaggattacaggcaagagccaccgcgccccaccaaatgattcttgaataaaggtgaaaggaaacactctgtggccaggagcagtagctcacacctgtaattccaacactgtgggaggccgaggcaggaggatcacttgaggccaggagttcgagaccagcctgagaaacatagctaaaaccccatctctacaaaaacaaaacaaacaaaatcagctgggcctgatggcctccgcctgtagtcctagctacgtgcagactgaggggaggatcgcttgagccaaggagtttcaagctgcagtgagctgtgattgcagcactgcattccagcctgggcgacagagccagactctgtttcttaagaaagaaagaaagaaaaaaaaggagaaaagaaaaaaaatttgcatagaaaagcacatcttaaactacagaggacttaccaacagttaaaataggtaggtggggctgggggtaagctgtgttaatgctgggtccctgtagctgcatccacagataaaagttggtgctggagaggcagcatgcaaagcgaaaagaagggactgctttgagttctagacccaacgcctccggtaaccaccttcatttctctggcttctgctggctcatcggtaaaatgaggggtggtatttttatagttctaacacgttatagttctaggtggctgtttcatgaagcgccgagcgctgctctgtagcgggtcacaaatgtaactcgcaaggctgggctcggcattacgactctcgccggcagggagtggccatcttgctcgctcctctgagtcgcgaaattggctttcatgtattgctcagtcaagcaccactaccaatataaacgccctcccatacgacctcgctggagcaatgtttacctctgtccctgcgtccccagagcgcccacaggttcgggtagcccgaaatcttccccaggtgggtgttacatccccaggtgccaagagtgatgggtctgacttttaactggaagtctaaagaagcgagcacccccaccaatgttaacccttgcctgaagtctaaggttaggcgctctccctttccccagggaccaccaagctcaccgcagagcgcagcctccgcggacccgaggaccgccctgcgcgcagtctcgagcagcaaccagggtagcaccattgcgggccggcggccgccgcgctagtgaccacttcctcctactccttctcctcctgctccggcctcctggcgccctgctccaggctctccggcgccctccagccaggcaccggccgaaccgggtagtgccgcaaggtgtaattactgctttgaaactttaaaggcatttggaaagaaactacgggttatgcttactttttttgtttttgattattattttgtaggagacacaaagtttaaaaatagaaagcaaaaagtgtgacacatttaaagagttaaaggaaataaacgtttccaatttaccttataacatgattttcatacactggatttgtttaaaacagactgactacatggataacttttctaggaattgttcttaactctgatagctggctcaactgatgtaggcattaaaataacgtcatattaccatctttcctccacgaattgatgatatttgactatagctttgtcagggttatgtccaactattgtataatatgtgtcagtttcctattgctaccgtaacaaattaccccaaatttactggcttaaaacaacacaagtttactatatacaattctgtagattagaagtctcacttggctaaaatcaaggtgtcagcaaggctgtgtttcttctgagctccagagtagaatttcttgacttgtcttttctgtcttgtagtggttgcctgcattccttggctctcatggcctccttctccatcttcaaagccaacagctttgagcttcaaatccctgattctgactcctgcttctgttatcacagctccttctcttcctctgattctgctgcctctcttttataaggacctttacattcagaccacagagataatccatgataatcttctcatctcaagatacttaatttaatcacatcttcgaagtcccttttgccagttaaggtaacacattcacaagtttcaggtttgtagaacatgaacatctttggggcaggaggtcattattaaaactaccacataaagtttctcattatcttattttttatttattctcaggttggttcccaaacataataaaagctatatttaactgcaaatagatttacagttaaaaattaaaatatttgaccaggtgctgtggttccaacctgtagtcccagttaccagcaggctaaggcaggagagtcacccgaactcaggagtatgaggctatagtgcactgtgatcagcctgagtgactgagtgagaccctatctcaaaaaaaaaattaaaatattcatgtttaaatggcattattaaagtgtatgtccaaggaatcatttcattaagcatttacttttaaattcttcagttatcaataatttaataagctataaaccatttcagatttctagaccaatgacatcatttataattattttccaaataatttggagcttaaccatagtctccgtgtaatttattttgtggattcacttttaactaagatatcactatatactgtagattcatgtagtctctgtggcatcctcattctaaatatacatcataaatcacaggtagtatgaacacaagatagggaaacaatatacttggcctcactgaataatatttaatctgatttctgcttttgcaggagaagtattactaaacaattattcttttagggctcataactaattattatttaaaaaatatttttatgtaggacttttttttctgaggagataaatatgcctttccatatatagcacactgctaaacttagtttatttaagagtccttgcagcaaaaagatcttgtcaaaagaggttcttgatcattgttcctagttatcttgatcattgtgtccaagttattccatcattgttaaggaataatttaagcaagacttaaaattgataaaagagggagaaatagttttcacttttctgagaaagatttactagtgctgagttgatatgaatcattaattctcaaacaactaatttaattttttgttgttactcatgtgttagtgaaaggctattggaaagaagactttttttcttttttttttttcttttcttttcttctttttttttctttt

SEQ ID NO: 585993 - DNA, 4001 bp, Homo sapiens
cttgtgtgtgttttgtgtctgtgtgtgatatgcatgtgtgtaggcaaggggccagaagacatgactttctgagatttctgccaacccaggacaggatttggaaccaggatattttcctcttctctttccctcacactttttagaagcacactaccgtgccctcacaacgaccctggagagtcacaaatagagaaagagggaagttacttaggctggggtttgggggttgcgggtcgggggaggaaggtggctaaagagatgtatagatggggtagaaactacataaacccacctttccttgggatgaaataacttcccagggctcttgcatctagacatcctgccataggggacagggtgggacgtggaggtgtggaaaccaccttctaattcatgatgggccatggtggacatatggagaagggatcttcatggggagggacgctgccactccttttctctttcttcaagtgactaagctgagctgtttcctccaatccttacaacttcagagcatcaggacttccctctttctgccaaagtgggatatggggcatcaggaatttgaagggcagtgagggcagtggcaggatgaagggagaggtagggatgggggttctagaataaaggtggaggagacaggttgaggacaagactgaagaagcaattgaactggtgggagggggccttcagaagctaaactgggtgaactctggtgggctttccagtcctgggacagtggatctgttaggttgataaggaaaatttgtgtcctgctctcattttatagatgagcaaaccaaaaagaaacagatgaggcaagagaaggaagagtggagccaggaagataaatgagggttacctgcttctccctctccaccctccttctctctgtgtctgaggactatgctcagctgagactgggttggatgatacaaacatgggacacttggctgccccgttactgccgcctcagacccctatgtgcacatgggcgcatggtgaaggcgagggcttatgcaggagtttgtatgaatatctgtcagagagtgcagataggagcatgtggggccagtgatggtacacaggggtacgtggaactggtgggagctcatcatggcctgtgaatacaagtgttgatgtgtaactctgcaaggtgtcagcaggtgtgtgtgagaatctgggagcccaggtaaggagaggtgatggagactagcgaggggtgatgggaacaggtgaaagaggtgtggagggaggcagaggggaatggcagggatgaggagcgacaggatcagaggagaggggtgggtaggatagagacccgtgagagataatgatgacaggcaaggaagagataggaccatgggagggatctctgggcacagttgagggggtgaggaagtaggtaagaaggcaggtgggaggcatggagggactgaggacagggagggaggttacggagacagccgaatgattcgtcagggatgacaggagagccaggggtgaagccatggggacaggggacggaggtgagtggggaggagcaaagtgcccggaggacgggttggggagggaggtctgtgtgctggggacagggagcggctccaggcctcggcgcggcccaggcggtgtaggccagcgtcccagcccagcgggcggcgacagcagcgcggaggggagcccaagaaggctgcgctgggaggcgagccaggcggagccccctgagcccacgaaggagcccccgccccgaccccggcccgccccgccccgcctcacctgctctgtgcccgctgcggctgcggctgcggcggcggcggaggcagcagctcggggcggcgcatcccccggggccggggcggggcgggggcggctcagtgcggcgttgggtgacccgctccctccggcggcggcggccttccgacccggatcatcccggcccggcccggccccgatcctccttgggcgacggcggcggcagcggcagagcggggagctgcccacaatgcaccgcgccgccagcatcagcaccagccctgacatcaccgcccgccgcccgctctgacatcacggctcctcctctgacatcacgttccgacggccccgctccgctctcctccagccctgggactctctggctgtcccgctccagctctcaggttctccttacagctctctgccacccgcttgactccatctcccagcacagccccatcactccttacctgttcccataaaactcacctgtctccatcaccctttatcttccccactcctagcatgtctaaaattcctcatctgacccatcagtctcgcctgattccccactccatcctctacatgtttatatcgccttcctctcaactcatccccctctcctgtacccatcctcccatacgtccccatcacccaccacttctgggaccatcccacactcgcacccaccacccgtcatgtgcaattctcacctcaccacctatatgctttatcttttggctcaatctgtgtctctctttctttggccctttctttcatttgtggacaaactctgccattggtttttactgcttaccaaataagatggacactctttactgtaacatcaaaacatcttcccaacatggacccattaggccattactccccttctgacatgttgggttactcaacaactcaacattccaacattccttgaacaacacattctgcatgccgcctgtctctttcagtttcttccttctttttttttttttttttttttgaaacagggtctcactctgctgcccaggctggagtgcagtggcacagtctcagtttattgcaacctctgcttcctggacttaagcgagtctccagcctcagcctcccaaatatttgagactacaggcatgagccactatccccggctaatttttgtattttttgtagagacggggtttcaccatgttccccacgctggtcttgaattcctgagctcaaagccatctgcccaccttggcctcccaaatttctgggattacaggcatgagccattgtgcccagccagttctttccttccttaatgccttcaacaaatgcatcagagcaacttgaataataataacaacaacaatgggccaagtgcaatggctcatgcctataatcccaacactttgggggaccaaggcagcaggatcgcttgagcccgggagttcaagaccggcctgggcaacatagtgagacctcatctgtacaaaaaatttaaaaattagttgggtgtggtggtgtgcacctgcagtcccagctactcgggaggctgaggggggaggatttcttgagcccaggaggtcaacactgcagtgagccgtgattatgctactgcatgccagcctggatgacagagcgagactctgtctcaataataacaacaacaacaacaacaattgcagcagttatttacttctgccagatactactctaactttacatatgttaattgctttaatcctgatgacaaccctatgaagtaagagtactattgttatcccttgttttatagatgaggaaactaagatacagacaggttaagtaatatgcattgggttacacagctagaaagtggcagagctggaattcagtccctggctctggagtccatggttctaatcaccacattgggaggaaggatcattgagcctgcaagagtagtcagggaaggcttcttggaggaggtacattcaactgtaatttgaggaattagtagaattagtagaagtttgccaacagacaagtggggccagggcagagcatgaaagagacttccaggctgagaagacagcatgagatgaggctggggcgggcgtgtgcaagatcatgaaggaccttgtgtgcagtgctaagaagattagattttatccatttggtttttggaactgtagtggatactgtggagagccattcagatctccctccagaatgtaggtgcttattctcccagatatgagatgttgaaggctgactgcttt

SEQ ID NO: 585994 - DNA, 4001 bp, Homo sapiens
atagtgaatatataaattctcatctagaaagaaactatggttttaagcatctttgaatcttcctcagtacttaaaatactcaattgccttgatgtacaacctttgttagtgacataattaagcacaattatactccattaagattttgcttaacactaaaactatcattttctaggttttttcaaagtgaacagtcagccaccatgattagatcacaggttcttccatttattttcaattcctcatctatttaaaggttagtatagatgtaagaaaattatccaaaggtcaccattcaaatgaccaaccatttgaaatacagtaaagaatcaggcttctgagctaatacttttagaagagctagagtattaaactctgggcattttcacccattaatcattgttcaataaatgtttaagtgcctacctaccatgtgccagacaccattcaaagttctgtggatataacagacaaaaaccctgccatcatgtagcctgcattctaatggaggagaaagacaataaacacatgagtaaattataaataaagtgattagtactatatctttaccttagaggatacccaacaaacagttactaacttaaaagaaaagaaaaactcacctgtagtatcagcagaaattttattcaagcttagttcatcagtaaggtcttcatttttaaacttatttttaatgtctctcactttgttcattatggaatcaattgtcaattctctgccacttaaatcctcggattccatttctaagaaaaaaactgaacagtcataactcctactttaactagcatcaaagaaaaaaatgcactagctttttagaacccagacgactaaagcattcgttttgtgaacacatctaaatgcagctattattaggctagtattaatggaggtaagtgcacaacaacaaggtacacatctttgtaatttattcaccaaggtttcataggccaagtatactttttcccccaatataacatcaatgacgtcacactgtagaaatctgcaaatttagtgtcacttaaaaaaaatatgatagagtgtttgcttggattttggtagcgacatacacataaagattgcttggattctggtagtgacatagacataaagaattcgtttggcaatgggaataacaattcctttattcgcctgctttacttgagtaaatcttccagtgcaagtgctttcaaagcagaatataaacatgatggggctttactgataattaggaaatccgcagatttattcttgtgcatatctagcagaatcacgatttgctaccttaatctaacactaagaaactattgtactggtactgagcacttgcttatctgcatggtggtggtgtttgttcaataaagtgtctgcagtcttattgttaatcgtatctttgtgactctcaaacaccaactcagtgtcactgataacaatgctgccccgtcttcaggtttaacaatgaaaaaaagtcataaagttgcagcaaggtatcactccacctcttaagtcaggtttgaaagataactgtcagatcacggccacccgcttctttcccagttctaacccccaaaacaagagagactgtcctttggaaaacgatcttgtgcgcaggtaccccaccaccccttctttccagcgtgggccacacccacttcttacttcctcaacaaaacctcctgcatcaccccaccggccagacccgctgaggcagtgagacatcccctccccctccagctcgtttagccgcgtcgcatacctggctccgagctgcccccacctcgccccacccctcaccgaccagcgctaacaatgagcccctacaccggctgcggctgttcctcagtgcgccggtgcaccggtaagacagaacttacctacagaaagctgcgctggggaaatgaaaagatggaacccaaactcctttccgcaaacacgtttgaatttccccgtcgctatcactacggtctcctattggtcaatgctagccacgtagaagcgacagtcgtgattggttcttgtgcgacgggggccgcccctcctcctgcgtcaggctaggcccgccccggaagagcctgcggccgcgaccccacccgtgcggcgcctgggttggtagggtgctggcactttgcaggcgttccccggacgcccgtgggcgggctttcctggtctttccagtttaaccaggccgaatttttgcctgggaggtagccactcccgagcaaacctacccagtgagaggaatataggggcagggacggctgctcctagcatcaggacctaaaagatgcaccttgggccggccctttactgaccccaccgccacccttctccttcgtttcccgcggttctcacagcctggcttagagaggatgtggcaagaaaggatctttcactgagctacgttcagccctgccgccagctcaagaatttcagtgctttttatccttgagcttctgcttatgcccttccattatccttaaatgactccacgctctgtcttcaagccaagaccctcccccttgtcaaaattctgcgcagaactcaagcgcccatcgtgattgccctgtctgaagtcgccttatcggcccccctccctcgaagcctgccccacttaagggctcaggtgtcctcaggggtaaaaacatctccctagtaataatcttcgcgggtgcgaggctctgccgctaagtggctttgtggtccagggcaacggttactcctcgtctgcaaaactaaaagggatgtgtctgttgtgccagcattatgacatatattctgtggtaggacgggttggttttgtgtatgtataggaaactaactgcagctgtcacttgttaactccaaagctatccttagaaccctcacattcccagctctggatagccacccagctagcgtgagagcccttctcaatcacttaatgcatctttctgtgtcagctagctagtatttctgcttcagcagagcaaaatgacttgctataccatggttggctaatcacttacctttgcaccattgcatctaatgcttctgcctggaaagagtttattattcctccaattctcgttgatctgtttgcggcctgatcacaaagcttgcattttccttaaaatactgttgctggatgacctcaccctaacacttctttctgtactctcgtttggtggtctccttcagtcttctatttttaaataccatctatatgttgatggctcccaaatgtgtatcattagctgagctctcctcaactccatactcagatatccactgcctacttattaacatcttcacttacatgtctcatacgcatcttgaactcaaaatgtccaaaaccaagcccctgatcttcctacccaaacctgttttttttacaaaatctataaaagacaaattcattgtcttaaattttttagccccaaaacctttgtgtcatccctgatcccttatctaactcataagcagattgagtcagggctggcacaagagattcctggactcctaccagttctccccacctccactgccaccacttcagtccaaggcatctgcatcacttaactgatgttacctgcagtagcctcctggctggtctccctgcttctgcccttgcctcacctcaatttattctctgacatagcaaagtcatcttaaatcagattatgtcactactttgctcaaaacccttcagtgctccctttctagctcggaataaaatcaaaagtccttgtgatggtctgtgactattgagcacttgagtatgtctagtgcaactgggaactgaatttttaaatcaattaaccttaattgattaattaaatttatatttaaatttgaaaactgatatctaatgggattatttttaaactatttaaagtaattttttttgctttcttttttctaaacttgcattagtcatgaatttattggaagacttttaagtatacttggaacaatgtaagtatatgaacctactttttcaactg

SEQ ID NO: 585995 - DNA, 4001 bp, Homo sapiens
agttgcaactgcttccctcttacagaccctcctttttttttccttcctctttcccccaatacctactcttttctctttacttattaaggtccccagaccctctatgggggaaaaagcataagccacagccttttcctgtggttctgtgttctttttcctgggtacatccttaaccttggcacataaacttcttaaatgattgagacttgcggtggtcattttctttgatttacattgtctaccaggggtgtccagtcttttggctgccctgggcccattggaagaagaattgtcttgggccacacataaaatacactcacactaacgacagctgatgagctaaaaacacaaaacaaaatcacaaaaaattcatgatgttttaagaaagtttacaaatttgtgttgggccacattcaaagctctcctgggttgcatgagacccaaggacttcggattggacaagcttggtgtagacatagaaaatatcccacctttattgggtaggaacgcacagtagctgcaggccttgtgcgtgattgttctaggtcattgaagccatttgtggagatcagtcaccctcaagcacttggcctgtaaatggtccacattctgcttgtcacctttcctgatgcatagttgatagctgtggcttatagtttatatggaatgtagaatgcttttcaccccaattatagatgagacagtcccgttttttgagttgaccaacttaaaaaaacttcctacctaaatgttcttttgaataaaaatttgtattgcttgaaacacagaataattattttattattaaaccagaaatcatgcactattttttctgttaattatcaggaaagttctgttttctcaagaaagttctaaggtcgcagaggtcaaagatcaagtcccatgtgtacgctcagccccaagacacccagagtagcctcatttccaacaaacccggggtagactgagctgcttgaaacgcaaacgccatcactagcccaagttgggagagctgactttgcctctttgaagactggagatgggcaggtgtgatctcttccctcatcatgacctctgcctgcggtgtggaggctacaggccggcaggcactcacggccttgcacccgttctcggccgctgttcggcctgtcacagcccgcttcccgctcgcatgtgacaacaggagcccagtgcttcagcccaccctcctcagcctcaaatgcccctagagcccctgagtttctgctgatggaagcccacctctcccaggaagcccagcatgaatgcccactcctccttgaagcccttcctttctacactggggggattttcttttcccccgtggggtccataccacttcacacttatcctatggaaacaattctgctcggccctgaattacaaccatgtgtgtttcatagatgatccagttccgtctcataaccctagcatctgtcacagttcccagagcacagcggccattcaatcggctttggttgaattcagttgaatttcctgtacccactatgggatgcagttaacttacactcccctcctttggtaactttagtctcaggaatgggtctacttcgttcactcttatataactggcacctcagcatgcaggaggcactggacaccataggaaatttttggattgaaaagtacatgacttcatacaatgctggactgcttttcccttgaaggagtatgaagggctgactacaaattgcccctcgggggtcccagtgcacactcgctgctcctagtgaccctggcccctgtgctctcgggaaggggctggtcctggaacagaggcatgatcggggccaccctcccatcctacgtgtcgcctcctacgcttaccccagcgcctggctttgtgtggaggaacacaggtcccgccctctcattgggcgctggttccgagggtggcctctgtgggtctctgtgcagcagctgcagcgccagctgaaatgcgcggaggctggagggagcactggttgctgatgatgcagggtctgctctcctcacaaaggggaagccagtcatagactcagggtggggcccagactgtcaggaccccttagggacagggacccaggcttcatcacaccttcctccctccaagcttcagagttctctctccgacccagtgggcctcctgccagtccccatgcctcaggcctcagcggccagcacacagggggcaggccttgtgggctgcctggcggggtggcatctgttcttgccaggttctcctgttgcttcgcctgcatggaatcttaatatttaacgtgggctgggtgcggtggctcatgcctgtaatcccagcactttgtgaggccaaggcaggcagattacaaggtcaggagatggagataatcgagttgaaatcccgtctctactaaaaaaaatacaaaaattagttggtcatggtggtgggtgcctgtaatcccagctaattgggaagctgaggcaggagaactgcttgaacccaggaggtggacattgcagtgagccatgattgcgccgctgcactctagccgggcgacagagcaagactccatctcaaaaaaaaaaaaaaaaaaaaagttatgtctacacaaaagcagttgagattccaaaatgaattacgtgtctttttgtttaagccatgtttgtgtcagagatcccagttggacccctccttccagctcaggctgtgtcctcgctaatctaacggcctccggccaccacccctgaggttcaggactgcaggaactggagaggccttgccaggcgtctcagagccgtagactctctaccctcggcacatgttggctctggcaagtggctgcctctgtggatgacagttgaatgctttattgccatctattcgattacaggcattgccaccgtcttccagaaacaatcaattgcttcacgtaactctataaaaactgcacaccaagctgctgaggaggttgcccaagttctgtcaagcacagggaaacatggctaatttccttatccacaaaccaagaacaaaagtcattcataagatataatctgaaaggcatttttctttttccatttgacatgttcatgcattgttaattatttattgtttttctcccagcacgtggtggggtaaattttgtaaaaatgaagtgaaatgaggttcttccaccaggactgtcttcctgagcgtgcgaggaagggtgggtgggtggggttactttatctgggcttcctgcactcccagggaaggcaatcctggcacaagcaagagcacctgggctcagatcactggtgtgtcgatttgtaaatcatgcatttactcagccatgtttcatctgtcccttccattggagatgttacacctgcacctccgagacttcgtgctgactctccacttgggtatctggcagaagaagggcaaagctatcaagactagaggagactcctaggggcattttggcaagaaaaatatgcggtgtgcattttttataaaaatgtatttttgtctgaagtgagcactagaagcaaacacatttccccaaaccatttgttgttccctttgattatttccctgatttcacatggggctcactcctctccttggcttcagttctccacctaactcctggttactggatatggaaaggcttggagatgggctttgcacctcctagggactgaccacacagattctggactttaacgtcagagacccaacccagaggagcactggatcccaccacagtgttggtccagcgtctcctcccgccctggcttcgtgctgcagtcagcgtgcttgggggctccctatgttctgttgtgtggaactcacaaatgcccactattatggcataaatctatcccccgcttcccactgttggcaccagaacacacttattttacgcaccctcctgtggaatcaagaggaggttagattcattatgatgtttacatctataattttggcaaagtgcaagaaaactctgtaccaatacgta

SEQ ID NO: 585996 - DNA, 4001 bp, Homo sapiens
tgcgatcagggtattcttctcggatcttgctgataaggagagtgcccattccagagcctgtgcccccgcccagtgagtgggtcagctggaagccctgcaggcagtcacagctctctgcctccttccgtaccacatccaggacagaatcaaccagctcggcgccctctgtgtagtggcctttggcccagttgttacctgccccagactgacctggaatgcagtcaggagaaaagctcaattaacagggtatggaagatacatgatgtttccatctttcaacttttcaaataattccctcggatgtatcttctttctccttcactgtgatatattctccccctactgccccataatttaccagcaatagtaggcactacctctaccctccgttagatttcagaacacatttctgtattagcactccaatacaacaatcatctcctaacttttgctgtgtccttgcacccaaataagttgaacacgatggtatatcatctgctaatatcatctgtataactcaccaaatacaaagttgtctggtctaaagatctggccaaaaggacctgagcgaacagagtccatggtcccaggttctagatccaccaggatggcacgaggaacatatttgccacctacagagaataaagttaagagctgtgaaatctggcagaagggaaggtttatagatatactggaaatgggagacagcagggatcagagacttgtcattccaggtcccgccaccaggtggcagcagacgtctttggccccgacggtggttcacgaaagggacaaaatgacagattcacccaaaggggataaggcgtgcccagaaatggaaagagatcccagataagtgggagacagggaagggaacctgagctgcccgggctcctgcccttacctgtggcttcattgtagtacacagagatgcggtccagctgcaggtcgctgtccccgtggtaggtgccggtggggtcgatgccatgttcatcactgatcacctcccagaactgccgagggggagcaacgagaccacaacaggtcaagtcccagccaactatgtccccaactaccattttatttcatctttttcttaattttttttgagacggagtctcgctctgtcaccaggctggagtgcagtggcgctatctcggctcactgcaacctctgcttcccgggttcaagcgattctcctgcctcagcccccggagtagctgggactataggcgcgcaccaacacgcccagctactttttgtatttttagtagagacgggtttcaccatgttggccaggatggtctagatctcttgacctcgtgatccgcccaccttggcctcccaaagtgctgggattacaagggtgagccaccgcgcccagcttcttctaatttttaagacagggtcttcctgttgcccagcctgcagtgcagtggtgcaatcacggatgactacagcgtggaactcccaggctcaaccgatcctcccatctcagcctctcgagtagctgggaccacagacgcgcgccaccacgcccagctaattttttacttttattttttgtagaaacgtggcatgggggagggtctcgctttgttgcccaggatggtctcgaacccctgacctggagggatcccaattcgcccacctcggccccacatctcccattttaattccacaagcgctcaggccgttgttctagggcatggcatcccgtgggcctgccacacccttcccctagacactcgctcccccgagaaagccacagctttccctgctctggatatgtgcagcgggtcccaagtgctcggtgggcggatggaggtcgaccacacttcgataagcgccgctctccttcccccaagctgggcaccgccccaccgcgcggcgcacaaaaggctgggggtctgaggaaagagctgccgccgcagtcgaccaccccccccgccctccacgtgactgcggcgcacgcgcaggtcgagccgccgacaaaagacttcgcgcgtgggcggggccagggacaaaaattccgcgcgcgaggggcggggcccaaggtagcgcgcccctgccggcgggcaacgccgcattgtccccgcgcgcccacggcgccccggccccgccccgcagggccccgcccttctgctacaacgtagcagccgcacttcctcccgcccctcccccgctacactgtaaccgcgcgcaaaaaaaaaaaatcccccttggcctcggaatttttattccttcgctacatttctaccccttgatttaaaggattctttctctcccattaagtcctgagggactcattaaagaaaaccacacacccccattttctcgacatatctgttcacgccctaaaaaagtctctcttaggggccatgaaagcaagtaaaattaatcccgttcttattctccttccacccaggaacaaatacaggaccggccctctggggtcgcgggcgcgttggggtccctggtcttttgtgaaaggtagcgcccagcgcagcccaccctggcgcatcgccccccacccttgcgctggagctctctgcagccgcccgatggcctcaccccttcccgctccggtttggccctaagtaccccgcaggggggttgggcgggatgcacatgggcaaaacctcgccccgctttgtctgcgaccgtttccgcatctctctccctgcccggttctcggaccgttagaagcccttttaagtaacatcttataagtcctcggtcttcccgcccccaaacccgaagagcccttttactagtttctccaaaatgtgcctgccaagaaaaatgattcccagctttccaaaggcaaatgctagctacaattgttatatatataaatgtaacaaacttgagaggggcaaatcttgattaaggatagcgggtgcaaatgccccacaaccattttttcataacttacctggatttttccttgtaaaaagaaataaaagaggtgtaaaattcttaccttggcaccgatctggttgccacactgaccagcctggatgtgcacgatttccctcatggttaaaatttaatttttttgctcgcctcaaggtatgtatggggcaagaaaataagtaattttttttctccgcaggtcgcaggctggaaggttggaatgcgccccagaggctggagcagcgaggtgcaaacgcgacggcaggaaggttctgagagggagaaaggagaggggagggcgcggagggaaagcaggctgggcggggcgcgcgtgcgccggggctgggaggcgggagaatcggccccgcgcgcggtagggagacaaagcctcatcgagcctggccctgattagtcgatgccggtcatgtaccaggcgtccattggcctctgagccagtggacgagcgcagtcctctttgggagttgtagtcccctattgttgtccatgctgcaaaatgaagtgacgaatgggtgggtaccggtttggttttcatggggtttttgttttgtaaatgaaaaacgaccttgcgcaagattcctttcctctatgcctgaggtttttgtacaaaaagtgagcagttcttgggggtacaggaattgagaagtctggggttccagaagttgggtggtggggaagacacgccctgaaagctcccagctgcagtacctctaggggagaaaggattgcttagttcagcgaaaaatggggagaagtctggcaccgtgctctgcctcccctggcctttggtgacccaaggcatgaacttcagtaagcttctgctccctcaaatacttcaagaagggaatcgccctcttgctatttccttggaaattttcgagccattgttttgaaagagaaacaaaattgcagcaagggcttttcaggatagcgatgttgtctggagagtatgttcaaagaataaaatagtttagagaaaccgacatcggggatttgtgaaactagaagtctcctacgtgggtaggagatctggaccttagggcagactttgaagacaccttggt

SEQ ID NO: 585997 - DNA, 4001 bp, Homo sapiens
agtgctgggattacaagggtgagccaccgcgcccagcttcttctaatttttaagacagggtcttcctgttgcccagcctgcagtgcagtggtgcaatcacggatgactacagcgtggaactcccaggctcaaccgatcctcccatctcagcctctcgagtagctgggaccacagacgcgcgccaccacgcccagctaattttttacttttattttttgtagaaacgtggcatgggggagggtctcgctttgttgcccaggatggtctcgaacccctgacctggagggatcccaattcgcccacctcggccccacatctcccattttaattccacaagcgctcaggccgttgttctagggcatggcatcccgtgggcctgccacacccttcccctagacactcgctcccccgagaaagccacagctttccctgctctggatatgtgcagcgggtcccaagtgctcggtgggcggatggaggtcgaccacacttcgataagcgccgctctccttcccccaagctgggcaccgccccaccgcgcggcgcacaaaaggctgggggtctgaggaaagagctgccgccgcagtcgaccaccccccccgccctccacgtgactgcggcgcacgcgcaggtcgagccgccgacaaaagacttcgcgcgtgggcggggccagggacaaaaattccgcgcgcgaggggcggggcccaaggtagcgcgcccctgccggcgggcaacgccgcattgtccccgcgcgcccacggcgccccggccccgccccgcagggccccgcccttctgctacaacgtagcagccgcacttcctcccgcccctcccccgctacactgtaaccgcgcgcaaaaaaaaaaaatcccccttggcctcggaatttttattccttcgctacatttctaccccttgatttaaaggattctttctctcccattaagtcctgagggactcattaaagaaaaccacacacccccattttctcgacatatctgttcacgccctaaaaaagtctctcttaggggccatgaaagcaagtaaaattaatcccgttcttattctccttccacccaggaacaaatacaggaccggccctctggggtcgcgggcgcgttggggtccctggtcttttgtgaaaggtagcgcccagcgcagcccaccctggcgcatcgccccccacccttgcgctggagctctctgcagccgcccgatggcctcaccccttcccgctccggtttggccctaagtaccccgcaggggggttgggcgggatgcacatgggcaaaacctcgccccgctttgtctgcgaccgtttccgcatctctctccctgcccggttctcggaccgttagaagcccttttaagtaacatcttataagtcctcggtcttcccgcccccaaacccgaagagcccttttactagtttctccaaaatgtgcctgccaagaaaaatgattcccagctttccaaaggcaaatgctagctacaattgttatatatataaatgtaacaaacttgagaggggcaaatcttgattaaggatagcgggtgcaaatgccccacaaccattttttcataacttacctggatttttccttgtaaaaagaaataaaagaggtgtaaaattcttaccttggcaccgatctggttgccacactgaccagcctggatgtgcacgatttccctcatggttaaaatttaatttttttgctcgcctcaaggtatgtatggggcaagaaaataagtaattttttttctccgcaggtcgcaggctggaaggttggaatgcgccccagaggctggagcagcgaggtgcaaacgcgacggcaggaaggttctgagagggagaaaggagaggggagggcgcggagggaaagcaggctgggcggggcgcgcgtgcgccggggctgggaggcgggagaatcggccccgcgcgcggtagggagacaaagcctcatcgagcctggccctgattagtcgatgccggtcatgtaccaggcgtccattggcctctgagccagtggacgagcgcagtcctctttgggagttgtagtcccctattgttgtccatgctgcaaaatgaagtgacgaatgggtgggtaccggtttggttttcatggggtttttgttttgtaaatgaaaaacgaccttgcgcaagattcctttcctctatgcctgaggtttttgtacaaaaagtgagcagttcttgggggtacaggaattgagaagtctggggttccagaagttgggtggtggggaagacacgccctgaaagctcccagctgcagtacctctaggggagaaaggattgcttagttcagcgaaaaatggggagaagtctggcaccgtgctctgcctcccctggcctttggtgacccaaggcatgaacttcagtaagcttctgctccctcaaatacttcaagaagggaatcgccctcttgctatttccttggaaattttcgagccattgttttgaaagagaaacaaaattgcagcaagggcttttcaggatagcgatgttgtctggagagtatgttcaaagaataaaatagtttagagaaaccgacatcggggatttgtgaaactagaagtctcctacgtgggtaggagatctggaccttagggcagactttgaagacaccttggtcttcttgtcaaacagggaactatggaatgagatgcctgatagattttcagttttttcagcctgcctctttagacatgttaatgaagtcagtggtttttcaattcgctgatttcactgaccaggtggccgccactgcaactctgcaagagacccagtattgaaaaacgagagaggggtaattgatgggggaaaaattgagtgggttcaagacggagtccatctgcttcttcccatagatttattattcacttatttgatagttactatgtatccaccaaattaggagctatggttacaaaatgattaagaattagctccctgtcctccaggatgttgcagtctggtgagaagcatacaatcaataaaatgtggtaaccactcagaaatgtagtatcaagtcaacgtcattgttaattcacattcgatcacacagatcaatgtatttcttttttttttttttgtatttttagtagagacagggtttcactgtgttagccaggatggtctcgatctcctcacctcgtgattcgcccgcctttgcctcccaaagtgctgggattacaggcgtgagccaccgcgctgggcagatcaatgtatttctaagttgccttctaaatgagggaacatcaacttgtgtaagccctctctacccacttaaaatataatgctttacgttttagggaaatgaacacagtcattttgtgggagtagaaataactcaaaatacacaatcagataacttgtttcaatttgtctctatattagctgtaggatcctaggaaagtcctttaactttgcagggctccagctcctcgtttgtaaaatctgcttatttgactgttgtgcacagaattgagataaccaacagaaaggactttatgaattatgcaagtgttatagttaccattttcttcatgtcttattgtgagataaaataggccgggcgcagtggcttacgcctgtaatcccagcacattgggaggcccaggcgggagaatcacctgaggtccggagtttgagaccagactgaccaacatggagaaaccccgtctctactaaaaatacaaaattagccgggcgtggtagcgcatgcctgtaatcccagctactcgggaggctgagacaggagaattgcttgaacccagaaggcggaggttgcggtgagtcgagatcgcgccattgcactccagcctaggcaacaagagcgaaagtccgtctcaaaaaataaaatatagatggccgcatgcggtggtttacgcctgtaatcccaccactttgagaggccgaggcgggcggatcacctgaggtcagaagttcgagaccagcctgaccaacatggagaaaccac

SEQ ID NO: 585998 - DNA, 4001 bp, Homo sapiens
aagaactgtgctttgcagggctgttaggaagaaggtgtgtcatttggccagttcccagtgatcatgactacataccgaacacgaagttgtctggtctgaagatctggccgaagggtccagacctgacagagtccatggtgccaggctccagatccaccaggatggcccgaggtacatatttgttacctgcaggaaataagaactgactcaggcctgtgcttggggagggactcacagcagcattcaattccagcatctgagacaaaaggagaacaggagattttctgcttttaagaaaaaggaggtcctgagtgtgcttagccgtggcaaacaggcaggaatcttaggaaaccataaaacatgtttttccagcagttggcatttgaaatgaatatgcaagaagcatgcctttgtcacgtgcatgttcctgggacgtttcatctcccacatcatggaaagcaaggattcctgggcacacacatcccgctactcaccagcagcctcattgtagtacacgttgattctctccagctgcaagtcactgtctccatggtaactgcctgtggggtcgatcccatgctcatcgctgatgacctcccaaaactgaaatgaaaaaagaaccacaccatggctctgcatcctgaatgtcactaaggatggccttgtcctcctcccatgtccttggaacaggggcttttgtggtcagacagttagtaagtgctagacagagagcaaagagctgcaccccctatttcctgcagcagccgctgctgaggggcttgaaaatccgcagagcatcggccatattatggggatagactgaaaggctgggaggggccctggaggaggaggggacacagcagatgcccttctagggagagggtggggagagtagagaagtggagaaggggtacagggaggctgtgtcaccccaggcagggctgaatgccattgcatccgggatgattgatgggtcgtggcaggccaaggacagggggacccactctgtggctgcctccagggatcaagctctcttggcacagatcccaggcactcctgcaacagtgcaggtttaagccaccgatctacatgctggcactgaccaccggagggactgggcgaagggcagcaggagcctgggagggcacctgggcggcagtggaaggagctggccatcgtgagggcgctggctgcattgtgaatttgcggcggggaggctgggtgggcaacatggcggttctcaaagagaccacgtccttgtactggcgcccgcccccacccatgcaccagacccgctgctgcctcccacacagcggtcggtaattgcagcccccacccagcgcagtcacctgccgcctcggggactggcagcaagactatcgcgttgtatgtcatcatgtcaagacagtgcccgagcaagggaatttatctaacacccttgcctgtacgacccaaagggacgcctctgttacatctgccagtccagtgacactgcatgttttcattcaaaccgtagagaaaaatatacaaattaaattcacatgaagctagcgcaataaatatgaccgtacccccgacccaagtttctgagacaaatacacccaggggaatgccaaccgcgtcccgcagaagggctgtgtcccagggaaatcgaaaggcccccgattaaacgcacacacagctgcggcgctgcgggcatcctggcgggtcatgcagcctcccggaccccgcccggcggcctcgccgcggaatgtgccacccggccagcccggggccgccgcggcctccagcccccgccccggccccagcccgcaccctcggtcccaaccccgggcccctccgtggcggtgagcccaccttggcgccgatctggttgccgcactggcccgcctggatgtgcacgatctcgcgcatggtgccggctgcggagcgggtggcgctggccctcggagcggtgcgcggcgtggaccggcgggctgggctgcgcagagacctgccgccgcccccccagctcggtcttttatacccggggacccgccctgcccggtgacgtcatgacgggcggggctgtggccgcgggggcggtgcggctgggactgcggcaccgcgagggggagccggggcgcggtgcgaggtgtgggggcgctcgccctattgctgctgccgctgggtctagggtgggcggccggcctcgcggtccggcggtgagtgcggtgcccgggcctcgggcccagccgcagccccctgcccgatccacgggcacgggcgacccctggcgctgggtcctccgctcacgccgcgatccccaccccgagccgcccactctggacccccgaggggggctggggaccgggggccccggaaccagggggaggggctgcctcggaacagggtcctcgcctcctaaggacgggaagaggcgtcgagtaccctttggagtagggggccggaaattgaagacccatttgcagtgggctctccagcgggtggcaaaggtttcccgcatcctgggcagggtcctggacgccgtttgtgggggtggggtgggcagcgtggagaggagtggggggccgcggggagccgacgggcagctgcctgaaaggaatgccaggatggcggggtgggcggcctttcgcccctgcaggggaggaagatggcttggtcgggggcgggggttgggggggctatcaaagggctggatttgtcacatgtccgctttgggctcctgcgtccttgtaaaggccttttaaatgtggaaaattctgcgggtgtgtgtgtgtgtgtgtgtgtgtgtgtgtgtgtgtgtcagagaggaaagacaggaggaatatatctgccacgttgatgtgtcagctgatggccctgccccttacaccccttaggtcgcctgatcctcacagaagctgtcggagctaggctggccagttcggtagaccctaggcacggtggctgccgagcattgaaacgtaggtaatctgaactgagatgggctgttaagtgtgaagaacacactggcttttatgggctcagtaagttaaaataatgtgaaatatttcattactgattcttaaatattgatggtctatcaaaataatagtgttttggatacattgtgttaaatgacttgttttgaaattagaaaatgtaaaattacatacttggtttccatttgctgctcacttacgcatatttttgttgactaccaccggcttctggtaagcattattactaccccaatttcatagctccgaaagcgaggttgaaagacctgaccagccacaaagctaggaagggaaggaatctaaagcctttgtataaataaaaagcccaggtgagttttaaaggcttgggtgggctgtggtaaggacctgacttaattattcacaaagatggccctgcacggtggactaggtaacaggggcttggggactgcctttggttcccagcacattccaactatataatgatgataattacaggtgccttggagctggctttgtggtaggagatgagaagccatatatgaaagcacattgagtttatggagtaaaaatgccttggtaaaacccaaggtgatgggctgggcgcggtggctcacgcctgtaatcccagcactttgggaggcttaggcgggtggatcacgaggtcaggagatcgagaccatcctggctaacacggtgaaaccccgtctctactaaaaatacaaaaaaattagccgagcctggtggcaggcatctatagtcccagctactcgggaggctgaggcaggagaatggcgtgaacccgggaggcggagcttgcagtgagccgagatggcgccactgcactccagcccaggcgacagagccagactgcgtctcaataaaaaacaacaacaaaaaacccaagatgatgctgtcattcctaatgtgcaccctacctgccacctcaatagttggtctgtatcggaggtggaaactaaagccagatgtctgtgagtagcctcttaggccaagttaggt

SEQ ID NO: 585999 - DNA, 4001 bp, Homo sapiens
atccaggaccgagtcgaccagctcggctccctctgtgtagtggcccttggcccagttattcccggctccactctggcctgccagagggaaagagaaatcttaagtcaccggtgattgtactaaataccttacctcaaacccctcaatatagatcagtgagtcaatgctcagataagactatttcagattatcaccaaaatggccaaacgttaaaatatttgttcatgaatataattataaataaggaaggccaggacaccaagctcttagcagctgaaaggcaaacaattttacactatattaaagctaagttggcacaccgcggatgttcttcatgctttccctctggcaatcacacctcttcagcctccactgcccagcgtaaaatgaatccctcatgctctcagccacaccaggcactcaccaaacacgaaattgtctggtctgaagatctggccgaatggtccagacctaaccgaatccatcgtgcctggctccagatccacgaggatggcccgaggaacatatttgttacctgcaaggaacaacagtgacttagaccctcaggcaaggacctctgcagagaagggcttggcgcctgctgccatcatgcagatgttgccccaaacaaagggagacccaccatcaggttctcaaagggctctgttggcataaggaagcccaatgaaatactgcagggaaagagcggggatcctaaactgaatagtccaccctctcccagggccacacccctggggtcccacgcaagggaaaggggagaaggtggaaaaactgaagggagtgggggtggggcaagggtgattaccagtggcttcattgtagtaaacattgattctctccagctgcaaatcactgtctccatggtaactgccagtggggtcaatcccatgctcatcactgatgacctcccaaaactgagacagaaaggctgcatttagccatgaacgatgcccccagaaacgccaaggctcacaatgaaatgtccccgactcagttccgacaacccaacatttcaggagcttgaagctttaaagggcgtcgtgacccgggcacagccgcggggcttgtattttgcaggttcagaaagttgaaactgggcgtttcccaggcaaacagctgccgctcgcggggggaggtaggggtcgagggggtaaggaccagccaaagccgggcagtggcggagcttggcgcactggtcgcagccccaggctgcggcaggaggcgagggcacagggactgcagcccgccaggagcgggtgggcggggaaagaggaacgcaaaggagctaaaggaccgcggttttagattcaaagcacgtcctgagaccgcaagacaatcgctctcctcccctcccccggcagctcgactccggttcaagcgagtacaattaatcctcctggtgtcccagcccctcgcgcggagcgccgcgcacagcctcgcggacacaccctcgtcttctccaggcacgcgtgcctgccaagcagccagcgcggagggaggccgagggggtgacggggactccaaatgagttacagcagaaagaaagagaggtgccccctccgtccgcgaaagtcacctcctagcccaggccacactcggcggcacaaagcggccaggaaggtctgcatttggcgatccccaggccttcccaggaccgcgcctggggaccccgaggggctctcggcccaggttcgcgcccccattggaccccctccgctgcggcgcgcccaccttggcgccgatctggttgccgcactggcccgcctggatgtgcacgatctcacgcatggtgcctcgtcagcgtcctcctggtccggcggcgtctgggtctgtccgtcctcccctcacacacccactgcggggtcaccgggaaggcgctcgggaaccgacgggctgagagcgccggccccgcgggctccggcttttatgcaaggagggtggggcggccggcacaggccgcgcccccagcccgagccccccagtccccttcgcgctggcgctctccaggcccggctgacgtaatgctccgagccctagggaccgtccggggggctggaccaccggcccgcggccaatcagagcgggcgtgccgaccgggagaggggtgggggctaccgggagtatggtgggggcgtgcgcattgtctggggctgtggtgggggtctgggtatggggatatgggggaacagtgaagaaaaggagggtgagagggcggcgaggcgagggccaccagcgcgtcctgaccggggtgggggcagagctggcaccggatgggaacgatggaggactggagcatgtggagaagccgtcaggtgctccagtgccggcaggtgggagggctgaggtggcacaggctgctccgccacctcggactgcggctcctactcggccactggccagagtccctccagccaactgcccctggtgagaccaccgtctttttcctcaaccctggaggccagcgactgcccaggcggcgctccgtctcacagaggcctgggggaggacaggtggccccagaaggaagtcgtgcttgatggcaaccgggacacctgcggcccatgaacaccagcgcggcctccgcccccgccccagcgtgggcctgctttctcctttgtctgtcttgggctggtagctcctctcactgcgccgcagcatctaggggtgaagcgacctcggagcccctcagccctgcccgaccctctccgggagtgcataacgcccctgctggtacccaggagccctctgccccgggggttgacttttgttgctcgctagtgatggagtgggagtggccggtggcgctgcactgaccgtccggagggcagaaagagggtggggtcccgggggcggggctgtcggcggaacaaagggctctcagaaacgtgggatacgctgtgtaacccagtatttaaaaccacacgacaggcgccccacccccccaccccgccctcggattcagttcatctattgtcaagtaagagggtgggttccaagggtggcccaagcccgagtaacaaactttcttatcttccatcgcggcgacctggaggtccgaggcttcgtgctgcggttgaagggtggggaatacgactaaaaactgcagcccagcgcgcgcgagacgacccaagacccacgcgcactcgcacgagcgcgtgcacagacttggagcacagaccctcccttcagatccgcagtctctaggtactgaggcaggaactggtctctttgttacttttcgcgcgcgcgtgtgtgtgtgtgtgtgtgagagagagagagaaagagagagagagagagactaatcctgcgtgcgtttgagggcgggaggggaaagggtgtcagaaacgttcactgcacaacctgttccctgcaattcgatgactgaagcgcgccgccccacacttcggaagggccgttggcgaggtgacgtgacctctttcatcccctggcgagaaaggccgaatgacccgggcgcacgcggcggagctcagcctgcagctgttgagcgagaccctcccagaactatcagcaagctgtcatcgcctccctttcccgctgtggggtggagggtggggggttcaagtcgattccaatgtacaaagagaagtagcgagaacaaaagcccaggcgcccccaaacatccagggcgcccagactggagctcgccggccggtattccagacccggccggcgtgcccgggtgagggtggggtctaccgagaggcagagagcagcggagggtctgtccacatgccctgctctcccggtaccaaggtctcggggcctgacctccgagtttctaatccagatcctgcagatgccgaaacgtcgagggctagcaattcccaaggtcatacagcaagttgaggacagggctcggactggaatctcgtcttttgggcacaccagacctcagggaaagtgaccgcatctcggccaaaagggctgtggcaggtgtcagcctcgaggtggcggctctg

SEQ ID NO: 586000 - DNA, 4001 bp, Homo sapiens
tgagtctcctaagagaatttagaggtgaggatattgtgggctacaaataagagggaatctatagtctatatgacagatatctccataaaataaatataaatgataccagccattaaagtaactaacttcctttggtctgattccatggtcaccaagcaaccttcagattattacacagcttttcagttagatttcctacaaaagataaagtaatgtgcctatgaaaatgagaatttggtctttggttaacctggctgtactggagagcactgaacccatctcgagatgccaatgacacttctgagtttgcaagccagtgccctagatagactctggaattcacccaggaagcgcggactaatcagctttctctgaagataactgctcacacacccagccaactattttaaactagaactgatgttcctattggattaaagcctgacacgaagtatgtatttttcagtttaagcacaggacagttagttttatgaagtattttgaaaatgcatgaacttaatgatttaatattaaaagcttatggagatatcctaaacggcaacttaaattactcttccagataaaacatatatggtacttacatatactctttattaaataaacaaaaacaatccaacaactgcttgtcacctttttaagtatatttttatacttacagcatatatgtaaacaatatatttttctttcaaaagttagttattacaggatgcattaacaagatgccctctgggaaaatttcagctttcttttaatgaaacttatttcaaggttaagttaaaagaagtcacactaaagggaaatctgttgtcttcttcgggaaaatgatataagaatattaataatctaatagaataaatatgctttcaataatgaaacaaaaaaacacaacttcgcagctggctatttttattgtcctttgaagaattctctcccaagctactgaaacttaaagtatcacactgtgacagactttaatcccatcttacctggtgtccacatttctaaagaagctgcttattgcctcatcataaattcctttctaaaaagaaaaacatatgttaatagcatttaggttttgcttctcgcccaaatcaagttctttcaattttaattacataatactgtaatggctaggatgagactctgataagaaaaaccaagtatcacaaaatgcggagcctgactcttcccaatctccttagaagagtaaatgccagatctacagataaaaagttcagcagggggtgctaaagaaaggatttcacccataggactgtaggacaggtccatcaaatgagcgttctctggattcttcgtaatctttttaaaagctgactggttaaattaaggaatacaataaccacacgtgttatctattttacaaagtactttcccatatacaaatctcactgttctgcacacgaacaccaataaagaggagaccctgagaatcaggaaaaacgttaagactaaggtcgctggccagtgttcttttagtttagtgtgtgtctgacgcaacatgtttaaaaaccagtacgttctttactgggaagatcccatgcatcttaaacgggtcagatgaaagctcaagtcgattatttcctgcgtatgggctggaagacctagctgacaggcgagggggctcgcggcggcgggcgggtacctggttgaccgcggcgtgctcccttagtgccaggtcccagaagcagcagccgatctggtttccgcactggccgactgcgaccggaggagaggaaggaaagagaataggacattaagcaggaaacatggccgctggattccgcggcgaccaggtctctacccgcccggcgtagcttaccctgtacgaccaccgactgggtcatggtggtgcgccgccggctccgggagcttgctagcccgcggccgcttctgcattcccccagcaacggcgctctgctagagagctgccgtaagtcacgctactgccgcaagcctctgccgtcgctaagcacgtctgtaggttcaggctaaggttttccgtcagaaggccgcgcaagtgcacttgcgtgtcaccgttaccgtagcgactgggcttctggactgtatatcctagctgccttgtcaacatcttcgagcatcggcagctccggaggccggggtaactggcaggtaactaggctttggagtggtattttaaaatatgtgtcgttaagctgttcgtgggctatcagaggtttaatttttgttcacagcctcaacacccggggcggtggatcagtccgtttattcagattccacgggacgctgcgttggcatctctgttcaacaagccctttattctaatagaaaatgaacaatggcgttgagcaaagagaaaccccagagaaatagtcatgtcagggcacaattgaaactagatggttatacgctttgacaaaaatggcaaagctaaggtcacagacccaaccagtatttgttgaacgctgtatactccccaaattaacttgtaggctcgctgggaagattagaaagaaattaaggcatagatccagttccaagaagcttacaatctaattgaagacatacacgcgaaatacttaaagaattgtgtggcgttgactataagtgcaataggattcagtggttgaggatgtagatgagtatgtagaagtctgatagaagacacgagattaacactaggcatttagatgggtatttagatgggataggcaggagaagattaaaaagttaggcattatgacaattaccaactacttaaaattgtcaaacattaaaatatgtaaacttctattgatcaaattagaccagattttaattaagaactcaagtacttctttaatgaaattaatattttccacaaaaattctgaagaactacgaaactctaagaagtcttctttgtttaataaaaagttatatggtatgtgctatgaatatgtgctaatatgaactgtaatattcaatggattagaacactttattgtcccaccaagacacgtagtagttactattaaatttctctggtagccggtaggtttaaagttgcaatggattttatatcttttggtaataggcagctttcggtcagtaaatttttgtaggctggatttattcttaacttcttactgagtatggggtcagtggtagaggtaaagttgggcattttaggtcttgatgctaaagtcccaacgtctggggcttccaaaatttgcaagtcttggtccagtttgtaggcagtgatgtgaataggtctgtatcagtgtgttatcagtgctaggtgagatgatacactggcctttgcagagccctacccttcatgcagtcccagtcattattccccacacaggaaagaaaagtcctaacacatcttattaataacttcagtctctagagaatcagactgagagacagttctgcttaagagccaagcaaggtagagcctcacatgccagccactccaaaacttccgtatatgcaaacccgggtgagccaagttgagatcggttgaaccgcagcgggctattcagaatattataagcaagagaaatgtttttggttgaaattactgaaattttggggtgcagttttattgtagtgatagctgaccaacatacagagcaaatagagtgaacagaattccacatgctgaaaatgaaaaagaaaaaaattattgggaatcctatggactcctaaaattgaaggaaggaagacaaggatggaagggagagagggagggaagggggagaggaaggaaggaacgatgtaaaagatggataaagtacaagaccttggggtaaaacctagcctaagaggggagaaaagaaaattcatcatatctactttgtgctgaagaagaacttaagaatatgaatgcaataaaacaggaacttaaagacaagatactaaaataataagactcaagctctatgagggctgagtcttgttgttttatccactactagggatagtaccttgcat

SEQ ID NO: 586001 - DNA, 4001 bp, Homo sapiens
cggagctcttctctctcaggggcttcttgggaggcagaaggattttctctttcttttcctctgcctcctcttcctcgtcctcctcgtcctcctcttcctcctcctcctctgcaggtagaaactcttcataatgggggtttgagccgggccctccttatctggggagcccagttcctccagactgctgggaagtggtgcatgggcaccagaaggggagcctgcccttctgaaacaagaaccggagacctggcaccttcccagaagaatgagggtgactggcagccttcagggtctgcaaatcaggggagtggctggggttggaggaatcctgtcctggggaaatgccctccctctctcctcctgagaccctcctctccttacacgctcgccttgcctcctttccccatctccctgcatccactgtgcttctccctgaccttgtctgtttctgaccttgagtcagacccatctgggctacttctggctcctaactgctggttaaggcaaaaacccttaacggctctatgactcagtttctccatctgtacaatggtggagggggggaacaaagcaccctctcatagttggtgcttagcacaatacctggctcaaagataaggccagaaaagtgggggctatttgactacagttgttttctgcctctctgggccgttcccgtccagccagccccttctctccttagctccaccgccccctcacccgcgtccctggggccctctctcaccgtcctccgcgtctggggcacgggctaccagaaaggtttcccgggggtcgcgcttcttggcctcggggtccctgaggaacctggcgtagaccgtctgcggcgcccgggcctgggctgggtctggggaaggctcctcccgcggcctccccgtccgcccagctgagccgagatgcggggttcagacagggtcccatccgcgggtccgcgaggcagcgcctctacccgctacccccaagcctgggcgcaccccctcgggctcctcaccctagggatctcccctgggcttgggtttccactttcaacacttctccccggcttccattcagcttcccacccccttctaccccaacgccacccccttctacaccaaccccaaccccaaccccaaccccaatccctcccctctcatcactccccgccccctcctcccccaccccgttccagggctcggcgacacccgcgccggccctcaagcccctcccttccgcagcccacaccctgggggtccacccgggctctgcaccccgcccacctccgggcttccggggcttggatcccgtggggcagggggattcgggggcctccgtcctcttcttccttagcctctgtgccggggcgggtcgctgcggaacgggggtcaagaggaggtcgaggaaggaaaggggggcgctgaggcccgcccatccccctctaatcccttgagccgccagaaataaccgcagattatccggggggaactgcagcccccttcttggagtgaggcaggatgaccccttccatgcatcgtggccatatccaatgctccaaagtccctattccttccctggaaaccccaagtccccaaacagccctttctccccccagatctccagacatgcaacccccagaccctgctaagggggacctgtcccacccctagaccccctaccctgcgtgggtttacgcacagcggggacatctttctgcttcctttccaagtggggtggcatacctgtttggggcgccgcggggcctccgggctcaggctttcttcttcatgcccactgagggtagcaaagggatcagcctgtctcccttccccttccctccccatcccacccactccccatccctccatctaggccccccagggttcaggtgccacgaactgggggccttccagacctgtcagaggcccacacctctcggagggtttcatcccgcagaggcatggtgcctttgcctatcgcacccctttctctgcaggtctaggagcctccctcccgactcctgctaatctcggctcaacttcaccccccttccccctgctcaaggagtggaggcctggccgcgctgtgggaggtgctacagcccacgaccctcccctgctaggcccaggccactgggggaagaatctcaactccagttcttctcagatccccagcagcctgcaggatggccaccagctccacctgccccgagaagcccccagaagcttggggtgagaggggccgattagtcatttgtcaatgggatgtggaagaaaacattagactggatcctgtatttatctttatttctcacaaaaaataagaactagagccaggtgcggtggtttacacctgtaatcccagcactttgggaggctgagacaggtggatcatttgaggtcaggagttcgaggccagcctggccggcacagtgaaacccagtctctactaaaaattcaaaaattagccgggtgcggtggctcacccctgtaatcccagcactttgggaggccgaggcagacggatcacaaggtcaggagatcgagactatcctggctaacatggtgaaacctcatctctactaaaaatgcaaaaattagccgggcatggcggcaggcacctgtagtcccagctactcaggaggctgaggcaggagaatggcgtgtacctgggaggcggagcttgcagtgagcggaaatcatgccactgcactcctgcctgggcaacagagtgagactccgtctcaaaataaataaataaataaataaaaaattagctgggcatcgtggtgggcacctgtagtcccagctactggggaggctgaggcaggagaagcacttgaacctgggaggcggaggttgcagtgagccgagatcttgccaatgcactccagcctggccaaaaagagcaagactacatctcagaaaaaaaaaaaaaaaaaagaatatgtctgtattggaggtatacccttaactctttttcttttttcactgataggggacatgcttttgtggtattgttttgttttgttttagacagaattttgctcttgtcacccaggctggagtgcagtggcacgatcctggctaattacagtaaatccatatcaaatggaactttctaaaatactatttcttcggttgccacctttgttcaaaaacattcattggctccctactgcctaaggattaagtttaaatgtgttgggttgacattcaaggctctccctgatctggccccagtctgcctttctaaccacagggttatcccaagccatactcttcatccagccacagaggtttccttactgcctttacagttctgtcctccatgcctttgctcaggctgttccctcccggaacgccctccctattccatgaaacctatccaactctaaacagtcctcaagtcgccacttcggagaggcctcagtcctcagttggctctgaccatataataataatagcatttattgtccacctactgtggcttgctcccattctgactccaccctcacaataatatttatgagacagacattaacaccctgatattagggcaaggagcagtggcttatgcctgtaatcccagcactttgggaggatcacttgagcccaggagctcaagaccaggctgagcaacatagtgagactttgtctctacaaaaaatttaaaaattagctgagcaatgtggtacatgcctgaggtcccagctacttgggaggctgaggcaggaggatgacttgagcccaggaggcagaggctgcagtgagctaagacagtgccacagcactccagcctgggcaatggagtgagaccctgtctcaaaaacaaaaccaaacaaccaaacaaccaaacgaaaacaccctgatattaaaggtgaggaaactgacagctgagtgtcagtcaacaagtatttcctgagcacctattgtgtgccaagcgctatgctaaataatggtcatacagagatgaacaacatgatgtggtccccgccctcgtgcagc

SEQ ID NO: 586002 - DNA, 4001 bp, Homo sapiens
caggggtgggggtaactctttgccatgtagacttggagcacgaaaagttggttaggatcatctaatttaaccccccaccctggttagaaagcgccctggcctccctactgctgggcgtcttcccactgcccggaccctctaagagagacagtgcagggagaggacagcaggggtgccagggacaactgacccacctggggaggcgcagcctactgtgaactatgtccatcttagcatcttttctgccagagaataagagacagaactcacagcatgggaagtctcactaggcagcaagtctatgaaactgaaatgaaggaagtttcaagtccacaaggggctcaaaaacaccactggaagtgaccaaaaagtgaaacaaaaccacagctcacctcgctattgtggccccggaggttgaaatttatcctctgtggagtactcctgtccctgcgacagtgactagaggtgaaagtcaccccaaccactcctcgcccgttgcccgtggccagccagccttcctcatagtagcgtctcctgcacacaggcttctccttctcactcttggggacacgccccttccaggacaggcacaggatgttggaatcgctgcaaagcacaggcccatgttccactgctgcatacatactttcttcaatgaactgttttacttaaaaagtaatgttaatgctgtgaaatttaaaccaatttctttcattggtatatgtgtttttgtggttggcttgcgttgcttttttccccctttaattaagactgacctgaatctaattagaaggtcagtattttataaagatccaccgaatgcatagtgaaaaaattcctctataaaagatgatggcagtcttctaagaaaaggtaatgcttaaaaaaacatggggtccatttgtattttcaagttctcagaggaagaacgtgctgatcctttggagaaagagcatcgttaattaagtggtgatcaagaaacggttttcttctttttactccacttggttattctcattcagcctgagattccagtttagtgtaatatgattccagagacaaagggttgcaaatacatagatttcaagtaacttaaggctttaagaatccctctagctcgaatttttctcttcaaaagttcggatgcagagacagaatacacaggatcatcttccttctgaagccaccctctagcatgtttcctgaactagacaaatttctgctgctaaagctgaaaaagattgcataaagggaaaaaaaggcacacaaaccgtgcaaaacagaccagagtttgtgcagacaagagtccaaattttaggaagaaaaacagactctctccttgttgtttcagaaccagaaactttccacctcaaagcttggccctgtgtccccggggaacgcagggctccatcggactgctcctccaccagccggcgcacccctcagtgccatagaggctagaaagaaggccccttcactcaagaggcagaatgttccagcgctcttacagtggtcccagtgtttgccctgggtgagtcttaaatcctcttgctgacaaaacagagccacgtggcaagattttgtttcttttgctcgtctcccttctcgctcccccagttagcactccccttttctgctcctaaagatctttttccatcttgatgaaaaaagctaatcttagaattaagtccatcaggtaatcttctcatacgcaagtcttcttggacttgacagggaagttaatcccttaaaacaaaagcagaagccagagtcagattcccccagctgtctccctagagagtgatagtgttttgctgatgggtgctttcctgttcacattcagagactgtctccaaacaccacaccactagtccaacaaaaagaaagctttgcttggattttccttgatatttatttaataattattggtttcaattgctattttacaatattatcctatagatgcaggaaaaaagggggggaataataaattaaaatttctcaaatacagttaattaagataggcaaaggaatcagttcattattcaaacttgtcccatcatacttgaacttgctttcctctagccataaccacagtaggagttacttttcagtctagaattttaatccgtccaaatcaccaaacccactgaaaaataaagtgcaacaaacactgtgtgagccgctgcaatgtttgaaatcacacttctttctcagtcaccttctcacttagttccttctttaaactggagaatatttttgtggtttaatctgcgcaaatttttttttcttctttttgcagactttctttacccgtgcagaccatatggaaaactggccattagtgatgtatttttctccccgggctcctgagcccactggtgtcaagttgctccatctgattcttaaattaattttcatcagttgtaaaactctcaagtgtgcacaagaatgagcctgtcttcccgtgtgaatgtgtaagtacagaaagaaggttttaaatgcacatagacacacactcttcaactgccatacgaagcgtctgcttccccagtcatttcaggaaccatcagattattcacggctgggaggccctggagtcttacaaatctgtttaaaaaaaaaaaaagatataaaatttaaaaactttaaaacactggaaaataaaggttttaagaataattgctgaaactgaaatgagagacccatctttacacttacatcaaatggagctactgactgcactgaatggtaaaatccaatagtgaaaggatacacctcaccagactcaagacaacacacaacaaatgagagttctgcctgccactgatcgttgtattcaatttgtcagcagctgggcacatctgaatgaaatcataactgccattcttccacactgaactgtactttctaagagactgaactccgaatgtgagactctacccctccagagaccatggtcgctgtttaagcaggcatcctcaaaaaggagactgaaatgactcaggcaagttatctggattgattttttcacgattaataaaagatattccctcaagacacaaagcagtaagggcctttaaaactcattcgtccctgatggctggcaggtctcggagcaaagcgcagctgttttctaagcttttatgtggtctaccagcaataaagttctagagaatctgtctctagcaaatccattccatcttcttcctactgcctgaagtccaggctgcatcacatcctctacaaacacgagaacactctgtccctaacttactcatcctccctgccctcccgccccgccagtccttccagaaagcagagtggactttctcaaattcagcagactctctcagtctcctggggcagctgaagcggcccagccccatcccacaggaactggacactgaaagggaagggaagggcccaggtgttcgcatttctaataagctcccaagagatgctaatgctgctgggcagggaaccaggctttgagaactactggcctgtagcatcaagtcccagcaaaagactctactttcatcataatactaggacataatttgccttcttccgtgttcacatttgtacccatggtgcaaaatcaacagtgggtcaaactgcaagctctttaacactaatcaaggtagaggtaccaactgcaccagtagtcatagattaaaaaaaagaaagaaaaaaaaagccagcctcacttaagaacatctttgatacggcagtaaaaattattaattttattaaatatcagcccttgagtacatggtttttaatacccttgtgtcccaaaatagtaggtacacataaagtacttctgtggactactgaagcaccatggtagtcccaggaaaaagcatgtattatacagtttaagttgcaaaatgaactgcttgcttttttcatggaataccatgtgacatggtttgaatgtttggcccctccaaatctcatgctgaaacgtaacccccagtgttagaggtggggcc

SEQ ID NO: 586003 - DNA, 4001 bp, Homo sapiens
ataaataaatagacaaagtagtatggaaacacgggccaggtgctgtggctcatgtctgtaatcccagcactttaggaagccgaggcgggtggatccttgaggccaggagaccagcctggccaacatggtgaaaccctgtctctactaaaaatacaaaaattagccaggtgtggtggcgggcaccggtagtcccagctacttgggaggctgaggtatgagaattgcttgaacttgggaggcggaggctgtagtgagccaagatcgtgccactgcactccagcctgggtgacagagcaagacttcgtctcaaaaactaaacaaaacaaaagcatgatgatacttataacaacaattccttaaatttctataatactcttttattccaatatataaaccaattttttaaaagagaaaaacagattacaactttctcttctaagtcaggaagctctagaaaaacttaatgatttttaagaagtagcaatgtttcataaacaaggaggagaccaactcgagaaataattcagcaataataagggcccttaggaaagggtgagagatggtactgagtcagagattccagggtttctgactattaccacttctagagttgcaatagatttggtttaggcctttaagttatggtgcattttatttgtaaataatatttaacagtgatgctgctaaatagcagcataaaaatgtggcaagatcctcataattcacaggttttgctgttgtggtaacatgaaagtgaaaacaaaagcatactgttctacaactgcacagcttccttttcctgttctcagggcagtagatgtcaattgaatgctcagacaccaacaagaacagaaaattcaacacacagatgttgccactgacttgtgatgctcaccaaacactcataacttagaggaagtactttttttctttcactggtttgaattcaccaacttgattatcaaataatgcagcagtttcattattttcatcactgggatttcttttcctgacctcacttgttgattgcactcatctatatataacttaggcctcccctgaacacggagaaagacacacggcacctgctgtccagccagaagttattttaagctattctaaaatgagtcatgccgtttagcacttcatccttgaaaatcaagagaatcgtttttcagtcaaattgaaaacagtaaacatttagtggcttaaatccatacatgggttttaaagtcggggagactatcttaggatgaaataaaatctcaagtaaaatgaacttcaaaataattaatttaagataagctgtccataggagttttacttcggttagtctaaatgcaagtggctgtttgtatttgatttattcttcatgagatgccacaatcattgattttttaaattcttaattccatggctattctttaaactcctgttccacatttactttaaaacagaacagtcattataaagcccaggacaattcaattcccaaaagtagcctcaagacaagttaacaagagggaaaaaaacaaagtcagagaactttgttacttttcaatcatccattttatattatgtggcaaagaaattatttctaacttttatcttatataaactttattgccttattttcccctccccagggagagaacttttcacttgtgttggctattccagatgactatcacagacacatccctccctaagcaacacattttatttataaatacaacaatgaaaagttctccaacagttcactggcaatctcaaagttgcaagtttcgaacaccacaaaccgcaccctataccttctcacagggcttgggggagtgtttgtcatacttaccagaaggcaagaagctaagcaagaagagagaggagaggaaggaggcaggaaaaagcaagtcagagctgcagcaacagcaggagagggcgggctggctgtgttcttacaagggagagagaaacccaatacacacacacacacatacacacgtgcacgcacgcgcgcgcacacacacacacacacacacacgccacaggcactgatggaggcagcagtctggaggaggtgggggtagggaaaggaacatcatatgacacagcaaggggaaaatacacccaagcttccctagctgttgccaggggaaataccttagcagagagaagcagctggaagatctcattagactctccatgttttgtttgtcctttcggaaatttaaactctgagtatattacccccgttgcaaatgcagtctttcaccattgttgtcctttttgggtagagatcagtttttcttacttcttgggttatctccagtgtggtggaagattcatcttctttttcttcttcttcttgcactagcttaattagtgtcaggtttcttacaggaatcatggaaaaagaaaaacaatggcataagaacagggaggtggtggaaccattttaattctgatgtcattgtttggtttgtttgcaaagtttgaaataaacatgtagatggtgattttggagctgaactgagtataatcttcatgcacgtggtaattggtgtgaccttggagcacagtctttcccaggtaactcttcccatctcaaacaaaccctcagggaagcagtctgctttttcttccttagttggtggctttcccacattttgtaaatcctcaacatgctccttgatcctcctcagaaaaagaaattccttctgattcaccataaaatgcctgtctattaatttacatccatttgccttttatttttctttctggagcttgtgttcccatacttccaaagcagattcctccatcggtttctgctctggggacaggctaggcatagtggcatcccttgtgggaggcagaataatgccacccaaaagatctccacgtcctactccctggaacctgtgaatatgtttctttacatgacaaaagagactttgcagatgtgaggaaggatcctgaggtagggaggttatcttgaactactgggtgggttcaatgtaatcataagggtatttatttatttatttattgagacagagtctcgctctgtcactcaggctggagtgcagtggtgcaatctcagctcactgcaacctcccgggttcaagcgattctcctccctcagcctcccaagtagctgggattacaggcgcctgccaccacatccagctaatttttgtatttttagtagagacggggtttcgctgtgttggctaggctggtctcgaactcctgacctcatgatccgcccacctcggcctcccaaagtgctgggattataagcgtgagccattgcactcagcctcataagggtctttataaatgagggaggaaggcagtaggattggaggcagaaaaggagatttgatgacctcagcataggtcaggaagcttctagaagctgggaaaggcaaggaaacagattatactctagagcctccagagggatgcaatcctgcgacattgatcttagatcaaagaaattcgttttggatttccgacctccagaaatataaaatagcaaacttatgttatttttaagctgctaaatttgtgataagatgttatggcaacaaaaggaaatgaaaacatcccacccccagttttgtcctacttattctctgagtttaggggaggcataagttatatatagatgagtgcacccaacaagcagaagtcaggataaagaaattccagtgttgaagacaatgaagctgttcactatattatttgataattaagttagtgaattaaaattgatgaaagagaaaagcactttcttctaaattaatgaatacttggtgagtgccacaaattgggtggcattccatcctggattgtagcaaactgacccgatcacatctcttagtaaatataaacaagtcagtgcttttcaaatttaaataatgtatagactcacttaacagaataatttaaataatgtggaaattatttgaaggattatattattatttgaacctacatgt

SEQ ID NO: 586004 - DNA, 4001 bp, Homo sapiens
atcgagacaatcctggccaacatggtgaaaccccatctctactaaaaatacaaaaattagctgggcgtggtggcacgcacctgtagtcccagcttctcaggaggctgaggcaggagaatcgcttaaacccaggaggtggaggttgcagtaaatcaagattgcgctactgcactccagcctggcaacagagcaagactccatctcaaaaaaaaaaaaaaaaaaaaaaagtaacaacataaagctaattattctggaagcatccagctaaatgtctacaagccacatataatggaaaaggaatttacttaataccaagtgcccagatgtgccagttttctctcactcagcccaggactagctggtatttattgcaaagattctaaacttaaaattcctttggcactgtggggacttattacatctgcatgtcagtttttctttaaaaaaaaaaaaaaagtaaagaatgggatgcgatggctcatgcctgtaatctcagtactttgggaggccagggcagaagtactgattgaggccaggagtttgagaccagccccggcaacatagcgagaccctgtttctaccaactacaacaaaaacaacaacaacaaaataagctgggtgtgatgacctgcgcctgtagtcacagctacttcagaggctgaggcaggagaatcacttgagcccaggagttagaggctacagtgagctgcggctgcgtaccactggtttcaggctgggtaacagagcaagatcccatctctaaaataaataaataatgaagaaagaaaaaagaaaacccatcgacagatgtattccactgaaataggctccaattaagtagtacacttaattgaaatagttgctgagaatactcccgaacaaagagaaactgttaatactgcctgattgttttatgttacaaagtaatttctaaaccattggagttgtaaaaattcgagtcagttggttcttaggaatgtgaaacataatgtacttcatatacacattgttaataaacccacagtggccctaaaagttgatttaactccaaatgaactgaaacgcagtaatagcctgaatacaaggttaagagaaaaacgtttctcccagtttgaaaggtacaatttctgaactggccatttttcttagggtaccttttctctatgcctccctacatccctttcccaagtgagcctctactgagctctggggaagaataccaagttctgcaacaagaacctgcaggctattccaacctctcaaaggtcttgtgtcctaaaattatggctttctgctctggcctgtggtcacttcccttcctcggggcatcccggcactggcaggaaagctgtgcacatgcttgtgtgaatgacaggaagctcttccgtgggatgagtgccagggtagggtctctcaggtcagcagcgaggcccacaccaaagcctcgcccagagaaccaaagcaagagggaccatctgctcaacggaggggcttttccgatctcacacataacaagtgacctggacccgagagagcagcagggaggtgacaggacagcctggagttgaggaccagtgggctccgttcagagattacatccaccctgagctgcaggggggcggaggggttccagaattcgcactaccttggtcttcccggggtagctcagcaaccctcctctgcccggaccactccttcctatcccacaaaagacgcacaaagtgggaaaccacaccttcctgggttctatttttcagttaaagcctctggaaggggacgtgcccgcagtctgtcccagccgaccccggtggccgcggcagcagcaaggccgctctggtgagtgcacgtggcccacgggcaggccgcgcgtccggccggcacaggaagtttggggcgctgggcagggaccgcggggtgacatttggactcccggctgcccgaaagggcgacgaccccaccttcccctccctcggtgccgaggtgcaagaggcggttgaattcaggagcgcggcgcagggcgggcttttcccggctgtcccctaggggtccgccccctcctcccgcaccgccccggccgccgagcgccacgtcagccgccagtgcccggcccgctgagctcacgcctcccgacccggagccccaagccctcggtcccctgcagtccccggctcccggccccgagccgcggcgcccgcgccccccgctccccgccagccggagccccgaacccgcagggtccccgcgctcccggccccgcgcccccagtattacaccccgcacccctgagccccgagccccgcgcccgtagcacgcacgccgcagaccagagccgtcggcgtccacgtggccccgggaccccccgcccgcggcgcccaagcgccccacgccccgcgaagcgccaagtgcggggcagggcgccggcctgcgcggcgttaccagggcgcgaagaacatgacgaagtgcgcggcgctctggatcccgtgcgtgaacatgtcggccgtgtacaggtgcttgctgtgcgggtcctgtccgtcctcgccgtctgccgcggggggcccgtccgccgccgccgccgccgcctcctgggcccgggcgccccagcgcccgccgccgccatggcccagcagcagcagcagcagcgcagtcagggccgccggccgggccagcagcgggaggaggcgtcctgggcgcgcgggcatcgcggcggggctgggcgcgctctcgccgcggcctccggtcccctcgcagcgcccgccccgcgccccgccccggagaggccgcgccccttcctctccccgcccgcccgcgccggcgcgcgaccgctacccgcccgagccccggctccgcgcaccggcagggaagggctggagcgagggaccgagtctgggagagccttccgagtccggcctcctgccttcccgccatgggacggctcgccccaatcccgcgaggctcctgcgcctccgcaacccaggcccgcacccctttccccaggggcccgctctgctcagagcggcggtgaacacacgaagtaacgatgaggccagcgggaagccacggaggggcaggtcagcctcggctaatctcagctcacacaagcaccccgcgatttcaggccaaaggaaggagagagctgctgtcagcagaatataggaaatcgggcaaaagacggtggggtttgcacctgaattagttagattcttggccagagctcaactgtgattctcgacctgggctcagaggggtgatgaaacccgcttcccaagtgaaccccttgctggttacccctgcccggcctcaactcagggatgaagaggaaagaaagtcaaagcggcctcttctagacaagaaggcacctagcaggactgactggggtcctactgtgccctcatttatgccggttactaaaatgaatgacagcacgcctgctatggctgaactcagcctgtggaatggcccgaaggcatccctgcccagcgactcataactcgcacctgcacacacaccttacagcagatggtaatcgaaagctccagccctaccccggggatctgaagctaaattagaatcaccgggttgctctccgggatcctgcctgctctttgattatcctcaatccaggaagccccaggtagttaactcctggcttggcaacaggggacgcgcccactgtctcacctgtcattattctgctcccgccttaggcccagccacttatgaacctttaaccatgggttgccaaacaccaaaaccatcaatctccctccaaagtctgttcttccagccacttaagcttgaaacatgggaggcatcttgtattgctcgctcttttcccgtgtgtctcaaaattcaaccgcatttcctgtaaccatgatttccttccagcattctcagtgttcataccctgaacggagactaagcctggcctattgcagtagctttctaagagtctctttcattcacatggctggaaaattaattttcctaaagcctgcctttga

SEQ ID NO: 586005 - DNA, 4001 bp, Homo sapiens
gtaacagagcaagatcccatctctaaaataaataaataatgaagaaagaaaaaagaaaacccatcgacagatgtattccactgaaataggctccaattaagtagtacacttaattgaaatagttgctgagaatactcccgaacaaagagaaactgttaatactgcctgattgttttatgttacaaagtaatttctaaaccattggagttgtaaaaattcgagtcagttggttcttaggaatgtgaaacataatgtacttcatatacacattgttaataaacccacagtggccctaaaagttgatttaactccaaatgaactgaaacgcagtaatagcctgaatacaaggttaagagaaaaacgtttctcccagtttgaaaggtacaatttctgaactggccatttttcttagggtaccttttctctatgcctccctacatccctttcccaagtgagcctctactgagctctggggaagaataccaagttctgcaacaagaacctgcaggctattccaacctctcaaaggtcttgtgtcctaaaattatggctttctgctctggcctgtggtcacttcccttcctcggggcatcccggcactggcaggaaagctgtgcacatgcttgtgtgaatgacaggaagctcttccgtgggatgagtgccagggtagggtctctcaggtcagcagcgaggcccacaccaaagcctcgcccagagaaccaaagcaagagggaccatctgctcaacggaggggcttttccgatctcacacataacaagtgacctggacccgagagagcagcagggaggtgacaggacagcctggagttgaggaccagtgggctccgttcagagattacatccaccctgagctgcaggggggcggaggggttccagaattcgcactaccttggtcttcccggggtagctcagcaaccctcctctgcccggaccactccttcctatcccacaaaagacgcacaaagtgggaaaccacaccttcctgggttctatttttcagttaaagcctctggaaggggacgtgcccgcagtctgtcccagccgaccccggtggccgcggcagcagcaaggccgctctggtgagtgcacgtggcccacgggcaggccgcgcgtccggccggcacaggaagtttggggcgctgggcagggaccgcggggtgacatttggactcccggctgcccgaaagggcgacgaccccaccttcccctccctcggtgccgaggtgcaagaggcggttgaattcaggagcgcggcgcagggcgggcttttcccggctgtcccctaggggtccgccccctcctcccgcaccgccccggccgccgagcgccacgtcagccgccagtgcccggcccgctgagctcacgcctcccgacccggagccccaagccctcggtcccctgcagtccccggctcccggccccgagccgcggcgcccgcgccccccgctccccgccagccggagccccgaacccgcagggtccccgcgctcccggccccgcgcccccagtattacaccccgcacccctgagccccgagccccgcgcccgtagcacgcacgccgcagaccagagccgtcggcgtccacgtggccccgggaccccccgcccgcggcgcccaagcgccccacgccccgcgaagcgccaagtgcggggcagggcgccggcctgcgcggcgttaccagggcgcgaagaacatgacgaagtgcgcggcgctctggatcccgtgcgtgaacatgtcggccgtgtacaggtgcttgctgtgcgggtcctgtccgtcctcgccgtctgccgcggggggcccgtccgccgccgccgccgccgcctcctgggcccgggcgccccagcgcccgccgccgccatggcccagcagcagcagcagcagcgcagtcagggccgccggccgggccagcagcgggaggaggcgtcctgggcgcgcgggcatcgcggcggggctgggcgcgctctcgccgcggcctccggtcccctcgcagcgcccgccccgcgccccgccccggagaggccgcgccccttcctctccccgcccgcccgcgccggcgcgcgaccgctacccgcccgagccccggctccgcgcaccggcagggaagggctggagcgagggaccgagtctgggagagccttccgagtccggcctcctgccttcccgccatgggacggctcgccccaatcccgcgaggctcctgcgcctccgcaacccaggcccgcacccctttccccaggggcccgctctgctcagagcggcggtgaacacacgaagtaacgatgaggccagcgggaagccacggaggggcaggtcagcctcggctaatctcagctcacacaagcaccccgcgatttcaggccaaaggaaggagagagctgctgtcagcagaatataggaaatcgggcaaaagacggtggggtttgcacctgaattagttagattcttggccagagctcaactgtgattctcgacctgggctcagaggggtgatgaaacccgcttcccaagtgaaccccttgctggttacccctgcccggcctcaactcagggatgaagaggaaagaaagtcaaagcggcctcttctagacaagaaggcacctagcaggactgactggggtcctactgtgccctcatttatgccggttactaaaatgaatgacagcacgcctgctatggctgaactcagcctgtggaatggcccgaaggcatccctgcccagcgactcataactcgcacctgcacacacaccttacagcagatggtaatcgaaagctccagccctaccccggggatctgaagctaaattagaatcaccgggttgctctccgggatcctgcctgctctttgattatcctcaatccaggaagccccaggtagttaactcctggcttggcaacaggggacgcgcccactgtctcacctgtcattattctgctcccgccttaggcccagccacttatgaacctttaaccatgggttgccaaacaccaaaaccatcaatctccctccaaagtctgttcttccagccacttaagcttgaaacatgggaggcatcttgtattgctcgctcttttcccgtgtgtctcaaaattcaaccgcatttcctgtaaccatgatttccttccagcattctcagtgttcataccctgaacggagactaagcctggcctattgcagtagctttctaagagtctctttcattcacatggctggaaaattaattttcctaaagcctgcctttgaccaagacagtttgctgcttaaacttggaccaaaacgccaccactgtccccatggccttggccgatggggtgaaatagtcatgcctggggcagccattcaaggccttccgtgatgtggttgcatcatgctttgtgtccctgtgaaactcactcaacactagaaatccagggattctctccaataactgttattgccaaactctaatccctgtgttctccaacacctcaaacctcccaaacccttccacggtgctgttgggaaattcccacaagcatcgccatacactcttacagcatcagtgtctttcgtttttaactgaaacacagttctaggagctctctcaagtgttggctgctcattctttcacacctggagtccctcagagccaggaagtaaagctgatgccttcctggttccccattgctccttccaaatcctacaaaaccttcagtactccttaaattgatgccactgggcatggcaccctcttccctgccagttcctgtcattcttccacatcactcttcctggttcagtgaagactttggttcctggctcacagtgttcctggccacccctttcctgtctttcattcctggcatcttcagcatccaggtggatgctccatctacctttccctcagtaactcacacccaaaagggagaccctagcacttgtcatcaccagcatctgcaccatctccaaaatctgaaggcatccactctgcccagcacctc

SEQ ID NO: 586006 - DNA, 4001 bp, Homo sapiens
caaatgtcaacaagtaaatacgaggcttcaaaagatgtacatcagactctaaaaacaactctcaaagagaatttccaaaatatgacagcctcatgaagatactcatagccataggataccctctgtcaatacttcagaaggaaatcctgggtaggacacataatcactgaactgttagtttcttttcaaatatcccactgctttataataataactcacatactaccgtgacactatgttcagtgtttcttgttaatttatatttcttgtgtttttatttctatctaatgagagacaggactagctggatttcctaggccgactaagaatccctaagcctagctggggaggtgactgcatccacctttaaacacggggcttgcaacttagctcacacctgaccaatcaggtagtaaagagagctcactaaaatgctaattaggcaaaaacaggaggtaaagatatagccaatcatctattgcctgagatcacagcgggagggacaatgatcgggatataaacacaggcattcgagccagcaacgctaccctctttgggtcccctccctttgtatgggagctctgtcttcactctactaaatcttgcaactgcactcttctggtctatgtttcttacggctcgaggtgagctttcgcttgccatccaccactgccgtttgccaccgtcgcagacccgcggctgacttccatccctcggatctggcagggtgtccgctgtgcttctgaaccagtgaggcgcccattgccgctcctgattgggctaaaggcgtaccattgttctgcacggctaagtgcccaggttcttcctaatcgagctgaacactagtcactgggtccacggttctcttccgtgacccatggcttctaatagagctgtaacaaccaccacatgacccaagattccattccttggaatccatgaggccaagaaccccaggtcagagaacacgaggcttgccaccatcttggaagcggcctgcggccattttggaagcagcccaccaccatcttgagagctctgggagcaaagaccccctggtaacactaatatagaatgtgatctcctttgataagactagggcctcactcacagaaggtagggactatatctaagtcttacttcaatagctggaaaatcctaaaagatgggaaaactcacccctaatggccacttgaaagcctgagaagacctccctcatactccattcagaaatattttcccaatctagatattgcagacatttcttcactggaagatctgtgttaagcattgccttaattccaggttctctccatagtgcatattttcttatataatgtaatgtgttagatcattaacaacttcagatgaatgagttttgtgaagctctcctttgagaggagagggaagattaagtttaagaaccttaaaaaatgttaccataatttcaaatctcaccagccctgtggaacacaaagctcacccccactttttcttctaccatttatccctaagagtagctagtccaatgttttatttaaaaaagaacacagaagccagataaccagcttctcttcagacaatccctcttcccattctgcaaatgtcaatgccagcctcttctcctgaaggatgcctgcccagccccccagagccctgagtactgcccagcccccgtttctaagatctctccccaactcttgaaagtgcttttcctttccccatcccctttatcaaatcccaacttacacagaggcaggaagcattgggagccatctctgcagacaaggggccagaaaccagagacagaaaaaggactttgcatgcagcttatataccagagttgagttggaaatcccctgcctggattgctgtgtttgtccagctttgctgtgctctttgttcttgcatgctcccatgaattttctttcacttttgctgggcaggagttaatagacaaagaatgctttctgatcacatacttctctcctcaagcaatctatttgcaaacctcattccaaacatgggatggtctttctgtgttgaaaacttttcccttttctcaggaaagatctttgtctgttgaagccacctggatctatacccacagcccaaacctaagctgcagatctctatgtctagctgtgtctgtgtctatgggaattctcgttccttgaattcccggcatatccttgaacaccccaatctctctgccatctccacgccactgagcatgccttttcctccaactctatccccaccaccatgaatttataagaacacacggtgtaaacagtatcttcgtcaaaaagccttccctaactcttttcctccccatcctgggttatgtgtccatcttctatcctctacacttccttcaaatgcctctcagagcatgtttcttcaacaatagcatcgtctgcttgtctgtaatctttagaaaagagtaggaatcttgggggtcgtgattgtgtcttaattaacttgtatctttagcactgttccagcatgctgtcaggcacaggaaataatttataaatgtttactaaatgcacaaatgaattaataaatgaatgaaaagtaagtaaataacaaaaaaaggaaaagtaatatttggtgagtacttaaatttcaagaactgcacaacatattattaaatgttaccttatttactgtttcagcattttaatgaagtaagtacaggtgctccttcacttatgatggggttacatccctgtaaacccattgtacactgaaaatatccaaaatcagaaatgcatttaatacacctaacccaccaaacatcatagcttaacctaacctgccttaaacatgctcagaacacttacattagcatacagttggacaaaattatctaacaaaaagtgtatttactactgaagtgtgaaatatctcatttaagttattaaatactgtactgaaagtgaaaagcagatgattttatgggaacttgaagtaggtttctactgagtatgtattgctttggtatcactattaaataaaaaatcataaatggaatcattgtaaggaaccacctctattagtatccccgttaataagtaagaagctacctcatccacaatcatattagtagtagctggtaagcaagggttcaaacactaatctgtatttctatagtccttgtattcttcctatattattatgttatttcagtgggaaaaggcagggagaaaagtgctactggagttgggtatttccagcatggggttactgtgagggcaaatctaatatactctcagaaaaaactaattcaggggattccctacccagagatgacctggattctgggaaatagtgccctttcaagaaaacatatgaacaacaaacctggactctgacctctctctctctctttactcttcccttcctatgggaaattccctccctgcccaaagccagggccaggactgtcccagacaccttggtgcccctttgctgaccacaggcaggacttcatcttgggacctgacctccttgcttcttacccagtgtcaatctgacttttttctgtctctctctatgtcacaataagttctttcagagacagatctcttttcatttgctgttttagtctcttttgcatactataaaggaatacttgaggctgggtaatttataaggaaaaaaagtttaattgattcatagttcctccaactatacaagaagtatggcaccagcatctgcttctggtgaggcctcaagaagcttttactcatggtggaaggtgaaggagagcaggcgtgtcacatggcaagagagggaggtaagagacagtgggaaaaatgccaggctcttttaaacaaccagctctcttgtgagctaatggagtgagaactcatttattacaatgatgacagccccaggccattcatgagggatctgccaccacaacccaaacatctcccagtgggcccatttccaacactgggggtcacatttcaacatgagatctggagagt

SEQ ID NO: 586007 - DNA, 4001 bp, Homo sapiens
aggaaccgtgtgaccagggagccaccatacatttttacccaaacagctccagttaaatataccacaatgtaaataattcaatcattttaccatctagcttaaaaattaagcttttctttccctctttctctttggtcttttcttcctccctccccaccccgggattctcttttttttttttttttttttttttttttttgagatggagtctcgctctgtcgcccacactggagtgcagtggcgcgatctcggctcactgcaacctcctccccgggtcaagccatcctcctgcctcagcctcccgagtggctggaactacaggagtgcgccaccaccatgcccggctgatttttgtgtttttagtagagacggggtttcaccatgttggccaggctgctctccacctcctgggctcaagcctcccaaagtgctgggattacaagcgtgtgccaccgtgccaggtcttcatcagatttttttaaggagtcagtggctcctaaaatattatgaccagttctacacacttggtcacctaaggacatttcttagcctgacagcactcaggctaacaaagctccctccaatcaatatcctcaggcttttctggggtttttgcatattctgaaaccttacaaaaaacccaaagattcacagtgtcaactctttccacaaggatgctagtcttgctaattcctactgagaaacagctttttttggaaggaaattttaagcaacagcaaaagttggtgaaatcatcactaatatcctagagtttatcatgcagagttaactgtggagtttcttccccctgacaaaatgtatcaaggtacagatagaaaaaataccatttagaggatccaatgattcatttcaagcctgttttattaagctgagaaagctagttgcttatctttataatgcaccagaaagtaattagaggctaggattgctgggactgcttgtgtaaatataaagcaggatcattaaatgcaggaaaggaatcgctacgactgaatacagatacatttcatattagccagtctggcaaaaatcaaggttagctctcaagaacagggctcaacgaggtgtttttttgttgttgttttgttttgctttagctctatagttaactggtttagttacagaacatttcctttatgtctgtaattgtattcgcccaagtgctgcaaataggatatttaaacgaccaactcctcaaatgtgagtaaatcagccggcagtaaatagaagtaaatagaagtccggtggcagcgacagggagggaatagcgaccaggtacagcgagggggttgatgactatcgcccaccgacatcacctttacacctgttctcagggatgagtttctgacccagctctacgggaccaggcgaagatgagaaaagggagaggctgggtgctgcggggcgcgctggccggccgggggattggcagcggacgtccacccggccacctcgccctgcggcctgtacttcccgggcaggcggcggtctcgcgtagagcgcgaaaccaggagctgagccgcgagtggcgccagacgcgaggggaccgaggcggcgaccaccccggggtccagggtcactccgccctcctcgcccaggggccccagccctgctcacccggactcttcaggttgtagcgggtctccatggtgggtcgctggcttggctccggcctcccgggccgctgccacctcctctccacgcggccgctgcccgggtctcagcgcggctcgggcggacggggcctggccgaggagcctcggcaaatgccgcccagtccagcctggactgcgggcggggtggcaaggctgagtgcgggcgaggcgctcgcttcgcgatggcgccgcctcctccactgcgcccccgcctccctgagtgcctggcaggcaccggcgccggccggggcggcgctgaaccgggcgcccgggctggaggtcagcctcctcgggtagtcgcaggcccagccctgccgcggccgcccggcttgcgtcacccgccctcgtccgggatttgtgaagttgccctgacgtggcagtagcttcgtggcggtcggtcactacccagccgccgcccgcccggcgaagccggcttggggaggtgcaggagcgagcggcgtcctcgtcctctcgtcccggccctgcccgctgtaggcgaggtccgggacccccgggccctcgagagctcggagggggcgccgggctccggctgcaaagctgtccgcagccggctgcccgcgcgcggtcccgcagggtctgggaaaggctttgtttttagattcagttgctgttgcgaggggcgggggttaagtgaggagggggaaagccagtgacaaggaaatggaataggattttttttattttttattttgtgtgtgtgtgtgacggtgtcaccgctctgtcgcccaggctgggatgcagtggcgcgatcttggctcactgcagcctctacctcccgggcccaagcgatcctcccacctcagcctccagcgtggctgggaccacaggtgtgtgccaccatgcccggttaattttttgtatttttgttagagacacggtttcaccgtgttggccaggctcgtctcgaactcctggactcaagcgatccgcccgcctcggccttccaaagtgctggggttacaggcgtgagccacggctctggccagagttggatattcataacaatttttttctcgggtagtgtgttaggtgcacgacatgttttaggcattgcaggagttttgttttttttggtttgtttagatgtaaaagctgtcaaaaaaaggaattacatttaatgtgagggaaagcatacaaatatgaaaggttaaacttcaaaggacacacttactgcttcattgtccaatgtgtgggatcgagagaggactgagttcaaaagacttaaggagtagggaccttactaaaggaaaggagggagggattgggaaggtggggaggatagaaagggttaatcaggttgggcaagttttattctgttatataaagacataaactcttaaatttgatttgttttctattgttaaagttaatctaaatctgtgagtttcttgatgaaattgggagtaaaaaagtgaaggatatctaaaattagatggtatattttaaatcattccctgatgttgttttctgtatagtaaactgataatctgactgactgagatatgcaaacaaaaccaaactccaatgctgcttcattcattcattgtgttgaatcttcagattaactgacacttgacaccctctcctgccacagctctacaaaagcccctaatttgtgcagtaggccctaccacagcaaggcctgcaaagcaggtgctgtatataatgcgttcctatttgatagctgagtactagaagccttttgctattcagcctccaaggtccatcaatctctgggtgcagttgtcctctggggctctcctttagccaccaccacctccactgctccctggggctcttctcccataggactggttcagtaggaataacaatctctccttccttggttaacaacaataacaacaatttattgtggacatgtgcccataacaatttaattatgggcacatatcaaagcttaattacaatcatgctccaagatcaaagccaattccaaaatttctctcagcagagacatttacagagaaaagagaagtggctggcaggtgtggtggctcatgcctgtaatcccagcactttgggaggccaaggcgggcaggtcacctgaggtcaggagttggagaccagcctggccaacatggcaaaaacctgtctctactaaaaatacaaaaattagctgggtgtggtggtgcatgcctgtaatcccagcttctcgggaggctgaggtaggagaatcacttgaacccagaaggcggaggttgcagtgagccgagatcaacctgggagacagaatgagactccatctcaaaaaaaaaaaaaaaaaaaaaaggccaaggtgggcag

SEQ ID NO: 586008 - DNA, 4001 bp, Homo sapiens
tttctcacaaagtaacatgcacatctatcctatgacccagaaatttcactcttaggtacttacctaaaaagaaatgaaaatgtatgtccaaaaaaagatttatacaacagtgttatgacagctgtattcataataagcaaactccagaaacaagaaaaacatccagcaataggagaacagataaatgaattgtggtatattcatacaatggaaaacttagcaagaaaaaggaatggactactgatatatgcagccacatagatggaacgtgaatctgaaaaatattatggaaggaatgcagccagaaacaaaaaagtatatattgtatgaatccatttataagtagttcaagaaatggcaaaactaagtccagcaaagttaggtttctttttttttctttttattttttattttttgagacggagtctctttctgttgccaggctgaactgcagtggcgcgatctcagctcactgcaacctccgcctcccgggttcactccattctcctgcctcagcctcctgagtagctgggactgactaaaggtgcgcgccaccacacccagctaatttttgtatttttagtagagacagggtttcaccatgttggccaggatggtcttgatctcttgacctcgtgatccgcccgcctcagcctcccaatgtgctgggattacaggcatgagccacccgggtaccttgcctaaacaaaggagagtagtccaagggaactgtgaaaggcccctgcatgagaggaagggagggtttgttgtgtgtgtgtggtttttgttttattttggtagggtttgggttcctaattactctacaaggtgcaccagaattggagatatttgtccaaattcataaattttgaaagagaaaaagaaatacattcagagtactattattcccatttcaagattgaagaaattcagattaaattattctaatttcgtgaggaagctagcatttgaactcagttctcacgccatattccaaattgccacaccagatatctggcagatttagggaagaggaaaaaattaagcatcaatctacctgtggcaccgtgtaataccattctcaggattttaacttctaacttactctctttgaaacagcgatcacaaaggaatagacaaggggaccacaaatcattaaaactgctgtcaaacaaaatagagaacatttttcctaaaagttatttgtgtagcgaataacaagtttgacgttctcactggaaggaagaatatgaataaatgaacgagctccagtaagaagtctacaacctgtcttagtggttcactaaactcacgtttattgaatgattgtgtggtttctctgcaaagagcagttttggacgaaaagacccgaggttatttacaaaacaagaagctcacataggaactgatccagtaaggaggatcccgaagagagacagacaaatcattttttgcattgttttgttggaaacgccgggcactgccaacagtgttttacatcactgttcctcaaattttaatgtgcatttgattcctggaaatcttgttaaaatataagttttgattccataagtctggtgtggagctgagaccctgaatttctaaaaagctccccaaagatacccacactgtcagtaggggtgggagtggcggagccgactacaggggaaagcttcactttgagtgatcgagaggctctacgcaactggaaagaagaaactcaaaatccctcgtacagagagagactcaccagcccccgacccccgggcagcagtaaagcgagctgggcactgcgcctagaatcccagttcttaccccaggatcagaagcgcgctctgcagctgtccccgcacctccagaaacacgcgcgtctccgccgcagaagccgccatggcaggcttccagtcccagaccggaccaagctggaggttccgaggggcccgggtcaacaggaccaggagaggttccacgtgcggaccaaccagcggcagccccgctgcggcgcaggcgcctgtgccagatcgcagggctggcgccgcctaccagctcacagcgccacctgccggccggagagtgcaccaccgagaaggcgcgtgaccccggaggccggggcggggcgcgcattttcaaaaccaggctttggcccagagtgctgagaaaggtgggcggcgagaggctagctatcgccccactctgcttcttatgagcgtgacttggcgcgttagcatccctggaaatgaccataaaaatcagacccagggttcacacctttggctagctcgaagggagggagatgatggaggcaagtgttacaggtgggctttgtccccaggagatgcaagaacagaattcccggccccaaacccactttatcttggtctctttatgaacaagggtcgtttgttagcctctatctaaagcgacaaaattttcaagaattgacttgccattgcttctcaacttagacaggatagctccaaaattgaaacaggtgcaaaaatataaggaagttctttgttacctaatgcagaagagtgtggctgaagtctatcaggactaaccattttttagggggtaaaaaaggaagatgagaatgattacgtatgtacagctccactattcactttcacaaaagtaaaaactaagagaagttggagaagtttactaccagaagatagttttgaaaagtttgacacagtaaagaacctggtataatgtaaatacttataatgaagaactattaaaatataagaccgggtagaattacaatagggcttcttaaaaacaaggagctgcttttatttatttattttttttcggagtctcgctctgtcgccaaggctggagtgcagtggcgcgatctcggctcactgcaacctctgcctcctgggttcaagcgattctcctgcttcagcctcccgagtagctgggattacaggcgcacgcgccaccatgcccggctaatttttctgtttttggtagatccgcccaccttggcctcccaaagtgctgagattacaggtgtgagccaccatgcccagcctaaaccataaataaattctaaataaataaatcctgtcatatattttaagataatagcttgacaatttttctaaaatcagtatttggggtgattaaagtttattatgttgatgcacaaattattatatctatcacaataatttgaagttatagatggaagcaacaactcacttaaaaaaataaagtttactattatttggtctcaaataattcatctatttgaaggatgatgatttcaactcttcatatcttccacctttagtacccgaggctattgaatgcttaaatattgacacattatattgaaatatacaacttccgtagcacaacttactctttataattgttttgttagcttaaaagatttttatatatttagttacgtatttgtaaaaactttcatttttttacggtatggtgttggcaaaacggtgcaatttaccttggagtaactagatatgattgatagagctctagactcaaaatagttccaaatctgacaccaactacttgtctcctaacttcacaagtctcctaacctctctgggatgcaggttactcatatgaaatattgagaaactattcaaataatatttaaaagctgttttcagttcctattatctcttcaaatgaaaacatctgctaaccccctttctagccactcctgaaattggtagccatggccgcttcccgcgacagtccacttgagggcgctgtggcaacagctagcgccgggaggcaggaagccgatcgggggcggggatcgaaggcctcagacgtcgacgccggcgtgggcgcgagcacggtgcactctgggagctgtcactaggcccttcggctcccggtctcggtgtagctgccgtggttgccaggagagctgcgccggcgagaagcggccgagccagcagcaggtaaaagcgtccctgcccccagtgcggccgctaggctggtagccggct

SEQ ID NO: 586009 - DNA, 4001 bp, Homo sapiens
cattattatttaacagtttacttgtaacactactttcattttcttttttcaaatctccgataaacgaaaggcagaaattccttgagttgtacaacattaagtagaaagtaaatgaaaacagacctaggctaaacaagtaagtaggtttaaaaaaacacaccaaggcagggcgcagtggctcacgcctgtaatcccagcactttgggaggcccaaacaggtggatcacctgaggtcgggagtttgagaccaccctgaccaacatggagaaaccccaactctactaaaaatacaaaattagccgggcgtggtggtgcatgcctgtaatcccagctactcgaggggctgaggcagcagaatcgcttgaacccgggagactgaggttgcggtgagctgagatcgcgccactgcactccagcctgggcatcgaaagcgaaactccgtctcaaaaacaaaaacaaacaacaacaaaacacacccaaacaagcaaagattcagcatttaacaacgtatttctttaaagtcttcacctctactcctgacatttctttctacccggacttaatgtcctcaccaattcacgcaaaataactactcactgaccaacagctccacagtgcccccaatcccaaattttgttcgtagcattcagattgctgacttttattcacgggtcactcccttcctagcagcctttttaattggaggtcttagaggtggggcccaagctgtcttggtccattcataatcattctcggcaatctcttctaatgggtgttcctacaactctgctatttacactagcatattcatattacagttttaatgcaatagtgcgtttgaacggttttacgtttggaatataactgctcctactacactgtgaccagttctcacgtttagcttatacagtatttgttgaaagctgctctatcaacgttatataacatttgttctccatccaattacccctaactcctagaaaaaatatttttaaaatttcccagactccacgactactttctcatactcagtaaactttccacacatgcatcaacgttgtcaactaatcaaaccggtgcaaaaaaaaaagatagcactgaaacggataacgaagggtagtgtcgtttgccttcttggtgcctggggcagtcccaaaaacaaaagaggggctcggttagggtggcatgtttagtcggaggagcacacggcttcgcttgtctcaggaaaagcaattaactagataaactagggcgattataccaaaaacacaagaagcgtctcttctcctcttccaagagctgatataaagggcaaaggcccatgtgttgggagacttaatgggaggctgggggaaaggaggtatgatggaagagccgtgggttctcctgggcagaaagggaaagtaaacgtagttagtgcacagcgcagctctggcagctgttgaaaatggaaagagaggggcaggatcggtggcctccccgggctattaccccacaaggcgagggccggcacagctgtttccccaagtctgggtcgggctgctccaggacgtccaggagtcggttcctccccacaggcgcggcctgcgaggggcagacgcacccgcccgggttccggcactcacccccgcaatctcctcggccgaacattccagcaagctccggtcgatggcctgcacctctggctctagctccgacgccatcttctctcctcctcctccccagcgctaccgccgcccggagagctgcagcctcacctcggccccggcggcctcgactgccacccctgccccaggcaatcagtcccggagccgtccaagtggctgcaggtggagcaacagagggagagaagggtgacgtgaaccggaaaggaaggacagcggcctcctgcgctccctcccaagcttagcgcccaagagtcaagtcactggctcgtccctgacccagggaaggacacagaaaaccccaggcctgacactctcgctggccactaccgcgtcctgcaccaggaaaggggcaataacacccaggaggggaagcggagctttctgggtactgtagttctgggtgctgtaggtacagcacagccgggaaaaaggtggcgccctaacacggtgcccctcgaatgcattgtgggagttgtagtccattctcaaggggcgctggcttaaatggcagataagcgggcggggcttttctgcccaacgagaatcatgggaagacagtcgcggaaagcagcgccccctggaaaaaagccaaagagaaagatactgtgggaactgtagttttattctccgaatctcgtttgttcatttttgtatccccagcttcaagaacactgcctggcacatggtagaccctcaaggacttgccagtctggcatagggtaggcactcaaatacttgtcaaaggaatgaatgaattacattctattcctgtggttctatgtcctgtcatccatcgaacccatatcttttatacgagtaatggaggtgaacattacccacttttttgaaggtttaaaacatgttttaaaaaatttttcaaaaactttagtgatgaccacttataaactttatcacaaatcttgctgcaaaggaaaaagagtctattaggccaattaaaagatttcctcttgatagagacatttaatttctacagataatcagaccaagcttggtggctcatgcctgtaattccagcactttgggaggccgaggggggcagactacttgagcccaggagtttgagaccagtttggacaacatagcgagaccctcttgataaaaatcaaaaaattagccaggtgtggtggcacgcctgtagtcccagctactcgggaagctgaggcaggaggattgcttgagcccaggcagttgaggccatcgtgagctgtgatcagcccactgcactccagcctgcgtgacacagctgagaccctgtatcaaaaaagaaggaaaaaaaaaaaaaagaaataggtaaacattgttagactagctatcaaagaaaactatgtttagttaaaggtaattagactcttgactgacagctgggtgactgggcttcttagaagtcttcagtctctagagtttgtcagaaaattgtttataccttttgtcaagtgtgttaatttattcccagaagtaggttgtaaattacatataggggggaaaagttctgagccagaccaggtttaggacatgtttatgtttatgttgttttgggattttttttaaaccaatactatgatattaaccagttttttaaaaaaggaaataagaaactgcctgtatccctgtaacctcacaatacaagtaagccttcttatcactttttaaaagttatatatatatatacatataaaacatcagaaattcaaactcgaaaggaatgttttaaaaaaggaaaattgaaaacttcctattcctcttaccccaagtccctctccccaaagaaaatcatttttgacactgtcttatgagtctgtccagaaaaaagtatgcacatatctgtacagatatttataatgagatatcttgaaatattcttctatgtatttttctttttttgcccaacttccttacactgatccactcaggacagagtcaacttggaagaaaactgggattgtcccagcctagaagcaaaaacaacatctcttgagctgtcctaacatagaatttaagtcgttaatagactgtaaaggcaatttctgttcttaacattatttgcttcctaacattatttgtttcaggccgagcattgtggctcacacctgtaataccaaaactttgggaggccaagattggaggataacttgaggccaggagtttgagaccagcctgggcaacatagcaagaccccatctctacaaaaaaatttaaaaattagccgaacatggtggcccatgtctgtagtcctagctactttgggaggctgagacaggaaagatcacttgagcctaggagttcaagcctgtagtgagctatgactgtatcact

SEQ ID NO: 586010 - DNA, 4001 bp, Homo sapiens
atatgcttggtagtctgttcaaattttaagaagacaaaggaaaccaactttgtgcgtgtttttaacagcatttcatacaatatgattggtgtagcaccacactggattgagttacctaatttgtaagtacaagtaagccttaaaaagaaatacagccttgattttcaaaaatctataatcctgtaagatactgtcccccttcacaattaccacctaataaaaggcagctgaatacccttccctgagtcatgcaataaattaatgaattgtaaaaagaaacaattaattcatgtatagtacacataactcaaaatgataaaatattttaagtgacaacatttgagttcatttaaattatatgaccatgtttgcatgaacccagtaaaaatattaagcctgattatcaaattaacaattgaaaacgatatcttacaatctataatttagtatgcaattacatgtttacgggttttgtttgtttgttttgccccttccaaaaatccaagaaaaaaaaaaacactaaagaattacctaccacctcggacatgtagctcatctctcatttctttactaatttgggctggagtaatatattcctttccatcgagtgtatgaactacttctagctgtttctgagcaatcaatttattaacaatctcaatgcagttccgctcggacaacctgagggaaagaaaaaaagttgtttcaaaagtccacttgagacattggcgctcaataaaattaatacaatgtatgaaaacaggcttttaaaaagtttgtttagtcactaacttctacatcacaatatctgtatttttcactaactgattcaataagttaaaaaaaaacctttcagagtaagtaggtttacatatgcttaaatcatttatttaattggtacacatcatcccatcacaaatttcaagtctgttgtctcttacaggcctgcttccaatcttcaaatctgaagggaaaattgaagacatttatttaggtaggaaaaaagaaaaaacaaaacaaaacaaaacaaaaaatgccctaatttccagtttaatcagaattttcttttaaattaagtgcataattgcctcacttacacacatggtctgcaagcaggcaggggatgtggcctagtgaaaccataacttttacccacgttagttacccatgcagttacgagtttgctatcagtggtagaaaatacagcataaggggattgctgtcttccggctcaaaaggaataaaacatcgcaggtaggaagtagtcaaagaatagaaaggcttctattagcgttatttttaaaaagcagagttaggctcctctggacacatcctccaaaggttagtgggcttgtagaaaatgtcagtgccctgaataacagatggggtcaggggtctagccctaggtctgttacgagagataaaagggcaagaagttttaaggatcaacatactatttgccaagtactgtactgggggcgggggttagcctctcctttcgagctcattctagatcaggaagtgtataatagccaagatgtcacagtgatttggtggttggtgggtgagggagggtcaaagaaatgctcaataaaggcagctcgaaatcaccggccccgtccatggtggggcggggcgcgccagcatttcgctgcagctgggctggggggctccagggcgtcctaggctgaggactttcccgccgagccttggacttggaactgcgatccaggctcgggacagagggaggaggagagaatggtgacaagcagcgagaagacccgggatgcagggccgcgggtctaaagtcccagatacaggcgtgtccgcccacggcctaatttgggctccacaaaggagagggagggtcgggcacctctgcgtggcctcggcgaactgcgcccgctggaagtcggccgccaaccgcctaatctcttcccaggcgtccgccatcacggcctgactcgcagtagacgcggaggaactgcagacacgtcagccgacaggcggtgggagaagagaggcggaacgggccgcgcagagggacaagaggctccgcccccgacgcagacacaccaaacgcttgcgcccgaggcgcggggggcgggcggaagtgccgtggttgtaccgcggcgctgggggttcctcccggcgagactggcggggctgcggcggctaggagagtggtgcgtaggtgtttctgggggggtcgtgggcaggatgcagggctcagtaaagtttagtgtcagaactttgtttgcgctacccctaatatttccgtagagtaatagttgtattaactacttttcttttttcttctgtcctccatttgttttgggggagggtgcggaggaataagcctgtgtctaagattggcgcctctcttctctagctgttaactctgagcattcccttttgtatagggtatcgtgttaatttttacatgcacccagagcagtctgccttttggaagatacatgggagaccctaccgaaagtaattactttttttttacagagtgaataaatttgcgtgtcataaaggctgtataattgctttcgtgtctagagttctagagtctttcgtatttctcttattgcaatgattaacttcatcaaataatgaggaatataaacataaggtgcatggctatcaaggaaacagggaaagcaaagagaacatgtatcctgcttccctgttgagtagatatttactcaggtgtacctttcttttttatatcttttttatatcttatgaattgaaaataaatcatgggacccccaaatcactaagctaaagggaaaagtcatactgggaactgcttagggaatcctgcctcccattctattcaaagtcacccctctgctcactgagataaatgcatgtctgattgcctcatttggagaggctcataagagaatgcaactgtctgttatctacctatgacttggaacttcctccccacttggagttgccccgcttttccagatcagaccaatgtttatcttacatatattgattgctgccccatgtctccctaaaatgtgtaaaaccaagctgtgccccagccaccttgggcgcatgttgtcaggatctgtgccatgtcatggatgcaagttcttaactttggctaaataaactttctgagttgattgtgacctgtctcagatatttggagttcatgtatctcactctttactatttaaaaaatattattccagttagaaagaatgaataatatcaagtatttgatagcacagcagggtgactagttgtcagaggcgtttgaactagagcaactccatcttgaataggggctgggtaaaataaggctgaaacctactgggctgcattcccaggaggttagtcacagagtgagatagaaggtccacaggcaggaaaaacaagtcataaagaccttgccgataaaacaggttgcagtagtgaagccaaccaaaacccaccagaaaccaagatgatgaatacagtgacctctggtcgtcttcactgctcattatatgctaattataattcattatcatgttaaaagacacccccaccagtgccatgacagtgtacagatgccatggcaacgtctggaagttaccttatatgggtctaaaatggggaggaactctcagccctgggaattgcctacacctttccttggaaaacttgtgaataatccaccccttgtttagctgtaatcaagaaataactataggtatccttaggccagcagctcaagccgttgctctgcctatggaatagccattttttttttcctttgctttctttataaacttgcttcactttatggatttgctttcaattctttcttgtatgaaatccaaaaaccttctcttggggtctggattgggacacctttccggaagtacagtcaataataattcaattgtacattttaaaaaacaaagtacaagtggattgtttgtaacacaaaggaaatgcttgaggtaatggataccacatttaccctg

SEQ ID NO: 586011 - DNA, 4001 bp, Homo sapiens
aggctaatttctgtattttagtagagacagggtttcatcatgttggctgggctggacaaacagtaggtcttattcattctttttttttttttttgtacccttgaagtagatactgttcttatccccattttagagaaagtaaatcagaaagaacccaggctcttaaacaacaatgctatgataggtgagatcatctctaagccctaaaattctatgtcctttcaaattatacaattctcctctggttaagttatctgttccattctgcaatctttggtcatgccccaaatactattatatctttacacaaaaccagactcatggaacatctagattactatcacctgaaaaagaatatattacgttaatctgagtaaaaggtccaaaggcactttccagcaccagcctccaatgtgctttttcttttactacgtggtgattaaccaaaagatggatctgggtctaattactaattaaagtctcagatcaaagtgtcagccaggaaaaggggatgcagtggcaggaaaagtgtctcacacaccgcttaccaaagcaatgagaagacccagaaagaaacatcagtgcaagcctgggtgtcccatgttgaccgacatctcccctcacccctacctcctgaaaaccactgaccactgtgcagccaagccctgggtcactctctacttgagatacaaaggctggttaaggtattaaccatcaccaactccagcatggaataaggagtgaaaactaagtgaaacctagctcccaatttttgtggccactggttgtgacaacctgcaatcgcaacacggggttcagcagtcactcggctacacctgaaaactgttttgccggccagcctcctcatgccaaattactcagcgacataacattgcttaataaaaggctgcaaagcagaagcggacgttgttggttcttttcacaggctgtcaaaaaaacctccacatcttaaagggaaggttgcggaaactttatccccaactctcatgacctttctccaattaggctatgtaatgaaaagaaaagcaaaagagggaaaaagaagtccagaggaacggccctgggtgctgggcttttccaagggtgatgcaacagggtcagacagaagaggaggaggtgggagctcctgggaaagagaaaaccagcctcagcgttggaaatctaaggggaaatggcttagcaggactggtagcagggttatttagaacgggcaggggcataggatctgggagaggagggcggtcagaggcccaaaggaaggggcaggggcccgaaggccagagaaagcagagagaagacagctggttcgggcaggcaagagtgggcttcgtgggggcctcggaaagacggtcaagggagcacggggtgacctgcttggaggtgtgggaggtggggacagcaggccagaagggccttgaggggaaagaaaaagtccagggggttgttagagtggggagagactagcggcaccggcgccaggacaggagggcccagcgcgggggaagcacagagcggcgacaacggtgggcgccggcgggcgcggggggaagctgtccgggctcgagttaggcaggggctgccacggagtccgggctccgggctggagagaggcagactgggcccggagcgcggcgtcagggaggaggtcggagagggttaggaagggcccaggaccgccgggggccggcgctggcgctctcaccgggacaggtgtttcaggatctgcttcttaatgatcccggccatgccggagccgcggcccgcgtggaaggcgggtgggccggcagctgtggcctcctcagttgtggagaagaggcggtcccctcacctcgccgcggcgtgagcaccggacacagccgccgccgccgccatggcgctttctcgcccctctttgggcgcctggcgctccgccacgatcccacccaccagcgcggcgccgcggccgcccgcccagagcgacgcgaagatcgcgcgccacccgccggccttgcttgcggcggccagaggcgcgcgcggtgaggggcggcggcgcgcgcagcgccggggctggctggctcgagcttcctccctccgcgctcccgtccgcctctcgggtctgaaacgcttctttcgcctctgaggggtgtgcggttcctttcgcacccggcagtcgccttgaaacctaggagaaaggcggggtagttgtaatttttgcagaaattcgttagatcattgcgcagctcccggatgccagcgtccgcctctcatttatttccctcacacattcactcagtatttgttgagcaccagctgtactccaggtatcgggctggggactgaaaagtagtatcaaggacctcacagacccatagatgggacacgcgaaccaaccgctgcggtcacctgcgaagggctttgtgctggagagctgggaagggggcgcccgtcaccctcttggtgcctcccttagtctcgtctcctgaaccgatgggcaaaatgtatttactcaagacctgagcggctcactgcagaagcactccctcccaaatgtggggtcagaagaaactgagacggtcaattgttaaaatgacctaggactttagagatcagcttcttcactgtgcaaatacggaaacggaagccctgggaaataagagctttcccaaggtcacctacttagggccacccaggactagaacccaaatattctgactcccagtcaagtgttagatgcactctatttcatccatatgcttaaaagtgtaacccgcatgccggcgacacccgtagacccaatggcaaagatggaaaggtgacagttctccggacttaagccttcaagcaaaaacttggagaaaaaaagaaaaacaaaaacctcttgagacagccttataggaagtctggcccccagctaatattgcattttaaatgtagtcattctttaatataaaaccaaagacattcaaccatgtctccctgtctcccccgtcagtcattcagggtgctccaaaacaattgtttccctcaaaacaattactccctaattccagagatagtctaagcacggtaaaccatatatatgttaaatttttaaaatgaataatcaggccagccgcggtggctctcccctgtaatcccagcactttgagaggccgagacagacggatcgcttgggcccaggagttcaagatcagcctgggtaacatgacgaaatctcatctctacaaaaaatacagaaattagccgggcgtggtggcacgcgcctgtaatcccagctactcgggaggctgaggtgggaggatcccttgagcctgggaggcagaggttgcagtgagctgagatcacccaactgcaccccaacctggtcgactgagcaagactgtctcaaaaataacacaccatgcattcctatgcctatcccttagtcatagtaagttcaatttttcccagaagtccccaaaatattatataaaagggaagcaaatcatcctcggcccgggtgctttactacccactcccctccagtaggactgaatatcattaattgtccctctgcccacctctcaccagaatatataacagggaccaatagggcctatggaagaggaggtttcttgccaatgttatcggctattattgctttttcccaattcggtcctcagccacaggggcctcacagcaatttttgcatttcaggcttcctttgttggagcaccccagcaaagaagattggacatctgaatcagctatgtaaggcaaaacctacctcatgctcagagactcagcatcctcactgaatgcgtcatcacgcctggtgaatgagttatttttgttgaatgcaaaaattcgttccttacaaaaatatggcctctttagggaccaggaaataggagagttaatattctcaccaacagtattaatgtgtttatccttccttgtaattctaagaatctgagacatataaagacaaaaggaggccaggtgtggtggctcacgcctgt

SEQ ID NO: 586012 - DNA, 4001 bp, Homo sapiens
gggtcatcgtgagggaaatgggatttcccgtcccccctgcattaagttttgtggaaagcctggggtgtgtttgctggggtgtgtcctcaggcaaaaggggacaaggtgctagttggtcgggggaggtgctaagggccccttcatggatggggaggtgagggaggcctgtgtggtgacaggggtgagctgagatggggagtgaaaggatgcgacctgggtggtgaaagtgaatggtgaggggaagggtagcaagtgtctggtgagcccctgcgtgcaggtgagtgtctgcagcaaagtgtaggggcgaagttccagggcagggagccctggggctgctggaagctttgtgtggtgaacagcaggtcagagcagagcagggctgtggctgatgggggagtctgtgatcgcgtccctgtggaactcccctttacccctgtcctgaccccagctagggttcgggaatctggtttctccttccctagggccagtggggctgcgggtctgcaccagggatccccgccctaccttgccctctgtagccttttggtccctccaccctcctgcaattccttttcagccttctttgacactccccctggactgcggtgctagcagcagctgcaggaagcggactcggcggaaaggagccccggaggggaactgagtgccttcagccaggcacgttcggggagacagcgatgttcggggagaccgcgatgttctgggggatcgcgatgttcggggagaccgcgatgttcggggaggccgcgatgttcgggtagaccgcgatgttctgggggatcgcgatgttcggggagaccgcgatgttcggggaggccgcgatgttctgggggatcgcgatgttcggggagaccgcgatgttcggggaggccgcgatgttcgggtagaccgcgatattcggggagatcgcgctggtccacccagaagcctcctggcctatggggcaagcagcagccgcaggaagcggacccggaggaaaggagccgcggaggggaactgagtgccttcagccgggcatgttcggcgagatcgcgatgttcggggagatcgcaatgtttcgggggatcgcaatgtacggggagacggcgatgttcgggggtaccgcgatgttcggggggaccgcgatgttcggggagaccgcgttactcggggggacggcgatgttcgggggggatcacgatgttcggagggatcgcgatgttggggtagaacgcgatgttcgggggcatcgcgccggtgctaccagaagcctcctggcctgcggggcaagcagcagccgcaggaatcagacccggcggaaaggagccgcggaggggaactgagtgccttcagccgggcatgttcggcgagatcgcgatgttcggtgagatggcaatgttcggggagatcgcgattttcggggagaccgcgatgttcggggagatcgcgttgctcggagagagggcgatgttcggagaggccgcgatgttcggggagaccacgatgttcggggagacagcaccggtccttccagaaacctcctggcctgaggggcaagcagcagccgcaggaagcggacccggcggaaaggagccaccgaggggaactgagtgccttcagctgggcatgtctggggagatcacgatgttcggggagatcgcgatgttcggggagacagcgatgttcgggggcaccgcgatgttcggggagaccgcgacgttcggagggaccgcgacgttcggggagaccgcgatgttcgttcagggagatcgcgccggtccttccagaagcctcccctcctctgaaacccgctgcagtccacaacctcccaggtttggcccccgccctgcttaggctacatccccgaactcaccgacccatcctgcccgggaccagccagacagcaggtgcagaagcgggaggcacagaaggaacgcggggctggcggccgctgccattgtagacctggagctccgtggacaggaggcgctgatggttcccttcgaggctcacaccacggctgtttataaagctgcccagcccggcccgccgcgcgcagggatacactgggcgggatcctaggcatgcacttttttggggatgctccaccccgtcacgccccgggctcgtcatctgacagcggcctggctgacgcaactctcccctccgacccgcccccgcggcttggtggcggcgtgcgcgggccccgagcgggccaggacgccgttccttccgttccttccatggccccatcaaataatttttcaacacagcatttatcattaccccagtgtaaacactgatgcacaggaagatgaagaaacttgcataggaatactcagtggcggcggtgtctccctgtcaccgcctgcgccagcgacacccgccctccctccgcctgcagtcgcgaagtccccgcccctctccgtccagggcgcagccgcttccccattccggagcgaaccttttttgcctctccactaaaagcatgaggtggtctttgagtatattctatatccctttatgacttctggaaaaaaaaaaaaagaaaagaaagaaagccctagagggctaccgtgatcaatcatgatgtgatcagttgtgtttccatggagagcagaagccgagggaagagtctacgcatgcgtggggctcactttgctacacacccttctgtgtctaacaacacccaaatccgtggctgtatctgcacctcggctcagtccctggatggtccctgcagccatcctcaaaagggacgcccgagtgcatcctcctctgagtcaccatgaaaccatctagatctgcgggtagaagccagagggaggtggagggcccagtggctcttggccgcaagggagggcttagcctgcagtaaggactgggcagagcccctgagtcccactttgcccccagccactcagcccattccccaatgaatgagaaaaataggcacagacctcccactccacacagtcttcatgtggggagaccttcacctggtgaccatcaatcaccagggtcctgaggctgtgggaaaggggaggaggcctggaccaagcccagggcctgactatgcttcaggacagggacatgggatggcagccatctctgtgactgagcagggacacaggagccaaaaggttctggcctgatgcactagagcctctgtccaggaggggctacatgaagggtggtcggcaggacaacagtcacacgggggtgggcagttctcagatttgggaggggaatagcttggtgggcccagggatctgtgtgtgagaaaagcctcccatgtacagggctgggggcaggagctcaggttagtcctaggaggaggccactgggaagtccctggcagcaccacccctgaggccgggtgacctgggccagtgactgcgggaacaggaggaaggcagaaggaggctggcaggagagccccaagcaggacagccaggtgacaggaggaggggcctgtgtgcacacctgggccctcctgcctcacccctgctgcaggcatccggccactagactcaggcctgcccaggatgggcatagaagtggcccaaaggttattgtaatggccgggatctagagatcatgcattcagatatggaagtcagctcatattgtggctgaatattcctgtgcaagcttcttcagctttctgggtgtggatgtccgcatgtggaaaatgacagatgctatgaacacagatgaaatgagcagattctacaaagaaccctatccttgcacatgctaaggacccagggcaggtctcctatttcagttgtgagccctgccaccctccctgaagtcagcaaatgccaggcccaccctgaggagagctggagctctgagcccaggccatggcctcttcatggccctgagtgtgctgtgagggggtggaaatgaaaacaagacccaccatcaggattcagacacgtttttcagacctacaaaggatgatttttctctccgtcagctggtgagcctgacat

SEQ ID NO: 586013 - DNA, 4001 bp, Homo sapiens
gacaatccatgcatgatgagcgaggctggacctaccttaagtgcccaatgacccaagaccccctaagaccctagaggtacatgtggtcacaatgtctaattggagaatcacaacagagattccatgtgaatattcagagacaaggcaatgccactcacagcaaggaaatcgcaacattaagcagtggctcctgtagagtactgcaccttggcagagatggggccttttgccatgcatataaagaaggcccatgacaaggcaccagaatggaatgaagcttagggatgcctattgctgaaggcctcagagctgcccattactggtgggctcctcaccctctaggtcattaggaagttaggcccagcagtgagaagacgcaggtggttcttctgggatgggcaggagcagggccaccgggaaccaagaagctgcacaagcagttggacccgatccccaggacaccacgtggctgcaccccctcaccctcagctcacacctgaggcttcagggagggtacctgatggtccccgtggatgccactcagcacaaaggaggggagaataagcccccaactatgggacccccactcccatcacatccacaccacccagaagccacagacaaggtaggaccaccttctactctccaactgacatcagagacatcacttggagatgacaccataggggatggggcactattcactgggacattgtaatcccctgatctgggatcagcaacctaggacagggtccaaatctggtcccccctatttgaaggttgccattgcctgctgttgctctacaaagggacaggactggacactgagacggagaacccacggcctgcaaagatcacagggcatccttcctccctttctagaaagagtttgctgacccctgtctacacagtgactattctctatgacgctgacacccccgtaggaagaacaggcggtctgggccccaagggcagaagtgggtgcctctactcaccagagttcccagggtcatcctggaggaaatggtgcttcccatcccccctgcacaggttctgaggggagcttggggtgtgtttgctggggtgtgtcctcaggcaagaggcagaaggtgcgacgtggtgtaggaggtggtgaggtccccttcatggatggggagacctctggggtgaccagctgggctgaggtgggcagtaagaggacgtgacctgggtggtggcagtggatggtgaggggaggggtggcggttgtctgctgagcccctgggtgcaggtgagtgtctacaggaaagtgcagggaaaaattcaagggcacgcagccctgggggcgctggagggtttgtgtggtggagagcgggtgagagcagagcaggcctgtggctggtgggggtgtctgtgatcgcgtccctgtggaatcccgcttcacccctgtcctgtccccagctccggttccgggggctctggtttttccttcccgagggcgggtgggactgccaggctgcaccagggatccccgccccacctcgctctctgcagccctccggcccctccaccctcctgccagcctcctttccaccccgctccttttcgcctcttcccgggcaagaagcagcctcggggactgcacccagcaggaaggagccgccgaccggaactgaacgggggcgcagttaggggagatctcccccgtccttctagaagcctcccctcctctgaaacccgcggcagttcacagccctccaggcttggtccccgcccggcttaggctccatccacgaactcaccggctcgcccagcccgggaccagccggacagcaggagcagaagcgggaggcacagaaggatcttggtagcggcggctgctgccattaaggacccagagcgctagggatgagagacttgatggaaggagagcctggaagatgaatcacctcaaggttttaaagcctccctatgtacgggcgcgccccccgtttcccgctgtcatagcgtcaagcgggtcatagcgtcacgcggctagaaatatgattggctgccctgacggtgtccctccccttcccgggcgtccctcccctttgtcccaacccccttcgggttggtgtctgggtgtccgcccggctcctgccaagacacggttccttccacgacagactcatttaatcatcacaacatttttttattgaaggtgaagaaacttgcagaggaatattcagcggcggcggcgtctccctgtccccgcctgggtccgcgacgctctccctccctccgcctgcgccgcgaggtccctggcttatcatgctctgggcgcagccacgggcctgatcgcgtcccctccactactgcgccagttcccagtggacgtgattacagtccgggctaggttttattatttatttatttatttatttatttatttagagacggagtttcgctcttgttgcccaggctggagtgcagtggcgtgatctcggctcaccgcaatcgccgcttcccgggttcaagggattctctggcctcagcttccggagtagctgggattacagacgccctccaccacgcccggcgaattgtttgtatttttggtagagatggggtttcatcttgttggccaggctggtctcaaactcatgaccttaggtgatccacccgtctcggcctcccaaagtgctgggattacaggcgttagccaccgcgcctggcccgggctaggttttattacaggagcagcaggcagggttccagaggtttaaaacaacatattgtgcactaaacaactggtcaagatggtaaattttatcttctatgtttttaccaaaattaaacagctttaaaaatatatattaaaaaattatgtcttgttcctgctctgcccaatgcagattggccaaaagagtctacttattaaaatcgaggacaacatggaggaccccgttcctaaaatctcaacctgtgacacacttgctgatttagaaagctcctcagagagatgggccctgagctcccagttcagcagcctccctcgcccaggtccacggatggcacagggggctcagcagagcaggttcaagtgaaagttcctggtggttccccactgttagtgcattctgctggcctcttcgccctgggcaaagggccagccacccttcaaagctaggcacaaatgcccggtcccatgcgtgtccctcatgttcccacaatacagaacaccctcctgctcgctgagacctgggtccacagtgagtgcatccagatctccctgtgtgacaactgctcacacaatttaatttgtgtgtgtaagcatgtgtgacagactcttactctgtcaccagtctggagtgcagtggcacgatcataattcactgaatcctcaacctcctgggctcaaggcttactccctactcaatattggagagtgtggggcaagatagtctgagccactagctgagccgtcctcttgttactgtttcctatgccctggcagatgcctcagtagtattcactcctggatttaccaagccctgtgttagactggtccaggggctgagtgggtcttggctgtgagtgcaactggggtgagttattctgccaggattgggaactgtgttactcaggaaacttttctcatcacccaccccaatcctgtcccagatgggaggagcagtgagtgctgtgtccaggctccctgtcttcccagtgctcccagcatcacatgagctcctccccagatggtgtggggtctgggctctccatgttcaccatgctcccaccattggctccccatttcactgctctcccaggatcatcccagcccctccagggtcactgcctgaccaggtgggggttgggtgaagaggcagaggtcagggcaagacccctggtccattctgactttaggttcctctctgaaacgcgactgcattccacatcctgttcctctggcaacctcagttgggatcacctgtagggcagtgtagaatcctggtgggtgatgaccaattcctgcc

SEQ ID NO: 586014 - DNA, 4001 bp, Homo sapiens
agaacaaaagggtccaagatccaaaagagatggagactccacccggatactactagatttaaataattaccacaaagacaaaatgcaaggatggatgaccaggaggctgaaagttgtcaccccgggaaataactgagctccctcgcccagctttgagaactgagccacatctcagacgcagagtccattactagaaggagagcccagagcccctggtgggctccttcaaccccacagcaattgcaatgactccttcagcctcccccacagagccagatgggtagtcactctggtaactgtacaccatgaaacagcaaatactcagacactcctagtggacacagtgtgtgatccgagctcttcccagggatgtgaagcattaacttgctcccctgttactcatgaggtgcatttggggcaaagtaacagatggacttctgtgtcaggtccagcttagagggatgtgctgggttcatagacccattcaatggtaatttcacatttcctggatttctaccgggaatggatagtgtttgtagttaatgtagtaactattatagtttgtgctggtcatatgacctcccctgtcactactcaactctgctcttatagctgggatgcagccatacacactctgtgatgaggggtgtggctggacctgccactacagctatttgaccctggactccctaagatcccagaagcatgtgtggttggaaaaggtgctatgtggatttcatggctattcccaaccacagaatccaacagggtcccctagtgctcagaagcaaagctgtgccactcacagcagtgaaatcccctcatttaaaagtggctcctgctgtggtcctgggcccctgtggagatgggcctccagctatgggagggcagtgaccacacagcctcagagctgcccatcacagggtgtgctcctcaccctttaggtcattaggaagataggccccacagtgagaagacacaggtgggtctcctgggatgggcaggagcagggccacagggaaccaagaagctgcacaagcagttggctctgatccccaggacaccacatggctacacccccccaccctcaggtcacacctgaggcttcagggagggtccctgaatggcccctggggaccgttaatgctactcagcaacaaaggaggggagcagtaggccccgaaccatgggactccccctcacattcatcacatccacacctcccagaagccacaggcagggtaggacacacttgtgactcttcaacttacacaacttagagatgacaccctaggggatggggcagcaattgccaggacacagcatgtgccctcatctggagtctgcaacctaggacagggtccatttcaggtttctcttttacttgcaggttgccattgcctgctgttgctctacaaagggacgggacttgacacagagacagagaactcacggccagcaaggaccaaagtgccttcagcctttcctttctagaaagggtttgctgactcctgtctgcttagtgactattctatatgacgctggcgtcacccatgtcttgaccccagctcgggttccgggggctctggtttctccttcccgaggacgagtggggctgcggggttgcaccagggatcccctccccacctcgccctctgcagctttttggcccctccaccctcctgcggttcttttttcgccttctttgacccccctcctgctctgcagggcaagcagcagccgcaggaagcggacctggcgaaaaagagcagcgaatcggaactgagcgtgggggcagtccggggagatcgcgccggtccttctagaaggcttccctcctctgaaacccgctgcagtccacagccccccaggtttggcccccgccccgcttaggctccatccccgaactcaccggcccgccccgtcccggaccagtcgaatagcaggtacggaagaatcgcgaggcgcggaaggatcgcggggctggcggccgctgccattgtagaccaggagcgcccgggacacaaggcgcagtcgatgtggagaccagcgtatgaatcacttcggccctcgcatgccagctagtgattgagtgtgctcggccccgtccggtcccgtcccgccccgggatccaggggagcctacgcctgcccacgtttggagggatgctccgccctatcccgccccgtcccgcccttccccgccccaccccaggctgggacccggggagcctatgcctgctgtggctccgcttcgtcccgccccgggctcgtggcctgacagcggccccctctggccaacccttaccctccaccccaggctccgcgcgggccaggacacgattccttcttgaccgcctcatttaattttttaacacaccatttattattaccccaatgtaagcactgatgcacaggaaagcgaagaaacttgcacagggatatccagtggcggctgtgtccccccgtcactgcctccgccagcgacacctgccctccttcagcctgcgccaaggagtccccgcccctctccgtccagggcgcagctgcttcccagtccggagcagaccttctttgcctctccactaaaagcatgaggaatatatagaatatatatagaataaagtatattctatatccctttatgacttctgggaaaaaaaagaaagaaaagaaagccctagtggcctaccgtgatcagtgatcaaatgatcaattgtgtttccatggagagcagaagccgagggagggtctacgcatgcgtggggctcactttgctgtacacccatctgtggccagctacacgcaaatccatggctgcacgcgcatctctgccctgtccctggatggtgactgcagccatcctcaaagcggcaacccgagtgtatcctcgtctcagtcaccatggaaacatctagatctgtgggcagaagccagagggaggtgatgggcccagtggcccttggccgcaagggagggctttagcctgggatgaggagtggacagagatcttgagtgccactcaggccccagccactcagcccattccctattgaatgagaaaaatcggcacagacctcccactccgtacagtcttcatgttgggatcacctgcacctggtgatcatcaatcccgagggtcctgaggctgtgggaaagaggaggaggcctggacaaagcccagggcctgtttctgcttcaggacagagtcatgggagggcagccacctctgtgactgagcagggacacaggagcctagaagattctggcctgatgcactagagcccctgtgcaggaggggccatgtggagggtagtttggaggacaacagacacacaagggtgggcagttctcagatttgggaggggcagagcttggcgggtcccaggatctgtgtgtgagaagagcctcccatgtacagggctgggggcaggagcccaggttagtcctgggaggaggcctctgggaaggccctggcagcaccaccccgaggccaggtgacctgggccagtgactgggggaacaggaggaaggtagaaggaggctggcaggagagccccaagcaggacaggaggaggggcttttgtgcacacctgggccctcctgactcacccctgctgcaggcatctggccaacagactcaggcctgcccaggatggggatagaagtggcccaaatgttattgtaatggccgggatctagagatcatgcattcagatatggaagtcagctgatattgtggctgaatattcctgtgcaagcttcttcagctttctaggaatggatgtctgcatgtggaaaatgacaaatgctatgaacacagatgaaatgagcagattctacaaggaaccctgtccttgcacatgctaaggacccagggcaggtctcctatttcagttgtgaggcctccagctctccctgaagtcagcaactgccaggcccaccctgaggagagctggatctctgagcccaggccatggcctcttcatggccctgggggcg

SEQ ID NO: 586015 - DNA, 4001 bp, Homo sapiens
gctgtcatgtgtgattttcccactcaaatgaacattttctaagcaccggctgtgtatcggacactgtgggaagttcaatcctgccaaagatgacgtcttattccgctctcaaggagcttctgcaggaatggaattcattggcttggtagctgagttctgtgaggcacaacgtcctccttcagagccctgggaggcccctctggttgactcactagaggctgcactggaagagcttccagtatccagtcctccccacgcccttcacttgcactacccacctggaactgaggcttggcccaccttcttccttccaacctcaggacccatgaaaactgaagccccttcctagtgcctcttagaccagggcagaacctccactgtatcctcaggattgaagactggggcagtacctgtttctcccatgtcctcactgaaagtgtgaataagaagcgggggttggcattgttctctttgcctaaagagccaacccagcagacaatgcaccagcctttttcaaccaggcatcctggagggcacacaggtgaatcagtgaattggcagtgtcccaaagctgatgggaagggggttggagcagcaagctaccgttgatgtcccatcatttcttttggttctttcacattagtaataattataattccaactgtaataacaatagctaacattcgcagagctttactcaatgccactgtgttaaagcactctccatggcttgtctcatctcatcctcacagcagccttaggagcgaggtgttatttttatctccatttcacagataaggaatccgagctttctccccacagtgaagatggatagggaattactaaacaactgaagacaggcaggaaggaggagcaaagacgaacaaggacttccagagataccccctttctctctccaccccttcttttccccaagtatcttcctttccttctctagaagaaataaagttggaagagaaagaagcaaaaatgaagtaaagacaaatagaaggacctaaatttacatcctcagttatgtggtaatacccaccccactacaccacacccccacctaccaaggtaccagtggcaggggatggaattgctaaagggatgaaaggaggggccccagctcgcttacacagcagtaaccttcctggggccaccaaagaccagagtccagatccccagtgaggtgcacctcactgggtggtgcagtagagtcccctggctcaacctccgaccctggagaagttggcatgcaccactcccaaagccccactgggcctctcccagggtgactgctcttccaggctgccctggccctcactgcatcctccctctggctccagaatggggaaaggtccggagtcttgctgaatggcaactatagcactgcagccattcgagtgtgacttggggcatcccaaccccatgcctggactcctcattacccactcctccagtctgtcttgctccagaccccagatcaccctgggtagcgggtccccgaaacgagagtcctttagaatgctgccatcacctgtccctaggcagttgcatcctccagcacaaagatccaaactcctgctgcaaagttctgctcataccctttaagaaaactctcaacctttcctccacctcactggttctccctgtgcctccccaacacctgatagatgtccagttactgcagaacataacaagtactgggatggatggtccaaacccaagtcatgaatggcatttgttagtatagtagacatttccgcaggacacagaatcatcccagtggtcctcatacccattggccaagtcccattttcctcccctcctccagcagagggtccctacactccagcaggcaggctaagctggcctggctcctcccccgaagctccaggtaaccccatcacaatgcccatcccctctccagctgccccaagggggtgctcaacttaccgtctaggagctcttagaggctgctggctggtccagttccttctccgagaaacaagggtcagccagattcagtcggcaggccagcagacaagtggaggtgggcggggaatccaggcaggagtggcctggcatttcctggcagagccctgcctcccagctgtctaaagaggggtgagggagagtgtccctgtctattggcaaagtccagcccaggtaagggattagctgaggatcccagaagtcagtgaactttccagtctaggtctggaaggaaggagggaggcagggagacaacctgggtgtaggtgctgcaccttgaaacccctccttacagtgccctctgctggtgagtggctgtccccagccagaggctattattaaaatagcagataggaggaggagggaaccttcatctgagtttcttaaactataatgtgcacaacagtcacctgggagatcttgttaaaatgcaggctctgattctgtaggtctagtatggggcctgagattctgcagctcaaagaagctcccagctgatgccaatgcaaccggtccaaggagcttagagagcatctagttccacccgctccccacacagagaagacagtggagccactgagacggttaatgactcaccagttgctggtggacctgagatgtacccatatttttccttacacaaggtgctttctacttcccccacccaaagttggcagagacactgccggttgggagacaactgaactttggggccatttgccattctgagttcttaaaactctgcctaggagcggtggcaccacaagaatgaaaactccttgtggaacttttcccatgttttcggctgtctcctcagctcctggtacagcctgatagatagaaggtgttcaataaacatgtcttgaatgaatgagtgaagcagttgagagggaaaaggatgcattttggctccaactggccaacactgagcccaggtgagccacacgttgggtatgtaatattgggcaagctacttaactcctctgaacctcaattcccttgtctgtcaaatgcagttaagaatatctaccttgtgtgagataataattgtcattattgagctaataaatgtcaaatgcccaccacagaatgggtggtcaatagatggtaaccgttgtcaccagggtctggcctcctgcagttgaggaggcatggtgaacgcccccccaggcccctagttatcatctcccatagaaaataagtaacttcctctgcttttgtctcagttaataattctctagcctcttgtctctgactgcaatgccctcccctctgcttccttccctggtggaggtgagagggtggaataaacctcccaggggagcccagtaccccaaagtgcagagatggtagagagcgggcaacctgggaagcagacctcatgcctaaagacaagccaggaaggggtgctcagaactttgatagggaatgaaaggagtggggtaggggtgtttgtctttgttgaacaaagctctgtctgagtcacacaggaggctggactttgccaacagacagggacactctcccctacccctctttagggcggctgggaggcaggactttctgccaggaagcgccaggtcactcctccttgactccccacccacctccacttgtcagctgccttctcctctgagtcataaagtcctaggggtttgtgaaagatctgtcaagctagggttctaagccaggaaggtcatgccaaccaggaggctataaccaggggctgtgttcatggattatgaactcacttcccaagctagttcttgccactcttggggacaatcccaattataaggaggctctgaagaaatgtgaaggctcctaccactcactcccatggccacagagctggttcatgggatgcaaagaccacaggcatcaacagcattataactgggggctgagctgtcacaggagggccagtgtcaaaccctcaccacaagccctcaaacattccatcaaggggtagcctccagaggccaggcaccaaggagggt

SEQ ID NO: 586016 - DNA, 4001 bp, Homo sapiens
catctccagtcttttgagaaggaagggctgacatcatgagacagcagctcccacttccaccagcccaggaggagtgggaagtgctggcggggcgtgggacaatctactccccaggcagctgctcacagctgcggagctcatccagatgccaccatgagtgattccccaatgaggcacccccaaactggggctgaagaggcaaagggttgtctgcccgcatttgcccacagccttgggtcctgccgtcacagcctgagaggagggacccctggcagctcccagccccctccagcccccttcctctggcttccaagtccagaggccaattttcagacagtggctgagccacagcggatccaccagaactggttcctaggaatgctgaccccaggggagctgtcggttcctaggaatgctgaccccaggggagctgctgtgccaggaggacagcagggtctccttctgcaggcaggtgagctttctaaagagaaagggctactgaccagtccacatccttgagactccctccttccagaaagtgcacaccaaccacattcaacatgcactcacctcaacccaacaggcatttcactcacaccagcattctgtgacaacaacacaaagttctgggcaaagcagggactccaaaagtaatgaaccattgcggcaagaaaagagactgtgttcccttccacttgactttgagagtcactgttggctgccattttatcctctgtaagcctgatcagaaatagaaccagataggagttcagcaaaaggaaacattacttgagaattcaggactgaattccagcttccttggcaacccaggagtcccaagtgtttgcacaacaacagtgagaggagaaacctcggattctgagttcccaggtgtgcttttctggttccatactatgcacacagtaggtgcccaattcttattcttcattgacgaaccatgtaagaccacactaatttgtcatcagaagctctgaaatgttttatgtgaccacaccaggccacagggtacaacactgtggcaatgaataagccgggggagtaacaatagccctgcttcctgaccagcccttggaattccctggaattcagactggaatccaggtaaagatcagacttgaaatgtaaccagcttgggaaaatgtgtcaggtctatgtctaggtgcacatgatgaatgctgcagcctttcggagaatgccgtttggctttttcatgggctcacggaactatggaggagagcatgccataaggagttcaaagtatagagagatcatgttgtcaaagttcacagtttagcttagagtaggcttggaatgtataaggtctagtgacatttgataaattcacatggctgcccctaaccacaaagccaagggcatccaatcaatcatagaattcacaatgacttttcctgtgtctccttttaaccacccaaaggcaaagaatgtcccaacaaatcacagtcccaagacccctgctgtccttgtccaagagcaacgtgcacctcgctgttgtgcaatcctattgagacgtgagtgggaactgctcactgtaggactgcatctgagaaccactgtttgttttagaggatttggtacagagtgaaaaagaaacaccaggtgaattagatttttcaaatttccaattcattattgtctgtgaccacagggattcttggaggccaagaagttcaggtaatttgatgaccggacacacatacctgcaggctctgcagacctccataggctgtaaagagaagcaggaacccaaaggaaaccacaaggacgttccttagacttctgtccattgtgctggatgaaaagatcaatcaccagtgaacacgtaaatttgtagctccctaaaagaaaccaattgaggcatgggaaaaacaatcagtaccaagaagtcccattctctctctcatctgagctagaggtgaaatgttagaggtgtgttagtcattaagactgtcactcgttaatgaacttggttatcactgaccccatgaagcatacgggagctctgttactcatttaccttctctgtgatccacaatgtccactttgtatggggcaaaagatcattactcttaccagcttctagttaattgcgcttttttcctattaaattctaatagacatggtccagatggtaaagtgatatgtttcactttttatgtgtatatagaatagaaccttccacagtaagagaaactgtcagaagttgtcagtggtgcagaatgaggacttcagtcttaaagaacaaagcataaatgtcaacttcaagacacatagttcaacttctgaaaaagagctaacgtgattgtaagatcctggggccaaagtcttagtattgcaaagactgtacagtttcacaacacagtacagcaattattaaaagaaaaaacaacttacatgagtatagtactttacaatatgcaaagaatttcatgcattatttcatgttaccaacaatagtgctatgctaatgatcattagaaatcttagacccattataagacaggaaacagcttcagaaaagttaaatgatttggtattttggtctggggcagtgttgtccagtatggtagccactcgccacatgtgactattgagttctgaaatgtggcaagtgcaactgataaaatgagttcacaactgcatctccttttagttaattacaattaaaatttaaccacatgtggctagagacaactgtattagacggggtaagtctggagctttaagcaacttaccacaaatgtcatagctaataagcaagaaaaattatttttattcaattataagtaaaacttgatgtctgcagattgtttccaaagttctgtgaagtcagccatttctgtctagattagatctataaggcaaatctcgcaggtaagtctagcatcctggcaacactactcagggaagcttgccagaccatcagaagatcagggccaatgataaatggggtaaagttcttgtcacttaatgtatttcagtgaaaatgaaagttttatgaaaacaatagctttttatattaactaaacatggactatcatgcttacatagacataagagccacgcagtctagcaaagggattctgagcatggaaacagatgagctccacgggttcacaccctaatcctgtaatttgttagctaggtgatctcaggtgggtcactgagtcaccgaacctgtttcctctttaaaaaggagggttgcaaaagttcaagacttggataattttgaaagcccctagaacagcacccgatatatagcaaaaatgttaacttcaagatacatatatggttcaacttcaccaataaatgttatcaccaataaatgttaattgactaagatgatattttgactttcagagacaatacaaattagaataatatgtaaagaaattagcataatgtggacttcttcatactaaccgtgttatcgatcaatcaacttggaccttatttttattttttggcaacactttagtttacttcagttctggcctctcattagttcccatggatgacctgtattttgatattagaggaccttcctgatgttttattgcactgtctgctggtctttctcccttggttgcttcaactcaccagccccatcctctaggactcgctctctggctctgggggctgtttccagaggctgctcttcccctccccttcaccagcctatgccttctaaggagcttccctttgtgcacaaataaacctggtctgtttccatccttcccagccacaccctccctgtccctccagcacttctactaggattgaatttctgaaaccatggcttcagttacgtctgctttttctctcttttcctcccagttcctcccctttatctatgttaaaagggattttttttaaatgaacagtatatttcactctctgccttttctctgtagcagaataaaatgcttctcttagaggagataattcccagcacccctcag

SEQ ID NO: 586017 - DNA, 4001 bp, Homo sapiens
tttcgggctaagctgaaaaaaaaaaaacccatgttccttctgtaacaagtcttggccaagtttcacaagtcatttcttcagactgtgtgtatatgcatctcattatctcatttcatttctggtctcttgcccgagccccaggctcaaatatagcactgcctacttgacattgccacttggaaatcagtgtacttggcatctcaggtttaacctgcttaacaccgaactcgagatattcttcctacacttcacctattcctacctcagtaaatggcaccatcttagacctagatgcccaggccaaaaaatatctaggtgctatctttggttcctctcttttcctttatcccacatcccatatatcagcaagtcctgctgactcaacctgcgcataacctgaatccaaccacttccatcttctgtgctgccgtcctcatccaaccccccaccatctgtcgcttatagtaccataatcggcttctctccagcctctttttttgttattgccccctatagcccactcaccacatacaaccagaatagtcttttaaaaagtaaattagggcacatcagtcccctcactaaacatccccagtgacttctcactggccttataatgaggtctaaagctaatcagaacagataatatcctactgtgcctggctccggaccttcaccttagcaaactccaccttacttactaccctgcagccattctggctttctttctgtcctcaaacatgtcaatctgcctcctgcctctggacatgtgcagtgtctggaatgtccttcccgccaagtgtacatggctggctcatcctcttgccttaggtctcacctatgtgtcatctcctcagaaaggccccactaataacattacccttttatcacgctaccctattttctatcgatcacagtacttatctgtcttacgtacacttacctgcttattgtgtcctgaactacaatgtaaaacttcatgcgggcaggacttcacctgtttaacactgctgtttccctagcaccgttccaggcatatggtaggtgctcaataaatacgagctatatgaatgaatgaatcccagagctgcagcgccaacctggaggaaagcaagaacataggcctactactcacacacagctgcgtgagctgaggacccaaacctgctgcacaggcttacaggggctcaggaagaacgcaaacgcttagcggggacctgcagagttaactggggattagctcagtcaatacacaacactgcgaaataatgaggtaatgctaccgtgacaaggaagcaaaaagctgaggctgtcaccagctgccactggtggtgtgggtctcaactctctctgcaccttgaatcacctggagagcttttaaaactctgaggtcaagaccccacccctagagattctgcatttgaagtttttgtttgttttttgatttgtagagacggagtcccactatgttgcccaggaggtcatcctgggctcaagcgatcctcccgcctcggcctctcaaagagtgctggaattataggtgtgaaccgccgcacccggcccatctggagtttaaaaaaagcttcttcggcaattccaaggtgcagccgggggagagcgctgaatacaacgggcgtcgctatcagtagctccctgggggaaaaagggggtccgcgctcacgtgctgcctggaaagagggcgcgcgcatgcgcagatccccctgctagcgcgctcgttggccccgcccctgcctcgtcctttcctcccctcgtcccagccgcctccccgccggtcacctgggtattctctccctcccgaaaggcctgtgctacccgctgtcgcaggtaagcgcccaagtcccggccccgtttggtctcgtccactggccattcctcacagagcttaagaaaacgccggtaccggctggccgccatcttgggccccgcgtgttcccgccttagcgggaggagtcggcgccgacgaatggcgcttgcgcactaagcctcgccgcctgccttaggagtggagcgggaggccggagtgggcatgcgcgactttgtaggcgcaccgctactctccgtgtaggggcgctgctcgcctttctctgcaagccgagctaattcagtcttcgtcctcctggaaccggcccagctcccaggggcaaggcggacgtggagtaccccagagacagctttgcgtctctttttcaatgactgcacaagcttgagactaaaaaaccctcccccgaggcctccgctgttttgcataaaccaatatatttgcatgtaaatacaggttactggatgaaaatatgtttgaacgttgttcgtgggtgcccccgtacctgtcactatcccttggtactcggcctcaattccttctttagtgcttcctagttcttgttcttctctgcccagtccctgttagtatcccttctgttccccccttcctacccctcataagccagacatttttctctgggaggcgcaggttttctagcatgagcaatgccaactgtgttgattcagactagaaaaactttttttttctttacaatttattattttgtattgtggtaaaatacacataacaaaatttactatcttaaccattttttttagacaaggtcttgctatgtggcccatgctggtctcaaactcctgggctcaagtgatcctcccaccttggcctcccaaagtgctgggattacaggtgtgagccaccacacctggccttaaccttttatttatttatttatttattttgagatggagtcttgctctgtggctctgtcgcccaggctggtgttcagtgaatggcgcaacctccgcctcccgggttcaagtgattctcctgcctcagcctcccaagtagctgggactacaggcgcccgccatcatgcctggctatgttttgtatttttagtagggacagggttttaccatgttggccaggctgatctcgaactcctgacctcaggcgatccacctgcctcggcctcccaaaatgctgggattacaggcgtgagccacggtgcccagccagccatttttaagtgtacagttcatgggtatgaaatagcactgaataatgttgtgcagccatcgcaccatctccgtaactcttgtaaaactgaaactccatactcattaaacaataaatccccatttccccctctccccccagcccctggcaacgaccattctattttgtctgtatgattttgactactctaggtacctcatgtaagtggaatcctgcagtatttttgcaactggcttattttgcttagcataatattttcacttcaaggttcattcattttgtagcatatgtcagaatttccttcctttttaaggctgagtaatattccgttgcatgtatataccacattttgtttacacatccattgatagacacttaggttgcctccatgttttagctcttgtgaataatgctgctatgaacatggatgtacagacatctcaagaccttgctttcaattcttttggtatatacccagaagcggaattgctggatcatatggtaattctattttaagttttttgaggaactgccatactgtcttccacagcagctgcaccattttgcactcccaccaccggtgcacaagggttccaatttctccacatccttaccaacatttgttattttctggttttttgatagtaaccatcataatgggtgagggctgtatctcaatgtagctttgacttgcatttgtctaatgattagtgatattgagtatctttttatgtgcttatcagccatttgtatatcttcagagaaatatctattcaagtcctttacctgtttttaatcgggttttttttttgttgttgttgttattgagttttaggagttctctgtatattccagatattactcccttcacagctatgtgatttcagaatattttctcccattaaaatgtgtttgttttatcaagtcttctcttatatgtctctagctacatcac

SEQ ID NO: 586018 - DNA, 4001 bp, Homo sapiens
actgatctagtcttttataagggaaaagagacataagcagacggcaaatttgatctttctaaccccaaatttgcaaacctacctccatcaatttaaatttgatgtcctgaaaagagataggtataactaataaagtacagggaaaatggcctatgagaaactgattatattttctcgctgtggtacagataagctcttgataaagatgagcattaacacagataatgctagcaaaataataaacaaaaccaggcatttgacctacatactgtaagcaacctgtgccttttttcaaaaacactgactcaaaattaacttggtaatgtagaggcaatttctgatgatttttctgccatatgtaatgtctaaacagacagaatcatttggtacagtaacccagaattcggcaattatttatctgtagttttccaatttccatttgaggcaaaagggcaaaattaaaagtccaattattagagcttccaatactttttatcatcaaaattgtgtctgggcactggagactgggaaggatgggagtggggtgaggaatgagaaattgcttaatggacacaatgtacattattcaggtgatggttacactaaaagcccagtaccactaggaaatatatcctcgtaaaaaaacggcacttatatcccttacctttatacaaatttacaaaactgtggctgaggatctccgtgatctcccccacatttagagctttgataggatgcacgggactcaacatatagttgaattcatggctgacatttattacacaatgcagtatggatataaaggctcatcataatagaaaaagacacaagcggagtctggaggaatcacgtgtaggctccttatgcggtctccctcccaagaggggtcaaacaaaacacatccttcctccatcagtgaaaatgcagcagtttccgcgcagggaagcccattaaagacttggtgtcccggatttttacagaagctggtaatttcggcataaaacatactgttcagcacaaacccaaaaatctaagttcccagatgccaaacaagcaccaacattgcaagcagtcctttctaaggatagcagtcttaaggcctgctatgttaactctttttagcacaaatatgttctggccatttttctcatgcggttttccaaacaataaactttacagttttcaagtcaccatcacttaacacttgtcttttctctaaagtaggatgtgcaactaagttgtttagaaagctttgtttttaaacaggctatgcaaaaagcccatatccttaagaaaaaaaaatccttttttcctactcttgggcaattatttatgggggttggaaagagaagaaaaggtcactatctccttttatataccaagctcaaaaagatgagcagcacttatggttttgctgtgtatcacgctcagttctaagcacttcacaaatattaacccacgcaaccctcacaaccaccttaggagataagttgctattattttccgcattttacacttgaaactgagaaagagaagtgaagtgacttgcagaggtcccaaagccagtaagcggtggatggagatgcggacccaagcagtccggccccggagctcctaatacacgacgcttccagaaaagtcattagacaggcttcctccggtcaccaacacacacacaccccgaggatgtgaagagaaatgcgccgcgatgaggcggacggaaaggtgtggggccgccgcgcgcccaggtcaccaggggactcgggcccctcccaggccagccccgacgcccagggcttctcccgcagccgcatggacccggagccggcagagcggcgctcacacggccctcggtgaccgcccggcgcccccagggatcaggaagccgagtggggtggggagcctctcttccagcctcgcccacccacaagggggtcaaggtcgccgaagcgaagaccgagaaactgcggcgaccataccgccgctgcgaccaaagcgccgcgttctcaactcaccccgccgggccgggccgcagcgtctacaacctggggagactgcgcctgcgcgctcgtcccgctcccggcagaggtggggcctcgttcgcccgcccccagccaggaccgggagggttccaggcggcgcgcccggggcccgggagcgcggggaggggtgaaagggcggggccggcttgcgtggcgcctgcgttctgcgtgtccgcagagcccggagagtccctgataatctaagactcatagccaccgactagcaatttgttaggatcctgggccagcgtgcgcacctcggatgttgcaggagtccggcttaagtcccacttgttgctgggcaccttctgaaacagcctccgatttccctccgttaccctcctctgaactcttttttttttttttttttttttgagacggagtctcgctctgtcgcccaggctgcagtgcaatggcaagatctcggctcactgcaacctccgcctaccgggttcacgccattctactgccttagcctcccgagtagctgggactacaggcgcccgccatcacgcccggctaattttttgtattttgtttagtagagacggggtttcaccgtgttagccaggatggtctcgatctcctgaccttgtgatccgcccgccccggcctcccaaagtgctgggatcacaggcttgagccaccgcgcccggctccgcccccacacccccgccgccccctgaactcttaaagtcacatctaacattcgtcatatattattgtggtttttcccccattgctgttgtcttacctatccttctctcttcctagctagatagtacatttcttgaaatacacctatacctcctcaaagcccggttatctgttgaagtggccagcacattgcatgtttagtaaaagtagttggtttgaaaatattttgtttcaatcatggatattgcaaatgccaacactggttatggataggttctaaaagtctcctgatctttcacaactcttcagccaagggacaaatgtggctttaaggataagagcattggcgtagaaatcagaagatacgagagttaaaattgcaaacactaaatttttctttaaaaactcttctaacagtatttacatgtggagaacttggcaaagaaggttgatatttgcttatatcgtacttaacaaggaccattcatttaacaaacataattgagcacagatatgccagttgctgttacaggtatagaggtacactatcattttggggttaggataatttttttccctagggaaaaagaaaatattcctcaaataagaagaggtcatgtggtgtaattttgaaggcaaaattgtctacttcataaatcaaaagctttcatgtattttaactttggatttgacctagaacttggaagaacaagaacaagcaaacttgagcaaatctaaataatttgcatcttaattgtgtcactgtaaaagagattttaaaaaatatatgtggaaacccagtttatgattgattttttaaaagggattgaattagattatggaaatttaggttcttttcttcataagaaaaaaattagaaattatcaaataccatacaatacttaaattttcttggaaacgacaaaattcaaagctatcttgatttccactagatagacccttagcataaccaaaatctccagagatttcattctttgtttcaaaacttggcataaattaaggaaaattctctaacactattttattttatttctgatgttcctcatttaccttttcacttaattgaatgtaaaatttactacttgatggattattcaaagaaaggaaattatttttaaatattactcagtaagtatgttttagtgctattacaatgacattataacaaaacatcaaataaaaatatagattaccttaagattacctaaccatgtattttccaaataatgctaaatatcttaaatttaccatcatgttctgtttggaaatatggggaatctt

SEQ ID NO: 586019 - DNA, 4001 bp, Homo sapiens
aggtggaagttgcagtgaaccaagactgcaccactgcacaccaatctgggcaacagaggaagattatctcaaaaaaaaaaaaaatagaaaagaaaaaaaactcaagaaggcatgtccttcaaaatagattgacagaaacacaacacagcatttgacatagctatctagaaacaaaagaattgtgtagcctgctttacaagatacttttacaggcaagatgaacctatgttaggctgaagatagttgtttattcatatataactataaacatcatatacaccctaagatatacagtaaaaggtaaagatatagaactttatcctcacacatagtctagcagcatactcagagatgaagtcaaaagaaaacttctcatgaaaaaaactaaaaagcttttgccaccatggttaaccgtatctgagatggtttaactcttggaatgtatcagagaaaaatttatgtgtggatggctggcacataaaaaggctaactgggatacatatgagaattatagttaacatttactaaacacttacttcattccagacattatttcaagttttttatatggattaactaatcaattgctaagagatagcattttattgtcctcaccttatatccaaggaattgaggcacagagataacatgtccaaatgtcaagttaatagtgactggttaaaaacggtctggctccaaatccatgtttttaaccactaggcaaagaaggttgcacaaatacatgccatatacttatagactctgggaggagggtaagattcaggtagaggattgtagttatctgttatttttaaattattgacatgaatgtataaacttgcataattaaaaaaacttttatatctcataaacttaaagtcaaaccttttactgagctttctgtagaattctattttttaagaaggtcttgctctgttgcccaggctggagtgcagtggaatgattatagctcactacagcctcaatctcctgggctcaagcaatcctgtcaccttagcctcccgagtagctagccaccacacctggctaatttttttttttttttttggtagagatgaggtcttgctatattgcccaggctggctagaattcctggtctcagccaggcacagtggctcacgcctgtaatcccagcactttgggaggcatatcccagcacaaggtgggcagatcacttgaggtcaggagtttgagaccagcctggccaacataatgaaaccccgtttctacaaaaatacaaaaattagccaggtgtcgtggcgggtgcctgtagttccagctagttgggaggctgaggcaagagaattgcttgcacccgggaggcagaggttgcagtgagccacgatcacaccactgcactccagcctgggcaacagagcaagactccatctcaaaactaaataaataaataaaagaattccgggcctcaagccatcctcccacctcaacctcccaaagcagaattctatttgattaccaccagacacacatctgcacttgctcaaatgaacgggatcctcgtggtgggacaaacatcatagcaactgacatatttggagaaaaagaaggggtagataattactcttgacaggtcatgacagatacgatctctatcttaccaccaagtttcaagacctaccctagacttgtttcagtatggttgctggtctttaggtcccattttaacttcaaatatggctgtgtcccctcttagcttaagttaattcgtggtactaaaaaattcacaaggttaagatgaaagcaagcggtgaaagttcagaatggagttagacaaaacagtaactgatcaattaccctcatagtatgccaacctcagccacacataatactattattataaatagctttcattaataatgttttattacagtttttatttcttacccattaaacaagttttttccatcttcttccatattattccacagtcattggttaggtttcctcttctctattacctacaagtgggaaacaatctgtaagattgggctaatacatggcaagaaaaaagcaatttcattaattgtaatacaaattcaaaaaaggaccagtaaattacaatgcattaaactccctacaagtccttaaaactgatgtaagagtaaaaaaaaaactgtgatctttcttttcagctaagagtaaccaaagagtcagtcacttatgggtagactgatctacaaatggaagtattaaaggtttacttcctgaaaaaaagcacttctgcatttgttttaggtcttaaaaattacacattatatttgcatacaatctgaaactcaggaaaaaacacacaaattcatggtaacaaaaatactcgaatatcaaaagctaaaattatttttgcgtaagcaaaatatataacaagatggcatgaggtggtgactcttttgtgctaagtgggtttatgacctatatgtaagcggcatgcttctttaaaagcggtatatattctgtacacaaggacaatatattagccaaagacatctagagtttatgattttgacaaattatatgtataagcatgtttaaggtttctgacacattatcaggaagtaggactcagtattaagcttgagatcggcaagctgggccaccactgtaagaggaaagaaaattctctattgtgtcatcctaacagctaacacagagttcctcttcgaagaaactttaagaaaatatgttcccggccgggcgtccgccgccccatctgggaagtaaggagcccctctgcctggccgccgccccgtctgggaagtgaggagtgcctctgcgcgactgctgtgcaaccatccaagtatgaagtgacagccttgtgtgttatctttctgtcctccccaagtttgcattttcgacattaaagtttactttttaattaaaagttttaaattggagtacatatatatatataaaaagaaagaaagaagaaaatatgttcccggccaggcacggtggctcacatctgtaatcccagcactttgggaggccgagacgggcggatcatgaggtcaggagatcgagacaatccaggctaacatggtgaaaccccatctctactaaaaatacaaaaaaaaaaaaaaatagcagggtgtggtggcaggcgcctgtagtcccagctactcaggaggctgaggcaggagaatggcgtgaacccgggagacggagcttgcagtgagccaagatcgcgccactgcacttcagcctgggcgacagagagagactccacctcaaaaaaaaaaaaaaagaaaatatgttcccataatatgggctcccatcactcatgtccagtccccttggagtaggtggtttgctgcagaatggctggctgtcaagatcctagaacggttgtcaagaaagggaaattgctctgcattagacagggaagaatttggttttatatcgctgaaaggaatggggagaagaatgaggaggagagggaaagaaaaagaagaaaagagttagtataatggagcagagctgggattaggtgggggtgaagctcttgggtcaagggaggtcagaaaacactttcagaacaggaatgttttagtagggaagttgtttgcattaatgcaaaggctcactccacctctattttgcccctttcttcaggtaggtacacaaaatctgcaaatgccctgtgtgaatagggcctttctgaaaatcagagggagccaagtttcacatgtgggtgcactatggtgcaaatcagtggcacgaggccagaaagtaggtcccaggaggcagaagaggttacaagatcatgaaacctagcaaaaacacaaatatttttagggagagcttacaacttctagttctaggttcggggatctgaggcaaccgtatccatgaaaagctaagctgacactttatggacaggggtttcacatccacaaaatgtcccccaaatgaccctactttcaacataagaacaccaaaaaatttaaagttaacttaattac

SEQ ID NO: 586020 - DNA, 4001 bp, Homo sapiens
tctgcctttctctgaaatgatttcttaacattctccagcaactgaaaacaataagcagaaatctggttgattaatcaaaagaaacagattctcatctttctctatcccaacaacagtgcgttctccattgaaaatgaaaatgctgtccataaaacacagcccagcacttgtcaggtgcaacactcctacaacactaaaactatcacatcacacgagtacaccctaaataagcacaccctttccccgaattatcacaacactagtgaaatgcagaggttttcaacacccagagtttatactttatcatccatacaagaaaaaaatcaaatcaaaatgagtctcatttcttcaaagtggacaggaaagtcaaatcaaaagcaatgaagggtggaagcagattcaagatttcttgagagaaagaggtttctggaatttcctacttttagggacaaaaggattcacagtttcaacacacagttctctcctcaacaaagaattcctttcctgcaccccccacctctgcccttactttttagtctttacccctgtctctaggtcccctttcactcaccatggttcctcgtcttctgcaccaaaggctctcttacacttgatctttcactacagcatttctgccctgacccttgcagaccttctggagcaactccccataacacgcacattcgattcccacccccctgcagtctaccccagttctacatccatcaggactcccccagcttctcttagccccctctcttcccttactccccatctcatcctttaaattctggggcccatctcttcctgctcctctcaccatttgcttttagccctgtctctttacctcactgttttcaccttggatcttgctgaacctcttcaattaacgtaattacccagttatccttgtcccagatggccatcacttcttacaccctaactctagtctcctttcagctcttctggtcccagaatcgtcctacagacacccatctcttatctgtttcctttcgcccttccaccacactcttattcctgactccacctggttccagtccaggtctcatttgccctccctcactttacagaatttacatccatcgcccacccactaacccattcctttctcagaacctcgccagcagttcccaccacaccgttggtcccagtccttcagctcatctcgctccgcactagttcacaccctcgtcacgtctggctcttaatcactctctctttcctactcccaactattaccccagctctgcccctccttgtcttccacttccaacacttaccccggtacccctcaccccaacaccacccgctacgaagatttccccttcaaacccctgctcttacacctaaccccaggatccctttccccagccctaacctcattccctgcccggcttccttaacgcccaccctggcttttgcctccttcctatctccttggctggctttttctcactcctcctctccctggcttctaaccctttctccccttaatcctcctcatctcattctcaacccggttcccctcatcgcctccaagccttcctttccctctcccttcaacgcttttgccccaacccagccgtcgcccaccccgccaaaataaggcgcccgcgcgccccgactcccggctctcgcctcccgccgcccccgccccgggcgcccccagcccgccggcgccgcggtcccgccccctgccgccgctcctcccgcccgcgaggcgcgcgctgcctttgtcgcccctcacccggtgtgtgaggattttgcttctttaaaggggagggctagtgagccggagactcctatccccgcctccgagtcttagaatgggctccctggccgtcgcggcctccccggcccccgttccccctaccccctggagctacccactttgctgcctccccacctcctccgtcccctcccccggccccctctatttaccgccatcatcagcacgcgcgagctgtcaccagggcgcgagacaaccgaacacggccccgccccctgcccgtctattggcccgcccgctggagccccgcccctcaggccctgcattgcgccaacggcgcagcgctgggccgcgaccccggcaccggcacccgttccgagggttcgcgccgcaggcgcaaagtttagggtcagccacaaacgcgcggccgctttgagcctggcgtaaggggcggcggcgtagggggacgttgtgaatagctggtcgaagtttggttgaagcacaggagggtaaataagaaggtttccagacaaagagactcttaaaggtacagactcttatgtctgtccctcctccttaaagggccagagacgctcccgagcccatctccgcccccttcttcccggggaactgtaaaggtattttacatgagtttcccatactcttttcggttcacctttaacacctctccccactgcgaaggacaaaggctttctcactatcccgtccgtatgttttgttttattctgttaaaagacgttatttctgtgttgttcctaaagcagcagccctcaaaccgtggggtttccggaggcagcgtttgcaaaagttactattggctcccaggcgggtgagcacgtgtctggcttttgccacagatgacccaagagagattcagctgttttatggaaatcccccacaagttagaggatcgctgccggaactgaagaagttcagcagattgtaaggcttgggaaataaaccagactgacttggtagtggtccattgggaaacagaacagcacctaagctacaaaaggcttaggttaagcagtctcctaggtgcactgtcttgaaactacttgcggggtggtagtggggggaggggatgggagtctcccaaaataagatcaacaatttcaacacccaacacatagctaaggcagataaagacttacatttaaatataaggacaagtaaaagaaacagacattagctatagtagtggctcaagttacacacctgtaaacaggagaactaggtaagcacaaaaaaaaaaaaaagaacaccacacacaataggaagggggaaactacaatgcctggaccaagcgctgtgtaggcaatttattaacaacttgcacttttaaaagaggtttgatagaaggagaggaagtggagtgtttcaatttggtttggtcgggatttatcatgaggttcaaggcctcagagttagattcagaatttagctctccctttgtcgtccatcacagttaacataattctttttaaggaattcttaacattataactctaattatatgtcttattcccttactcaacaatccccaagaaaattcttggagaagaaagattgttacttattcaatgttagttccataacaaggtgcttttgctgagtgaagaatttgggagccacttaaaacttccaatggaagggatgctcccagaatagcaatacaggaggaaaagtttctcagtgatgtgagcatgtattagatcagtgttctcaaaaatgtggcctggaggccgggcacggtggctcacgcctgtaatcccagcactttgggaggccaaggcaggtggatcatgaggtcaggagatcaagaccagcctggccaacatggtgaaactccgtctctactaaaaatacaaaaattatccggacgtggtggcgtgtgcctgtaatcccagctactcaggaggctgaggcaggagaattgcttgaaccagggagttggaggttgcagtgagctgagatcgtgccacagcactccagcctggcaacggagtgagactccatctcaaaaaaaaaaaaaaaaaaaaaaaagtgtcgcctggaaaggcctagggatctctgagaccctttgggctggggggatagtggggtgcctgagatcaaaacgattttcctaataatactgagacatatctgcattgtcactgtgatgatatttgcacaatgatacaaaagtagcaatgggtaaaactgctgccttagcacaaatcaa

SEQ ID NO: 586021 - DNA, 4001 bp, Homo sapiens
gggccaacttttcctgtaatctgtagttccccaaagtttataaagaaataaaagtgtaacttttaaaatatgaggtcttgtacaaggtaaagaatattattttatccacatctacatttccaaatgccctaacacatttgtaacttggctgatgtggttttgtttttgttttgctttgttttgtttgtttgttttgggttttttttttttccttttcttttctcttttctccaaacggtctactatctagacctgtggcttctgccacgaagtgacgtttggggtaactgtggcagcctccagctggcccgggtcatttggcccattttctttccagcacttcggtggctctgcttccccgcactcgctctcatcgtgcagatgctcaggcttatcacttcggatgcttgcaagaagctggagctctcccagccttcacccccgcacgacctcttctggccacagacttgggagggatctgcatcctcccttggctcgaacgcgagtgccagcatcgtccttgcgacctgggcttgcgctcgcctgtccctggcacccctggctcccgcagccgagacgagggagctgcggggtcacgccttctcgctggagcggctctttccctcccgtcaaaccccttccttacttctgctaaagacaggcggcctctctcctaataaaccacacacacacacacacacacacacacacacacacacacacacacacacacacaagttttgacttgagcttgagacgcacacagcgccgaggatcctcgggttactgggggcgacactgctggccaggctgaccagcgccctcgggcatccccaaacccctggatgcaacccgttccccgcgccaggctagctgcgggcggcggggtgggcagcggcagccaagggacaagccagcccggggacagcgcggagccactagggccggcgggcaggcgggggatctgcgggacagaattctcagagcggacggtggcaaagggctaaacccacccacactccccggggcgcgggacgggactgaactgcggtcactaacaatgcaacgaagaggaccttcccttcccttcgccactccccgcgccgccaggcctgaagatacacacactccggcacaccccacacacccatccactccgccccagtccggatccgggtggcggaggtggggcggggggaaggtgagcggtgcctcgccccggggtacctgccggcagcgcaacccagcggcgcccccgcctcggtgaggacagtcggacgcgcgggaggaagaaggcgctcccgaccgcggcacagatgctcacgggcttagcacctggagagacccggggcggcggcggcgcgcggtggcagcgcgagaagtccccgccgcgaccctctccccgccgcacaactttgcgctgtcggcgccgccctagcgcctgcccagcttccttacccaagtactgccgcaggtcgagcaggaagcgagggggtcccccgctgagctgatagaggagggagcccaggcagaagaccagcagggtggccatgcagaagccgtagtcccggagggagaagcgcaggaaaggcagcaggggcacccgacgcttccagctgcccaggcccggaggggcgccccccataggggccccatggggccagggatccgcgccgccgccgggatgctgctgcttcttcttcatcgcctgctccgctgcctcccacagcctgcccgtgccaggaaaaggtcacccatccgccgcgaggaggagagcccggctggccggctgcacatggggagggccgcgcggagggcagccgggtgggggcggggaggggccgaagttgccgggctcaggagactttcttcggcatggtccccgccgccgcggcccgagcggccgaggtgtccggccccggttcggggcgctgcccgtgacggggcgccgcgcccgtccggcgcccgctagcgtccccacgccccgcgccccgccgcgcctcgggctcgcttgcggccgccggggctcgcctccagcgccagcgtggaccccccggctttgtgtctgtaggtctcggcgtgttttgtcccggttcaggcttctctaaaaaacggcagggaggaacaggaggcggacaccatcccctcgctccacctccttgacaggggttttcctccttctcctcccctttctccctccggcgctccgcagcactctcctccctctcccctccctctccgctcgggtctcgggatttcgctcgggtgtcacgttactgcttctgctgggggcggagggggggaggcggcgattattcgcaacaaggaagaaagtttctgggtgttttctttttttttccttcccccgttctttacaatctggatgcggttcctgcgccaccagcgacctcttgggggccccgctgacttccctcttgtaaacagtcaccggcaggaagaagcacgactgactttactatttacatttttttcagttcagaaagttgattctccttatataccccgtgcgagctgcttacccaaggctgataaaaggtactagaatacaggctcaagactttgctgaaatgggaaaagagcaagcggtgcgagttatggtcaaacacgccccagagggccaggcgcagcgcctgaactcccgggtagggtagccgaagaggacgctctgttcttgcttttcctggtcctacaactgctccacctcgcagtgcccagagaggcaagtggggggtgcatagcggactctaggaggtcattgccctgcagacatgaaggggaaagagcccagtccgcctatacgctgatttcattgctgcctctcttccctccacgggaaagcctctggacctgaaagaacctcctggggcagaaaaggctcaatcctagacatagatcctctgatggggtggttgatccacggaagggctgctctgatcagccacactttaagtaagaatactatatcactatttatagaagctgtagcacctgagggctgtgtgactcacccgaggtcccaaagctagtagtaggagttgggttgggagttgcactcaaatctatttgaccctcagacccactatactaaccactgcacagcagtacttcccagccagagcccttttccttcacgtcccataggaggatgagatttaattcatttagttcaggccacattgagaaatggaaacctcagtttctggtgcctatcatttctggctccctactcatttgtatattccagtaatgaacaattggatttaagaaggaaccaggagccaagaacctctatgattctaagactaggctcctgaaaaccttcatcaagttaggcatctgaagaatattctgtggaaaattacaaaatattatcctagacaaagaacttactcgttaagaatatgtcttaacctcagctactcaggaggctgaggcaggagaatcgtgtgaacccgggaggcggaggttgcagtgagtcgagatcgcgccattgcactccagcctgggcgacagtgcgagacaccgtctcaaaaaaaaaaaaaaagaaagaaaagaaaagaaagaaagaaagaatgaatatgtcttaaccatgttcatatatgaatgtctctggttcatgatttgaaacatatatcatgagctagagagatgtgtagatgaggtgacaggtgctgcacacacacagagacacacgtacacacacacaactctactgtccaattttacattgtcctagcccactttctaagggatgagaaggctgttttggggccccaagagaaaagaaaatattttgttctgtgacagaaaaccctgaatagagtgttaatcatttgctttacatttatctcatgaatcagggttttatttggattaatatgcacattttagaaatgtgacttcccctaagagaattgagtagatcagtcattgcccattaatgtgaattactttaatcagtacaatgagtagcccagaac

SEQ ID NO: 586022 - DNA, 4001 bp, Homo sapiens
tttgaccataacatccttttgtgaattacacattaacaatcctagaacttttgatcttttcgaaatactttgggaaataatgatctaaccaattcctaatattagattttcatggtgtttacaatgttttctattataaatgatactgtgatcaatttcttgagtgtacctttttatgtattgcctagggaaaaactctagaaacagaattactcagttaattgatatgcatgtgttaaaaacatgttatcatttttgccaaattgttctccagcaatattttaggttcatcagcctttttaaaagataattttaaattaaaatagtttgggagtttatatgttcattatatatacacggtatttctgaaattagataattactcttttatggacacggctaaagtacaagttataaatatcaaaggtcttactagaatgaaggctgactcagaaaactatttaggaatatacctcctcacaatttatagaaaatgactagtatggagacattaaatcgtctctcttccattttcctctgttatatttacatatgtctgaatatgtattccgtactcctaagatgatattaataatcccttacatttttgtagtaccttataccactaaaacatttaaaacaaaaagaattttacaggaagagaacatcctcaaagcatattttaaaacaagatattaagctataccttcaaaagacccgtcaagctacacaatagttgctacatatttacagccaaatctgtaataactaaaatctttatcaatcaaccaacaccggtatcatggaggaaaatgtgtattttaagacagttaatttagatcttattttcactgtgtatttctacagtttcacataataagaaacaagctcctaacagaacataaagatggttcacacagcaaaaacaggctttgggttccttttttgtctttaaagtgacactggatgtaattttatacctcaaagtaacttttcaaagttacttaagtatagtgttcacactcagggtggagttctgtgtaattttcaaggctgagaagtgttctgcctgttcaaaaatatctcccctttgagtttgtctcagaatcatatttgaagctttttaaaaatacagaaatttttattcaatgggtctggaatggagccaatgcatctgcgttttttaaaactccccagttgattcatctgtacagccagagtcaaaaagcactcggttatataaaaagattggaggagggggtggtatcctgaggaccccaatttaactgttcgtgtgaaaaccatgaatctgtctgagtctggtttattagattacctaggtgaaaattttaccttgagaaggctcataagatatttcaaggtaggacacctgttggcctatcaatggctatgaacagggatgggggtgaggatatatggtaatgaaatcaaactgtgaaagatctttcctgccagaaactgtggcacttcctacattaagcatataatcccttcaatttccagaaaatagaaagagaaatgttcggtcgtattttattttaatggagtagtcttccaaatgaacaacctttagctacaagcagcagtttcactaagcacaaaattgggttgagaaaggataggacactcagagatattataccttttacatataccttttacaaaattatagtcatttgtcagaattcagtttcttaaaagaacttcacctccaagaagttcttgcaagaacaatgcaaatcaatccaagaaacataggttttctaaatacataaaaatccatagctttcttgagcttcctttacctaccagatctggacttaatgatatcactgaattcgttctgcccattgtcaggactggcttcatgttctccatacttggccatcttgccagagtttcaagataatccaaaaactttaccaagtcctctttctaaggctttcaacttcctacgatggttcagcttgacatcaatacctaaaaggaaaagggaaagtactgacttgaaaaaatgtatttatatattttatatagttattcgtagtaactattcattcaccaaatatttattgagtgcctaccacgtgtaaagcaccaagccaggcaatggtgttatgactatgaacaagagacatagcctctgccattacggcgcttatgcacactaagcaattaattacataatgaattatttcattacaatactgacagactacaaatcatacaaaggagaagcacagagtattaagagcacacagcagaggagtctgacctgccctgggcaattagagaaggctttcttgaagagacatttgagccaagcctttaaagatgacaagaatttaattagccaaaaagggaaacagaaagagaaaaggtaagagcttcctatgtgaagtggcagaaagaatcatggagcagtcaaagaatggagcacaagccagtgtttctggaaagaagacagccaagagacaagtgtacctgttgaaccaggtgaagaagctgggcaggaccagggataggaccatggagaacaggtcaagggtttgtgtctttatctgaagagcaatggggagccagtagatggttcgaaggagggaaccaacatggtcaaattggcctttttaaaagatcgtcaagggacgggcacggtggctcatgcctgtaatcccagcactttgggaggccgaggcaggtggatcacgaggtcaggagttcgagaccagcctggccagcacagtgaaaccctgtctctactaaaaatacaaaaaaaaaaaaaaaattagccaggcatggtggtgtgcacctgtaatcccagctactcaggaggctaatgcaggagaattgcttgaacctgggaggtggaagttgcagtgagctgagatcacgccactgcactccaccctgggcaacgagagtgagactccatctcaaaaaaaaaaaaaaaaaaaaaaaaaaaaagacgattgtggcttgtaggtagaccacagtaatatgtggggaaccagtgaagactatggcagaatatagcaaaatgcaaattaaggaacctagctcatgggtatatgaatgctgaatgaaaatttcttgcaactcttctgtatgtctgagaattttttcatagtaatatgttggggaaaaattcctaatcttaaccaagtgatcaaaattcacataaccaatcatggggcatcatgcaattgaatggaaaatcaccacatcatctacacaatatccttgccaagatgttgaacgtgaatcttctcatgagcagacaaatctagactgtggctagttttcaaaagaaatggcctggtttcttcaaaactgtcagcgtcttgaaaaccaaaattacctgggagagggggagctttgtgaattaaaggagactaaatagacatgacaatgaaatgtaatctttgattgaattcagaattttaaaataaaacatttgaggatcatttgaaaaatctgaatttggactatgtattagacaatattattgtatcaatgttaaatttctttaacattaattatggtattgttgcaggagaatgtctttgattgtaagagacatgtggtgaaatatttagcaatgaagtgtgatggtatcttcaacttaagttcaaacagaatagcatatatctgtctatactgatataggtatatttaggttgatatatgtatgtagatgtatatatgcatacacacagacagacagaaaaatgcagtaagtattgtaaaataagtgggaaaactaggccgggcaaggtggctcacgcctgtaatcccagcactttgggaagccaaggcaggtgcatcacctgagttcaggagttcgagaccagcctggccaacatggtgaaaccccatctctacttaaaaaaaaatacaaaaattagctgggtgtggtggcaggtgcctgtaatcccagctacttgggaggctgaggcaggagaatcacttgaatccaggag

SEQ ID NO: 586023 - DNA, 4001 bp, Homo sapiens
ctactaaaaatacaaaaaattagccggacaaggtggtgggcgcctgtaatcccagctactcagaaggctgaggcaggagaatcgcttgagcagtgagctgagatcgcaccatcgcaccgtggcactccagcctgggcaacagaaggagattctgtctcaaaaaaaaaaaaaaaaaagaaaagaaaagaaataaaagaggggaacaaacagggaattccagaagagagggactctattttatttgtttgtttggacagacattctgaatgcaaggactctattgtagatagggtgatcacaatatgagggagcaagtcagggtctgccacattcattcatccattcaagaaatactaattttccatcatgtgctcaataccatgcaaggaggcagagttgaaagtacaccaaggcacaggtctcctttggaaggactgatagttacaatctggcagggttatctctcctctcacttaccttcctcatttcatttctcttttatctcctcccagcaattgtcatctctccctcacccagtcttttcctacaattcaaataacttctatcctcatcaatttcagactcatcaaacttttactaagagactttaaaagtgcctggcactaaactatgtgctctgcgcacatcttttaatcctattaactcagtgaggcaagcattacatcaacttgcctgcgtgttcatagacataggaagaccaagacacagcgggtctatgaaacgtgcccagggttaccataccagttggcaatctgggatttgatcactcttttcccacatctgatgtactaccttcttgtctcattgtccattccagtcctcgcttccctcctctgaatttctcccctccccctcttctgtacaaccccctcacctgggggtcctgggccgagcttcggagtcccagggccggcagcgttgctccacaggcagctggtattaactccgtgtcggcgtaactgacccactgttggacaaggacagccgcccggctgccccctgggccccccaggcctgctggccacagcagctgggccacagccgtggccccccacacccagagcccaccgggcccctgctccagggccggcaggcggggtgggggaaagggagtcctgctagtcgggggtggctggagacagatgcgggggtgggctcctccccatccgggaccctccccagcctccccatagcgagcggctatgagggctcggaggctggggaaggcatctgggtgaggggagacgtagagggtggacatagttatgagaaggtccgaacgaagtggaaaaacctaaggagaaagagagacaggggaagactgcgggatcgaggtgggtcctatgtttgagtagagaggggaccctcacgggagctccttcgccgcagacacccgagtcccataggactgagggtctgaccaggcaggctgtcaggagccgaggacctggctctcagaggggcagtgtcagtggggagttcctggggaagaggaactatccaccatcgcggggcttcggggagtgtggaaggctctcaggagcgggtcggcgtctggttggatgcgggttcgagccgcgtgtacgtactggagggagatggtcagactgggccgggaatccacctcacagccaggcgccggccgcggctggaccggccgagcggcccgggcggaggagtcgagcgggcagagacggtgggcggctctccaggtgaccctagttccctaagatcgccgccccggcagccggcgcccacgtgttcccccctttgtgacagggagcgtttccgggcctgcgggtcctggcgggggcggccgtgccccgcctgcgagtgcgcgcccgccgtgtccgacactgccccgggggccgcgcggctcgccgcccgccggtctcacgaggaacagcgcggggcgcggggcgctgggcgcggacgcaggacgagaggacacccctgagcacgacgctcccgtcaggcgccgccacgggcaccttgtgcgggtcctcggccgggtggcgagggcggcgcccagcgggcagctagggaactggcccaagagggtcggccggccctgccggtggagggcgttccccacccggtagcggggaggtgcccagcagggagccgcctgatgaggaccgaaggggaggtccatttgccgaggccctggcgtccagcttcctctttgagcctcatctcctcatgtatgaaaaaagggtgacggccgggcgcagtggctcacgcctataatcccagcactttgggaggccgaggtgggcggatcacctgaggtcagaagttcaagactagcctggccaaggtggtgaaagcccgtctcacgcctgtaatcccagcactctgggaggccagggcgggtggatcaccaggtcaggagttcaagaccagccaggccaagatggtgaaaccccgtctctactaaaaatacaaaaattagccaggtgtggtggcaggcgcctgtaatcccagctaccccggagcctgaggcagggaattgcttgaaccctggaggttgaggttgcagtgaactgagatcgtgccactgcactccagcctggcgacagagctgcagtatttgtaaaaatacaaaaattagccaggcgtggtggcacacacctgtaagcccagctacttgggaagctgaggcaagaagatcacttgaacctgggaggcggagattgcagagctaagatcacaccactgcagtccagcctgggtgacaaagtgagactccatctcaaaaaaaaaaaaaaaaaaaaaaaattagccgggcatggtggtgggcatctgtaatcccagctactcaggagctgtggcaggagaatcgcttgaaccgggaggcggaggttgcagtgagccagaccaagccagtgcactccaccctgggcaacagagtgagactcccgtctcaaaaacaaaaaggagggtcacactagatggtctctaagggtcccttaaggctgagaagtctcatctgtatcatgaactcatatttgctgaatgagtgaatgaagtttagtaattcccagtcacaacttttctctaaaatataaattacatcacttgtatttatcttctatacatattcagaaaacatgaactgatttggttggattggtgaagtctggtagcatgaaatgtatcttatgacactatcacattaatggaaggacagcaagcactccagttgcaggtatggtataagcaaaaggccacagggagaacatacaggtagggacatgttggggaaacatggtgtagagcaactgtattatatgctttataccaaggagagtagtgggaagctgagttggattcttggctgggttaacgcagagtaacaggggcttggatgaattcgacatccttttccatgtcccagccccctgcccaacacatagtaacagaaccaaaacacaaatttgcatcataaattttattcccgatgcgggacagattccttccatccccaaatgaatcacatgctgccctggaaagacctaggaaactctcctaccatctccagagaagtagtgagaaaggcaggtgctggggactgggaaggctttgaagtttcccagcctacttatcctccccttctcaagagaggatagctgttccctattactcctctcatccactcatcccttaaaaaaaacccacaaaaccatcattagtaaaaaaacaaaaccccttcaagtattgggggttaggggttctgggctgggacttggggttatgggtcaccaatgaaagagggaggggaagaggaggaggagccatcactgtttctgctgcagggcttccttccttgccgcatcctgtagcaactgtgtgtcgacctcatctgctggcagctgcacgtatcggaccactgagccccgaatgaagcagttcttcactgataactagacaaagatggacaaatatgaaaacacccttaaaaatgtcctctaaccacc

SEQ ID NO: 586024 - DNA, 4001 bp, Homo sapiens
gctcagctcatgtctcctcactccccgttccttccacagttgtttctccaccacagcctgcagttggattcagggcaaatgaacagagtcaggttgcttggttgctttgggggaagaaattgcttttgcccaagaaaaggaacaggtaacaaaagacatacttgtgtagcaattcctgcatgatctgaaccagggacccacagcacttgatccccacgcatccggtgcctgcaacaaaaatgccctcctgtgagcccctgagcttaaatgtttatcctcactcattcctgcccttcctatttcccttccaagaactcaagcagcccccactcccctctcaccagcgcacgagggcatcctgtatggccaccgtgagtgcgtggccaatgtgcagggagccagtgacattgggaggtgggatacacatggaaaaggtctcccctgtagcttggggcagccgggcctagaggaagaaaaaaagtcaaaggggcaagagagaattggattggggaaagagcaccctctactgtctccagaacagaaagaacttcaaggaagaactgtcctgcaaataagaggagagtggagaggagggaattggccagggggaacctgccaagagaaatctttggagacaccagagccagaaagaagacaaggtctacaatgtgagctcaactctgaggtccagttgtattcaagggccactctgtcctggagacaatttaggacccctccctgccagatactaacctgatattctggtttgaagaagccctctcgtacccaccacgggtaccaggcagcctcaacatatcgggggctgtatgcaggaggcaggggcccagagacatctgtgaaggcagaggagagctccactaaccactgaacttgttcccaggctgcatttcggcaggccaaatgggcaacacatatgtgaaagaaaaggccttcttacttattctacttacctttcttttcaccgggtttcgtagggatttcatacaatactaactccttaggcctccaggccttaatggattctgcaggtgactgagaagagaaagcagaagaggctgggatccagtataccccagactgcatttcagccggtctcctccagcccctctcaagtctcagaaacccaaggacaagctgtctgacccctaaccttgctctcccctgctatctcagcctccagagtcgcctgcttctctcgcaggcgcttctgtttggcttcacggttcctccgggagatgggagatccatggggctccgactgtgtagaaacggagtgaaacctggggaggccccgtgagtgcctcagcccccaaaatggtggtcgaaaagaggcgagaggcaaatgaggcatcaggagtgtttggaaaggggccgagatctgttctggatagagagagagcacattaggatatgggggtggagaagggtcactccccttgttccatctttcctgtctctaattagcacaggtctgttattccaagtctctattcccttccacaaaacctttcctccttgagagctagagtgcatggtatcgacagacagcgccatggagccacggatatcagggctcttccggaacagggccggagtgtctggattcggcggtgaccactgacacatgagagatagggctcagaaactcagggagatgatgggcatcagcgcgcccaagagccagcaaggagtcccgccagggccgcggcgatctccacctgcacaggggcctcctgcagtgcccacagcccggcgcggccaagccttcccgcccatcccaaggcctgggcccaggacccgcagcgtctcccacttcccggaggccgccccggcgcgcgctcaccaggaggccccgccgctatcccagggcgccccgcggcggcagggactgaggaatccaccaaacccgaccctggaacgtggccctggagccgcgcggcgcatgggggcggggccccggccggcgcatgcgcagcagctggctttggccccaccctctccctaccggtccaaaggctgtagaccagaggagcgagtccgccgcgaaggcaaaccccacggggaggcgcccgggaccgcactgctagctatcataactttattaaacaagaaaagccctgacgcgtaaataaaaaacacctgagttctgatgccccgccccgcccagtcccgcccgccgaggtccgtgtccaagtcccgcgctctcaggagctatgtttctgccgcttccaaaagcgcttgacgtcgctgtgcccggccggggtcaccaccatgagccgcttggccgagttctcgaacacgagcacgcccagctcccgcgcgtgggccagcagcagctcaaagtccacttgcgacaggaactggttatacaggacacctggggtcggcaggacgggaggggcgcggggagaagacgagaaagtgaagctcggagctcctattgggaatccccccagctccttggtggcagccctggacgcggtctgggcttgcccccaccgcaattttacaaactaattctctatgcttgtctgctcaggggttcatcttaacaccagtgtgatccagccatattcagaaaggcctaatacaaattactgtgaattattccctcacctagccaaatccaaagtgcattgatttgggacgatttgtttactaccgactcaccccaaaacaacaaaaaactgtcttgccagcttttctctcctagtccatgaagtaaaaaataaaatgcagactgaactgtctgccctttctctggccaatgaccaagacttggccaccagaagctactcaccctcagtgaaccggagtctgtccctttccagctcccagagccggatctggtcggtgatggtggggggcagcacaggtgtctgcaaggagcaagggttgactgtagggactcagaatactgccccagacaacccggccctctgtttcttccccagatttggatgcccctttttcttttccatcatgtcatcaccagctgccagcctctgacatcttggagcctgtctatacctgtttgagcatcactgggtgggctcttgtccttaggaaatggattatctaggaaaacagacaagaatggcatgagggctccagcaagaaggcaggaaagccatctgagctgtcacctaatgtcactggaacatcagcttattctaaaaactcataactcctgtcatcaactccacccatcccagttcagctgttatcccacgttgctgctcccagcaacgtgggatattccttttctggcacattcgccctttccagtaatgttttgtttttctttctttaaaatagcagcagctactattttctttttttagcatttattgcatgacaggtgctgagctcaatgctttgcccctattcttccaatgaattatcccggcaaccctgaggtaagaactgtcatttactagatgaggaaactgaggctcacagaggcaaaacaactatgtctagtttacgcagttaggatgtggcagtgccgaggcacaaatccagatctatacctcctccctccatgtttttttcccctcaagggtctacctattctcacacccaaagccttcatttctcttcaaacacagacaactcaccaccacctattataacagactcagagctagccttccataatgtgacccctgtcccccgcagcccaagtgcagcctgtcttcctgctccacctctcccaagtgggaatacctgctgggctgtgatgccactggcgattgcctgctgcacactctcccgggtcacctgcgccaccaccatgttggggaaccgatagagcatctcagagaagagggcaatgagggcaatctgcagctccgactctgagccagggatagaaagaggatgaggaggccacccccacacccagactccctcaagcccttctttcaagtgtcatgagaaatgtcagagagctctgtagactgccaggtaaacacgaa

SEQ ID NO: 586025 - DNA, 4001 bp, Homo sapiens
tacaagtcaggagtgatagtggtgggaggcaagaaaccaaatctgccatctgggccccccgagtcctgcccatcatactcacgcctccttccactgccacacctccctaaggaaggcctcccggctcagctcatgtctcctcactccccgttccttccacagttgtttctccaccacagcctgcagttggattcagggcaaatgaacagagtcaggttgcttggttgctttgggggaagaaattgcttttgcccaagaaaaggaacaggtaacaaaagacatacttgtgtagcaattcctgcatgatctgaaccagggacccacagcacttgatccccacgcatccggtgcctgcaacaaaaatgccctcctgtgagcccctgagcttaaatgtttatcctcactcattcctgcccttcctatttcccttccaagaactcaagcagcccccactcccctctcaccagcgcacgagggcatcctgtatggccaccgtgagtgcgtggccaatgtgcagggagccagtgacattgggaggtgggatacacatggaaaaggtctcccctgtagcttggggcagccgggcctagaggaagaaaaaaagtcaaaggggcaagagagaattggattggggaaagagcaccctctactgtctccagaacagaaagaacttcaaggaagaactgtcctgcaaataagaggagagtggagaggagggaattggccagggggaacctgccaagagaaatctttggagacaccagagccagaaagaagacaaggtctacaatgtgagctcaactctgaggtccagttgtattcaagggccactctgtcctggagacaatttaggacccctccctgccagatactaacctgatattctggtttgaagaagccctctcgtacccaccacgggtaccaggcagcctcaacatatcgggggctgtatgcaggaggcaggggcccagagacatctgtgaaggcagaggagagctccactaaccactgaacttgttcccaggctgcatttcggcaggccaaatgggcaacacatatgtgaaagaaaaggccttcttacttattctacttacctttcttttcaccgggtttcgtagggatttcatacaatactaactccttaggcctccaggccttaatggattctgcaggtgactgagaagagaaagcagaagaggctgggatccagtataccccagactgcatttcagccggtctcctccagcccctctcaagtctcagaaacccaaggacaagctgtctgacccctaaccttgctctcccctgctatctcagcctccagagtcgcctgcttctctcgcaggcgcttctgtttggcttcacggttcctccgggagatgggagatccatggggctccgactgtgtagaaacggagtgaaacctggggaggccccgtgagtgcctcagcccccaaaatggtggtcgaaaagaggcgagaggcaaatgaggcatcaggagtgtttggaaaggggccgagatctgttctggatagagagagagcacattaggatatgggggtggagaagggtcactccccttgttccatctttcctgtctctaattagcacaggtctgttattccaagtctctattcccttccacaaaacctttcctccttgagagctagagtgcatggtatcgacagacagcgccatggagccacggatatcagggctcttccggaacagggccggagtgtctggattcggcggtgaccactgacacatgagagatagggctcagaaactcagggagatgatgggcatcagcgcgcccaagagccagcaaggagtcccgccagggccgcggcgatctccacctgcacaggggcctcctgcagtgcccacagcccggcgcggccaagccttcccgcccatcccaaggcctgggcccaggacccgcagcgtctcccacttcccggaggccgccccggcgcgcgctcaccaggaggccccgccgctatcccagggcgccccgcggcggcagggactgaggaatccaccaaacccgaccctggaacgtggccctggagccgcgcggcgcatgggggcggggccccggccggcgcatgcgcagcagctggctttggccccaccctctccctaccggtccaaaggctgtagaccagaggagcgagtccgccgcgaaggcaaaccccacggggaggcgcccgggaccgcactgctagctatcataactttattaaacaagaaaagccctgacgcgtaaataaaaaacacctgagttctgatgccccgccccgcccagtcccgcccgccgaggtccgtgtccaagtcccgcgctctcaggagctatgtttctgccgcttccaaaagcgcttgacgtcgctgtgcccggccggggtcaccaccatgagccgcttggccgagttctcgaacacgagcacgcccagctcccgcgcgtgggccagcagcagctcaaagtccacttgcgacaggaactggttatacaggacacctggggtcggcaggacgggaggggcgcggggagaagacgagaaagtgaagctcggagctcctattgggaatccccccagctccttggtggcagccctggacgcggtctgggcttgcccccaccgcaattttacaaactaattctctatgcttgtctgctcaggggttcatcttaacaccagtgtgatccagccatattcagaaaggcctaatacaaattactgtgaattattccctcacctagccaaatccaaagtgcattgatttgggacgatttgtttactaccgactcaccccaaaacaacaaaaaactgtcttgccagcttttctctcctagtccatgaagtaaaaaataaaatgcagactgaactgtctgccctttctctggccaatgaccaagacttggccaccagaagctactcaccctcagtgaaccggagtctgtccctttccagctcccagagccggatctggtcggtgatggtggggggcagcacaggtgtctgcaaggagcaagggttgactgtagggactcagaatactgccccagacaacccggccctctgtttcttccccagatttggatgcccctttttcttttccatcatgtcatcaccagctgccagcctctgacatcttggagcctgtctatacctgtttgagcatcactgggtgggctcttgtccttaggaaatggattatctaggaaaacagacaagaatggcatgagggctccagcaagaaggcaggaaagccatctgagctgtcacctaatgtcactggaacatcagcttattctaaaaactcataactcctgtcatcaactccacccatcccagttcagctgttatcccacgttgctgctcccagcaacgtgggatattccttttctggcacattcgccctttccagtaatgttttgtttttctttctttaaaatagcagcagctactattttctttttttagcatttattgcatgacaggtgctgagctcaatgctttgcccctattcttccaatgaattatcccggcaaccctgaggtaagaactgtcatttactagatgaggaaactgaggctcacagaggcaaaacaactatgtctagtttacgcagttaggatgtggcagtgccgaggcacaaatccagatctatacctcctccctccatgtttttttcccctcaagggtctacctattctcacacccaaagccttcatttctcttcaaacacagacaactcaccaccacctattataacagactcagagctagccttccataatgtgacccctgtcccccgcagcccaagtgcagcctgtcttcctgctccacctctcccaagtgggaatacctgctgggctgtgatgccactggcgattgcctgctgcacactctcccgggtcacctgcgccaccaccatgttggggaaccgatagagcatctcagagaagagggcaatgagggcaatctgcagctccg

SEQ ID NO: 586026 - DNA, 4001 bp, Homo sapiens
tgaagagaaggggcgtcaggaaattcctcctagcactgggcagaggtagggtctggagacagtaggaaggggtagggatggttctctggatccccgggctggggctacctcgagaggtcaccttcccgcggagggctggcggggggaggggtgccgctcgccactctgggctccccattcgggcagccgaggctccgggaacacgcggccggccaggcccgggctgatgtaatcggctccgcgccgcgcgcacccggccgggcgggggagggcgggcaccgagcgggacgcgagcggggacgggcggggttggcgcggcgcaggtggcccagcagggagggggggtccccgcagcaatccaccccaaaacttttcccaaactcgcggcgagggctgaagagaccgagtggcagtgacagcaagccccctctccctcctgcgccctgccccctccacgctctctgccctcccgcggtccaaggtccgagcaccccctgcccactggtctctggctcccgcccccgctgctcagacttccagttcgtccgggaccagcggccgggagcaaacttcagccggcagcggcaacgcaagcccagccccctcggcctcctcctccggctcccgccctcggctggtcggcccagatcgtacgtgcggtgactccggtgggtgggcagggcccgcgtgggcggtgagcctctctccgggtaccctcccacctagcgcgcgcgccccctccccctgcacctaagacgacagagggggacgccgcacgcctggtgcccatggacccgcgtggggcacggagcccccacgcgcgcgctcgcacgcacgtccccagccgggagaggcgctcgcagcggcccgcggcgccagcagggcacgaccgcttaccttggcatggtggaggtagagcagcaaggcaaggctccaatgcacccaagacagcagaaagttcatggtttcggaggcccgaccggggccggcgcggctcgcgctccctctccggctcgggctgtggggcggcccgctctcctcggcgcctcggcgagctactcttcctccccggcccgaggcccgggccagggcctggggagcgcgcgcggctggagcactgtctgcgcacaccgccgcctcacccgtccatgagcccggcttccgagcgccgagtcgccactgcggccccctctcctcttccttctcttcttcctcctccccctcctccggctgcggctcctcccggcccgagctagcacttctcgcggctccgctcggctcggcttcccccgcgcggaccacggctcctccgaagcgagaacagcccagaagttggacgaaaagtttcagtgcgacgccgcgagccccgaccccctccaccccgcctccgggcgcgggctccggcccctgcccgcggctcgccgccgcgtccactgtccgccgccggccggggaggaggtggtagctggggctgggggcggtgtctgtctgtctgtccgtcagcgcgactggtcagctgcgggatcccaagggggagggctcacgccgcgctccggcggtcacccccaaaagcaggtcactcactttgcccctgtcgctttcgctgctcgcacgcccgcgcgctctctctgaccccgtctctctcttcctcgacttctctctggagctcttgctacctctttcctctttctgctggtttccaaaatccacagtgatttggggaagtagagcaatctccccaagccgtcggcccgattcaagtggggaatggcaagcaaaaataaattaaaacgagaaacaatacagttttaaaaaaaaatgtttaagaaaaaagaagagggataaaacccggatcaatgaatatcaaattccagcaccgagcgccctggccggtgagtccgctgaccggtccacctaaccgctgcgcctcccgacagagcgctggtgctagcccccagcgccacgacctccgagctacccggctgccccaagcctccgcgatcctccccgctaccagccgacttttaaaaaaaaaaggggggggcgcatggctccgccccgccgggaccccgcccccggcccgccccggggggcggggacaggcgagcctcagcccttccacacgcggctcgggcccgggctctgcggacgctcagtgaagcctggcccgcagcccgccgcaatgaaggggaagctcgacccccaccaaggttcacagcctgaaaattacccatccgcccccggaaactctgtccagagacacgcgcccgcggggcattggcgaggagggagcaggaaagtgaggttacgtgcggacagggcctgagagccgttccctctttgctaggaatattgaagggggcaggggaaggcggagagccggacagggacgggtggggagagggacacacagatctattggaatcctggagtgacccctggccttctccccgctccaacgccctcaaccccacacgcacacactcactcacccacacagacacacacgtcctcactctcgaagacgctgctcgctccattcacccagcttccctgtggtggccgagcgccccctagtgactgccgtctgcacaccccggctctggctaaagagggaatgggctttggaaagggggtggggggagtttgctcctggaccccctatttctgacctcccaaacagctacatatttgggactggagttgcttcatgtacagagagcccagggctgggcacaggggccacagtgtgtccctctgacaatgtgccatctggagccctcatctggcctgcagacatcaaagtgagcggcagccaacaggctggagtgactggggtcctttgggaagtgtccagggatgcttcccaggggagaagaatttggcaccaagtttgtggagctgagaacgggaagctgtgtggttccggggttagtcagtgactgggagggaagaggacctgttggagcccacgtatgcactgtggagtctggcaaaacccaaagggggaggcagctgggcagacagaggcccttgttcctgctgcccccccaaccccagatgttgccagggaactgaggccagggggctggtgggggcgggtggaggccagggcctgcgtgatgattcaaacctacccgccagcactaaggaacgtctgtaggccagctgcccagagctcccaccaggccaggggccaaggcttctatcagcccaagcccagactcatagctcatcttctgaatagaaatgggggtttcgtctcagctcccccattccctcaggatcccttggctacttctccaggctcacagcttctcccctatccttcccccagtcccctcccttacctccaagcccccttttcctccaactctccacatcttccctaagtgctcccaaaggccccatcccattcttgcatataggaagcagcttggaaaaattcctagctggtttctgacctggctatttccaggctgccccagggaacaaagttggggctctgaggcctgtgggaagagtgggaccagtcagtctgattatccacccagatcttgccagggtctggcctacagctggcatagcctctgtggaggcatggactgagaatgggaatgcagcaatttccctcaatttaaccaaaacgctccagggagcttacctagtcagccccatcctcagcacatgttgctgtggtttggtggaggtgctaggttacctccccagtacccccagttccatcggtatggtgtcctaaggcccttatgaggaaaagggctggctcccacccaccccaaccctccctttccatcattcgtgcactagtcctgtctccaccacttggcaggctccccagcagcagggacaaggtctttgtacagttagtaaatgtttatttcctggctcagggccccctcccaggcaggcctcctcacctgggctccatgctctaggctgatgaacgggatatggaagggaagccactaactttcctcctt

SEQ ID NO: 586027 - DNA, 4001 bp, Homo sapiens
agccatggtaagtattaaggtcaaataggaggacaaatttggactggggcaggaaggaaggactaggggcgagaaaaacaacatggtgaccttctcctgctgacatgacaaataccagggtgagctggtgttggagacggaggggggtgccgaggaccgaagggcaccaaccaccctcccccatccaagctcttctagtccttaggaataacccagcatgcccacaggttgcttagagggtaaaaacccaggaggagaccctgggggagaaccacattttcctctctacacaaatctctccagagcctcaatagatttccaaagcctcacctgtctcccactcctacctgttccctggtttcttctccctcccagggtgaggaggtgccaagcccctctcacctgggcaccttcaaatgccaccagggaccagggaaggcttttatgccttggcactgcccagcccctagggggccccctgcaccaccttaggcctgaggcctcctctaaccctccccacccgcatcagatcattcctcccctcgccagaagctgtgaaggtcaacacgccaagacatgcggacctgacagcacccaaaaggaaaggcttctgccagcccttcctgggggtctccagctctcaccaactcccctcccgcccagcactcgcagagcagaggggcactctagcctacggaacaccagaccctgctaggggagagtcccactgtccatctttctttccctctccttcccacacaccccaaatgcaccccactcaggtaccccagccctgctcccagagacagccaaggtcacaggaagcccctctcaagagaaaacaacagttaccaggcttccagctggacagcttaccactgcggctcctgcagggaccccctggattctgcacctcagccccctcacccattcccatgacaccccctgccttccccctgacaatattctcccgggaccctccactcctcctgggccccaaggaggaaaggggacggaaatttcataccccttccaaggccagggagcacaggaggggcggttctaggcaggcaggggccaggtgtccttctctgggggcctctgaaggtcacactgtggccaggcagccactcctccccctcctccctacttggaggcctgtagccaaggcctttgtgccagggtctgaggaacttgcggtgttagcagcgacccctgtccatggctttcctcttgcctcctctccaagggaattctggctgagggaaggcgtcagagaggagcggaaagggaccctttagagtccctttcagaagcaagttgggtgggcaggtttggagttccaaaaaaacacctgctccagggctgcctttcaccaggacaaagtgtgtgcaaggctggcaggagctcctttccagggttcaggaaggactattcccatgctgcccgtgtcacagcaaatttcaagccatttctccaaaagggtaaagtggggcaatgactcttcaaatcctcccttgacccacccccacgagagctaaagcacagctcactcggaactgttggcgagggaagggaagcacactgtcaccaagtcgggactttcggtggaatgtgacaaagcgcccagtgggctcccgcgccacgacttctgacagtgatcatcctttccctggactctggggccagaaaggggttagatggatcttctccgcagagagaaatgaaaataagcggggtgacaggggcttctctccaggctaaaaaggaaatgggtgaagagaaggggcgtcaggaaattcctcctagcactgggcagaggtagggtctggagacagtaggaaggggtagggatggttctctggatccccgggctggggctacctcgagaggtcaccttcccgcggagggctggcggggggaggggtgccgctcgccactctgggctccccattcgggcagccgaggctccgggaacacgcggccggccaggcccgggctgatgtaatcggctccgcgccgcgcgcacccggccgggcgggggagggcgggcaccgagcgggacgcgagcggggacgggcggggttggcgcggcgcaggtggcccagcagggagggggggtccccgcagcaatccaccccaaaacttttcccaaactcgcggcgagggctgaagagaccgagtggcagtgacagcaagccccctctccctcctgcgccctgccccctccacgctctctgccctcccgcggtccaaggtccgagcaccccctgcccactggtctctggctcccgcccccgctgctcagacttccagttcgtccgggaccagcggccgggagcaaacttcagccggcagcggcaacgcaagcccagccccctcggcctcctcctccggctcccgccctcggctggtcggcccagatcgtacgtgcggtgactccggtgggtgggcagggcccgcgtgggcggtgagcctctctccgggtaccctcccacctagcgcgcgcgccccctccccctgcacctaagacgacagagggggacgccgcacgcctggtgcccatggacccgcgtggggcacggagcccccacgcgcgcgctcgcacgcacgtccccagccgggagaggcgctcgcagcggcccgcggcgccagcagggcacgaccgcttaccttggcatggtggaggtagagcagcaaggcaaggctccaatgcacccaagacagcagaaagttcatggtttcggaggcccgaccggggccggcgcggctcgcgctccctctccggctcgggctgtggggcggcccgctctcctcggcgcctcggcgagctactcttcctccccggcccgaggcccgggccagggcctggggagcgcgcgcggctggagcactgtctgcgcacaccgccgcctcacccgtccatgagcccggcttccgagcgccgagtcgccactgcggccccctctcctcttccttctcttcttcctcctccccctcctccggctgcggctcctcccggcccgagctagcacttctcgcggctccgctcggctcggcttcccccgcgcggaccacggctcctccgaagcgagaacagcccagaagttggacgaaaagtttcagtgcgacgccgcgagccccgaccccctccaccccgcctccgggcgcgggctccggcccctgcccgcggctcgccgccgcgtccactgtccgccgccggccggggaggaggtggtagctggggctgggggcggtgtctgtctgtctgtccgtcagcgcgactggtcagctgcgggatcccaagggggagggctcacgccgcgctccggcggtcacccccaaaagcaggtcactcactttgcccctgtcgctttcgctgctcgcacgcccgcgcgctctctctgaccccgtctctctcttcctcgacttctctctggagctcttgctacctctttcctctttctgctggtttccaaaatccacagtgatttggggaagtagagcaatctccccaagccgtcggcccgattcaagtggggaatggcaagcaaaaataaattaaaacgagaaacaatacagttttaaaaaaaaatgtttaagaaaaaagaagagggataaaacccggatcaatgaatatcaaattccagcaccgagcgccctggccggtgagtccgctgaccggtccacctaaccgctgcgcctcccgacagagcgctggtgctagcccccagcgccacgacctccgagctacccggctgccccaagcctccgcgatcctccccgctaccagccgacttttaaaaaaaaaaggggggggcgcatggctccgccccgccgggaccccgcccccggcccgccccggggggcggggacaggcgagcctcagcccttccacacgcggctcgggcccgggctctgcggacgctcagtgaagcctggcccgcagcccgccgcaatgaaggggaagctcgacccccaccaaggttcacagcctgaaa

SEQ ID NO: 586028 - DNA, 4001 bp, Homo sapiens
aacatgactggggaaacacggatcattttaataaatgcaagttgattttttttttattatccctatatcagtttttaaacagatcttctctttaataacgaaagaccagtggattacgagtatttccacccccatcatctccacacacattgaggaaatgataaaaaggagcagacagaagaaagttaagatcctggctgtgaggtggggtaaatcggcatgtctcatagtgattttaaaaagcaggcgcagcttctgtgaacattttcttagaaatgagcaatggactgaatgaagtgttaaagcattctgcaggcagagatggccttgaagaggcggcccgagtcatacaaaaatgaacagagatcttcatgcaatagattggttcggggtctgggagaagaaagggccagtcagaaaaccaatccacctctctcctctttgcttgccatagtcccaccctgggaagaagtacatttcagaagctggagccaaaaggtttgaaataattggggacaaaacgatgtaagatttagcaatatcaccacttcctaaatgccaccttccctacaagaggaactctggtgattcttaaaattaacactgaggcaaaacaaactgcaagttgtgaagtttaaaagagaagaggaggtaagaaaacaaaaagtgaaccctatccggtccatcattaatttatcgggaaattttcgaatagacattttaaatttgcaggcaaaattagcaaaagcatccactggggcattggggtgtatttcaatttccccaaagcaggtgaccaagctctcactttccaacctggaggggacccctacagcctcccaggtgtatgatttcattcttttcctgcactactgtcctcagtttctgctacctcagctgaggaaatggaaggaaaatggttcaaacagacgcagcctgaagacaagagaaactggcagaattaaatggaacttgaagagtttgcagaacccgggttgagtggtcttcttaaagtgtttgttggaagcagggcttccccattcacctactcaggctggagaaaggcaaagtattgtctatcaggctcgcctctgccgggtcattcgcactccggataatgctcccagaacttcgcaaaggaaaaaattataaaactgcgcggtgctctttgaaatgaattctctggatctggaattaattgccctggtcgccagagaattgaaacggaagaaattattcctgagataaacttgcagggatgagaacaccggcccttgcatctcagaaagaggctggctggccttcgcttttggttttgttgttactctcaccattgggaccaaagtttggtttttcctgcgtcagctttgcctgcatttcctggtacctgcacctggcttggaagaatctggagtccgacagaccctaagaagaaaatccagcccgtgccatcttcctctgattattccagggaagacctaggctcacattagcagggcttagctgcttcccgagagcaaacaggcgagctaaaggggttagctaattgcactaccaactgggggcggctccggcaatccccgcatcccggctgcgccggtcgtggtcggacgcccgagacgcgcggaggcacagcagaccttggcgtacaggccatgccgccgcaaacggggggcgcgcactccttcccaaagtccccagaggagacacgtacctggtggtagggggtgtaggcggctgcgaagtagggctgcggaggaccatagacttggtacataacatccagacagctcatgactctccgcagcggagacggttaagtgttttttcattaactctccttccccggagctcaggggtgctgcatgggcggcgcttggacccgcgctctggagtcatcaggcggagcaaagccagcgcgctccgcggctcggaatccagctggctcgctaccctcccactcctgcgattttactcccgaccgcgctccagggcagaagcgcctgagctcccgctagtgggcatttaaagcccatgcccggcgggcgtgctgacgccactcgggggctgcggagcgggagggggcggtggggggcggggaccggggggccaatggggagcgagggacgcttgttggaggggcagcgagtgtgtttcccggggcccacctctgacaagcatgcggccaagggtgccggagactatgcggttcccagcggatccgaggcttcgcaccgcgagtaggaatctcccaggacaaaataggagagagagagaaagagagagagagaaggaggcggggacgaagggatccgggctcatacacgcagagaaagaaagttggagaaaggtctcttaggaaagcccttgtctcatactgtagttgagtgggtgcttccagaagtgccgaggtggggcaaattctctgctttcggttcctgatgatgtatggggaggacggtgctgtcccttggaatcccctagggagtccgggtcgtggcagacaggatgtgggagtccgggtacccctccagggcgcagaagagctacctctgcggggaaatggcagtggctgaaacctgtaaccgctgtcctctaatccacttcctttcgctccctctaacctggtcctcccgccgcctgtcccacaccccaattctgctctcttgggccgtgcccttctgcccctctaaagttcgatcctgctcctttctctttgatgttctccaccggaacccgttagcttcgcatagatcgcgcccgcttccggctgctcccggtgtgagctgctttcgaggagtccaggaggctttacccggcctcggatgtctggcttttcatgctggggtctccttggccggggtcctttaaagttttggcaactttggggacaaggactcgttggcgctaagaagaagcatactaggacccgtacacagagaggtcttttgctgcctattcagccggtaataccagctgcgatggtatgtttcattttggagagctggaagtatatgcactccaactataaaaccttcacccctttctctctccggccctccctgagaggtctgctggcttcgccctccttcctgcgaccctacccatccttctcaagcctaccccccaccaagccctctggaaagggggtgtaacagtggagtcttcagttctataagtttaggaatgcattgagacaaggctatctccatggctgggtcaggtggcggaaggggcattacgggaatagaggcgggccagacttggggggaccaagggaacaggttgggagcattaagagtctagactcaagaaagaggcagcatggatttcaaaccctagttattccccagcttaaatacaacagaaagtctttatagagtctcaggctataagactgtgaataaatgaacccttgaagatctatttgtgttttaaaagtgagtattttaagccaaattgttttagggttgcagttttggtgttgcccaatttatagatgggaaatggctccgtgtctccaaatgcttgtaactggtgagccatcttgagcgattcgacaatttccttaattaacaacaatgtaatctatgtaaagttttctaatcaatgaaaagttaaaataaagacactcttctagtacatttccatgcaagcctctttttaggggccaagctgcctgttggatgaaatctgccagcttctggagcttctgattatccaggcgcaagggtgaagcagaacatccatcccacctccaccccaatgtgccctccctaggcgtttctgaagataggtacaaccacctatcatcattttctttggggcaagagaggaaaccctcatccaaagagccacagtacgctcttctgtgtgcgggagatggggagttcaggtcccagtctcgctggccgctgctgcgcaccctttctgctgggtcggcttcacccaggcccgcaggagtacaggtgtcaacgcaaccatcgcaccagggactccac

SEQ ID NO: 586029 - DNA, 4001 bp, Homo sapiens
gatcaattaccccatatttaatattggcaaattgactctgcctagatagatttctgtgcaacatgattttatacatgtttcactaatcaactactagtcttatgattatttactgattaatcttgaaaataaactcaaatgtggttggcaactaaacagcttttttccaccagaaattgaactgacttgagataacaatggataaaagcttattatttatctaaagatggttttgaataaaaagaaagtgaaagcctcctttcaccatgtttgggaatgtgatccactcagcccataaaactaataactgacagtgtctctcatgccctgaaagtgaattccaggactcagaatgacctgatgttgacaaacacctctcactcaacacatcaaggaaaaatttaaatacataatacataatttatactatttagttgtccaacaaaatgtataggaaattcccatttagatgaggaaggaatgttcagatgtttgaattgaaagggaacttacctgagagcagaaggtgccctgtaaagaggccatgccgaagtctgtgagaagagcacactgagaagagtcaggagcacaaggagctgggccttatttctggtgtccatttctgtgcctctaaagagagagaatcacctcagttcttccagccaaagatgtcaccagcaaggtaattctgattgtctagcagtaattttcaatggctcttgcagagtttgtaaagagtaattttcatcttgtagaaagagttaaattgcaagatgatacattcaaaaatcagtatttctctcagtgacaggtgcttgaataaaaattagaatccttttcacctgctgtctgggcacatggttggccccagtatctattgaatgccatacttctatagtgctggaaataaccctggggacaatcttttcataacagggatgtaccactcaagcttagtgtattttttgacgaaggaaacagcttcaagacattgattttcttctgctttaaaatttcagtatctgactaatataagactagagtatcatctatttaataattattctgctcgtgtgtgtgcaaatgtataaatataatgtgtatatatacatataattttaaaaaagattttgtatatacattactttttcctctttcaattgtagatattacggaaacttatttccttacacctggatttgaacttcttaactcagtagtgaatattaatactcaaaatattactgaatcatatgttgtcattgaaataaatttttccataagaggaaaatatatattaaaagcaaagcttgcatttcttgcatttaatcaacttacacatttcatttctagtttctagattaaaagcctaggagtaaggtctgtttctcttgctgcctataaaaattatggaatttaaacttaaggaaaaaataaatgcatcttagattcacttaaccaacatacgaaataggaaaaaaaaagcactttaaaaataagttgaaaatttcaaaagcaaatgttcccactgaaattttcagtcaaaaatctacatacaagtaaactttacttgaatgaattatttgtaaaaatcagtattcagtaaaagagcaagcagggtaaagcatcttacaaacaaaagaattcagaaaatctatccatatgagagaaattgaagtatttctatccttaccaggtgacttgagaaacttgttttttgctgttgcaaaagcaaagcactatcaaattcttttcaagagagaaaaattcattattttgtgagaaaagttccagaggcaggagggaaaaagaagaggaaaggtaaagttttcacttacctcgcccagtcgtgctcccccggagctgactgttctggtttgttttggagctgtcttaggtgctgaagtcctgggagtaagagaaaggctccaccagttctctgcccttagcaatggctaagggttggctgttactgcctgctggtgcttctcactctaccctgaccagcatttcaaagcccatcattttatagggcttatacttaggactgagcaatcacaaagtgctctgaaagacgtcacagtatgacggccatgggatgaatagggcttgaagttcttacttaattgtcattatgcctaatttatataagtttatagtgagcaacttcaaaatgtaagataagaggaaatttacttttctttaaacaaacaaagtagcaagctcaatgtgaaatgttttaacctttaattaattgtaaaataagaaaatgattgtagtgttatagccagggccattgggattccttcagaaaataaagacttcatgtgtagaaacaaatgcataaagcaacaaacacttatgttcattacgcttataaaagtataattatactttattacaaagtatcaattctcttaatatttttaatttttatgctattcatatagttccagatttaatctttcttgaaatctatcctaactttaaaagctctagagataattttcaccttcctattattacatttcgtctttgttgaaactaattccaagataagtgtttcagaaagtctctaagatagtaagatatgcacgctgttgtacaaagcagtacaagtagtgctatttcatatttgtataaaatggcacaattcccaatgcacttttacatacactgtgtcaaatgatccaaaaaataaattgttgtcaggctatatacctcaaggaatttaattgtcttttctttttaaagattttcctcatcacttttataagtctttgcataatgtagaattagttttctaccctcatccccaacacacacacatactcaaaccagttttgaacatttctgattcaatcacttgacaggtggcttcaaatagttgaaaagcatttatatagtactttgataaatacttcacttctatttgtggatttgtaactaaaggtagtctagcacacattcaatcagagtttaaggtaaaaatgcagccacatgaaaaatttcctaaacaacagaggaaaatgccatttttccttttattttaaaggctttctgccatgtgtattatttttacattttgtttctaagtttcataagacagaatggctttacagtcctctttcttctactttaagattgtagtatctatttccttcgttcaaagtcagactgatccagtaaaagaatatcctgctatgcttaatcatattttctaatccagttaccagaaaaattaaatgaattaagtttcaaaatgtctggaaatttgtttcccagttgacagctctgacttaagccagagttcctgtggcttaattccaggaaatcttttttacctgattattacaaactagaggttgaaacagttctcatatggaatttttttatccttagctcttcatcacccaattcttagtgaaccaattttatttaagagcagaaacagcaaagcaacttaattgagggtcacagacaaatgactgctgaatgataagaagaaaaattttaaacataaaagatgtaaagctgatcattatttggcctaggcaagcacttagcatttacaaagagtaactatagtagcttttcccaatacaaaagacaattgcttctattataataataataagataaaataaaaagaaataattcaattttattacctctgaataaaagtaaactcaaccaaacaactgcattttctcttatgaatttaaactagaaagcaaaacaatttgaaaatggaatcatagcaccatctgcaggttcaaagttttaattcacagactttatagaattgtgtttatttcttcttttctttcaaggaaatgaattgtaaaccagaggtcctgtagccagcttaacttttggatgcttccagaaaaaataaacataagaaaaagtactgcagtcaaatttatcctgaattctcggttaccataaaacttagtaaataagtacaaagatacaaacttgaatttactgtttaaatg

SEQ ID NO: 586030 - DNA, 4001 bp, Homo sapiens
taattttagattcaaagggtacaaatgcaggtttgttgcatggatatgttacataatggtgaggtttgggcttctagtcaagcatttttttttctctcttttttttttttttcagatggagtttcgctctgctgcccaggctggagtgcaatggctagatctcggcttaccacaatctccacctcccgggttcaagcgattctcccgcctcagcctcataagtagctaggatcacaggcatctgccaccacgcctggctaatttttgtatttttagtagagatggggtttctccatattggtcaggatggtcttgaactcccaacctcaggtgatccgcctgcttcagcctcccaaagtgttggaattacagacatgagccaccgcacctggcttagtcaagcattttaattttctaatcctgccattgttgtttcctatggcagtcgttaactataaacctagcttatcctggaaccaagcctctccttgaactttcgctgatgactgtgcctgtgtcaagactgattaataacttaaatattctgtttatttcctcctctgccctagctttcccctgcaaacatgattcctgcttctcagaaaaagaggagccacaaactggttacttgaactgtcccatgcctacaagtactgcctgagctaacctgggcaccttccaattagagagtcaccttaaaaagctctgtgaccttcaaggaaatagttggactaaggatgaaaaagaacatcagaactcctgataaccttttaaatattagtatatataagaatatagggcagtcacggtagctcatgcctgtaatcccagcactttgggagcccaaggcaggtggatcacctgaggtcaggagttcaagtacagcgtgggcaacatggcaaaatcccatctctacaaaaaatacaaaacttagctgggcacggtggcatgcatctgtggtcccagctactctggagactgtagtgggagaatcacctgagcccgggaagtcaaggctgcagtgagacgtgatcacaccactatactccatcctgggtgacagagtgagaccttaactcaacaacacaaaagaatatatatttatagatatatgtaatacacatttatccatgacttttatcacacttcatgtattcctggtctacacctaatcgatcaatagcttttaaaataatatttgtgtaaaccacaatttatactgtatgattaacttcaaactgaaaccttcactaaacttaaggactcacaatgcattacatatacttttatcttgtaattagaatgaagtgtgaagtatataatgcatgctggcaaggaattgaaaacttaaatttgttttcagattataaatttattcgaaaacctgcaaagccttaatagcacatgagtacatgaaggccactaatactctgaaaatagcacctagtccctgacccatttatcctccatcctccatctgtaccagaaaaggggaacaaagatgttgaatttatggccagttcctcaaaggtctgctgcttcttgataatgagcaaattgttcttttcttaactttgttcttacttttagggaagtccttgctctaattttgagaggaaagtagaattctaactgtaaaataaaggttcttggctactctgatacatatatcatctaaaagtgtaactgaccctgacagtggccctgtctcctaggaccccctcctttctcatagaatccagtacactggagagatggtagagatggtacctgatctgctgctgatgtgatcgctccttccaaaatgtccagattccgattcattaatgccaaagcctcctcacgagacactggtgttagggtggcattgggcaatatcgctgcatgctcataaacagctgcagtgaaagtgtcctggcagctggctcttgagacatagaaaagcaaaattgccacgtaagctggcaactgagtagtcatgctgaagtccaatgagtgctgaaaaacagagcatgtcctggtatttatagaaagaagacacgtggtgtccagaacttagtaccttaaactacggaagttaattaagaaaacgctatgatttcatagcattgttacataacaaaagaccctaccttattgcagtaatttgtgaagattaactcaagaactctatgtacattagttcgctagggctgcctaacaaaatacaataaactgggtggtgtaaaaaataaaaaatttattgctttgcagttctggagggtgggagtcccagatgaaggtgtcagcagagttggttcctcctgagggcggtgaaggaaagatgtgttccaggcctctctccttgacccatagatggctgccttctccctgtgtctcttcatatgctattctccccatgtgtgtgcctgtatccaagttttccctttttgtgaggacaccactctaatctttaacacagggaaagggaaaatcccagctctagctttttttgtcatcgttgttgtttgtttattgttgttgttgtttgagatggagtttcactcttgtcacccaggctagagtgcagtggcgaaatctcggctcactgcaacctccgcctctcgggttcatgtgattctcctgcctcagcctcccaagtagctgggattacaggcgcccgccaccacgccaggctaattttttgtatttttagtagagatagggtttcgccgtgttgggcaggctggtctcaaattgctgacctcaggtgatccacctgctttgtttttatgccaaataagggcagaagaaaaaagccaactgaaggtcataaacccaggggtacaggctcactgaaagactgagactcaatcataggaccaattcgatttagtgcccactgtactccagtataacttcatcttaactaattagatctgaaatgaccccttttccaaaaaagttacattctaagatactgacagttaggacttcaacatataaatttttggaattcatatattttggaatgtcaacacaagacattcaaataattttaaaactttattattattttcatgtgaatatttcagctctacactttgatttactttattttcctcaaaatggggaagccaggacaaagaggaatacaaaagagttactcattttctattgctatataacaaattatccccaaattcagcagcttcaaaaagcaaaaatacatcatctcccactttctctgggtcaggaatccaggggcagtttagctggtgcctctggcccaaggtctctttcacaaggctgcagtcaagcagctgccagggctagctatatcaaggcttgactccaggaggattcacttccgagctccaagctccctcatgtggctgacggcagggatcaagacctcattggttgttgcccagagacatgagttcctagtgatgcaaacctcaccatagggcagcccgcattatggtatctggattcccttagagccagacagcaagtgaacccactggagatggaagccacggatgcttcgtaatgtaattggggaagcaacacctcatcgcttttgttgtattctatccaataaagcattaggaaccatctttgaagctgcttatcacagaggcaacagaggtgtataaagaatcagagcaaaaaaaagaaaaaatgagctggggagcgagatccagagagaggagagggaaattatataaaatagaaaaactgttcatagattttgatattgagtaagctggcaaattttgtttcagttgtgcattaagtataatatttacagaattagtgtttatgtttttccattttatttttagatctatttgtctttgaatggtatttttatagttcaatctgcaaacaggcatatctaattttttactttagtaactataatgcatttattctgcaattgccaaggtaacccaggggttgtggttggctggttctcctgagtttccggtaaacaccagcttctctaactgctt

SEQ ID NO: 586031 - DNA, 4001 bp, Homo sapiens
cttgcttgtactggtgtgtgaccaaatctaaaccaaattataattaagaaatttcaattttaaaaaaatattttagtcactttatatggaaacgatagcaactgtaaccacttaagtggaacttaagttaatacaaaaactatgcctaaaaatatcatactttaaaagccacagatgattatacacttgatgaatgcttcccacacggtatctattgctccagaaattcattattcggtctcctgcctcatcaagggtctcctctctactgaaacatcccatcagcaatgaaatatcctctagtacctcccatctttaaaaaataaaattaaaacctcttttgacctttccaaacatgcccttccaaatattgctttaatcctcatctctctcttaaagcaaaactcctcaaaagatcagtccctcttgctgttgccagttcctcctctcccattccctttcagagcactccaacttgtatctctatcacccaaactcttactaatgccagcagtgacccccacattttacctgatctcatcttaacttttcaacagcagttggcacagttaattacacctccttctggaaacacctcacttctctattggacccaccctctcattttcctatttattggttgctcttcttcgactcttctgctgattcctcgttttcttccgagtctaaacactagaatttcctagtgctcaagccttatacctaaactcttctctaactcactccacaggtgaactcatcatggtgtttaacaccatctatatgctgacatttgattttctatctccagatataattttgtcttttcatgccagacttgtccatgcaactgccacgttgacacctccaggatgacagtaggacccagatttttaatatatattagaaggtttctagataaccttttcccaggaaaattagatttgtgagcctaggaaaatgcagtttcaaagcataaggtcttatgattcacttgaaaatacatggtgaagtctttctgcctaagaagcaactctggaatggagagactctataacattgaaagggtgtcccttcagcagaggctttggaatgtattcctaacacaatccactgtctacttcagaaattaagttactacttgtatctatgagatctcttcccttagtttttcttgcaggaataccctatttacacattttctcaaaatttaataaagattttcaatcacaaaagattgttaaatagtatctaagtacaattttttaaaatctgacaaatgttgagataaatataaccataacatataccacatatatggtaattcaagagcaatcattttgctttggtgaacgtgcgcattttagagagttacttttgcacaaaagactaagatagttaaaatacctgtgggggtcttgacacggaatccagttcacctgagggtctgggatatcctccagataagggaaaacagtttccctggtaaatttccatccataaagtgcatcttctggagtcacaatgattcgagcaccctgttcaaaacaagcaaaataaaaatgatttttccatgtacaacacagacaattcagctctctcgtcttccaccagctcccatgcccctcgtgtacattatgattaacagaaataagagaatacctgctcagctgcctgcttgatcgctgtctccagaatgtctatattctcgttcatgagattcaaggcatcctcctgagaaactggtgtttctgttttatttggcaaaatgacagcatgttcatacactgcagctataaaactgtcctgagtaccaacctgcagggttattagggcaaaaactgccacagagattggaaaagaggaagtgaccatggccaaggtttagtgatttctgaaagcaaaaataacattcatgtagtatttacagaggggagaatgtttgcataacatgtggctgccagttactggccttttactttatcatcatttttcttcttcttcttcttcttcttcttcttcttcttcttcttttttttttttttttttttttttgaggcggagtttgctctgtcacccaggctggaatgcagtggcgcaagctcagctcactacaacttccacctcccaggttcaagcgattgtccttcttcagtctctgaaacagctaggactacaggtgcgcgccaccacgtccagctaatttttgtatttttagtagagatggggtttcacaatattggccaggctggtctcaaactcctgatcttgtgatccatccacctcagcctctcaaagtgctgggattacaggcgtgagccactgcacttggcctactttataatcttaagaacgcaatatatctgaccacttttaaagaaagaaaagttgcagtccatttaagacaatcagaaagtattacagggattgaacagcatgtactattagtactaagatttaatattgaatttccaaaagacacccgaattcaaatatagaacaattccagcttttgttaatagaaactcataactaactctcgtgtaaaaaaatcacatcccaacaaatatctcatttattaaatttaaaaattgacaacaatttttttggttctgttgagtcacttacattgtgtttatttttagacgggggggaaaatattaaatacttactactaagaaaatgtaacacaggacaatattgataacaaaatttacccaaatctacactctgacttacttattgctattaaggactgaaaacatgtgctccagaaaagcaggattttgtgtctggtttgttcactgctgtatagttagtgcctacagcaacaataccccgaggcacctaggccagaggaggaatctcagctcaggggccccaggcctcaggatactccgcttctttccttctttctctctttcacccttccctccccatcctccccctacttctccttctcctcctactccttctcctccttctttttcctccctccccaccccctgctttggaggaagatgccagggaaggggaagagtccaggattggtgataaagatcatctgtgttgtaataaggagaagatgtaacttacatttttgttagcagcaaataacaacaatgagtttaaaaacaatgctaacaggccaggtgcagtggctcatgcctgtaatcctagcactttgggaggccgaggcaggcagatcacctgaggtcaggagttcaagaccagcctggccaacatagtggaaccccccatctctaccaaaaacacaaaaagtagctggtcgtggtggtgggcgcctgtaatcccagctactcgggaggctgaggcaggagaatcgctggaacccaggaggcagaggctgcagtgagctgagatcacaccattgcgctccaggctgggcgacagagcgaaactccgtctcaaaaaaaaaaaaaaaaaaaaaaacaataataacaacaaatacaggatgtgatctcagatgccttcttaggacattcatattctcccttccccaggcccaatcctgccaaataaaggatttgttttatttttatccagccctttggtaaaagtcacggaaatgcttttagacagcatagaagagtaggtacgattaaacaaagtttattctgtgctttccttcttactgagataaatgttttgttaagaatggggcctaggggctataaataagatctgctcatattttctgctttgaatagaagtttctattaaaggaataacttttcttatctctatagagcagaaaactaaaaataattcaggaaaaatggtcaagcccttttgtggaaaatgtaaagggatagatatttttatgaatttttagcagattgtataatagactgttagtatataaccatactatctagtgtataattagtaaattagcataggtgattggtatataatagattatgagtgctgttagagtttagaaatcatgtaacccaaatgcccacttattacaggat

SEQ ID NO: 586032 - DNA, 4001 bp, Homo sapiens
gcccagcctggccgacatagtgaaagccagtctctactaaaaatacaaaaactagctgggcatggtggcagacgcctgtaatcccagctactcaggaggctgaggcgggagaattgcttgaacccaggaggaggaggttgcagtgagccgagatagcaccattgcactccagcctgcgtgacagagtgagactctgtctcaaaaataaaaaacaagcaaataaacgaaaaacagtaatagctcaaatatttgtttctaattgtgaatctgatcatctgttagaataatgttcaattggactaggttttaggtctttaattttaaaaacctcatttttttcccactttctcaagagtaagcataggggtgtagtttctgctttgcaccacttctttggacctctatttctcatctaaaagtttaggtaatcatacctgctctatctcctaaagatatgtgaaagtcctctgtaagactacaacgcagatgacaataattaacaaaagtgagtgactatttagtaatataatatcctgactgcttaatattatttcattgttaggcccacagaactactgttgttcaattcaaattctagtctatttggatgaccgtgctgaagaactgctggaatgaaatggggttgacagggtacctgggcatcaactcctgattcgtgctaaacccagcgtggtagaaaaactgcagtggggtagcaaaggtgaaacaagaaaaccaaggaactcaaccccaggaaggagaggagctgctccaggctctgacactggctactggacttcctgttctgtcccttctcctgaatgcaaaatgacaagtgaactgagaaacaaagaatgggaaatatcatgtattattatcaatgacattctcacaggcagcaagggtgacacgtcaaaataagaataagaagcaacaataggcagaaaagccaggctccagtgttaaaactgttcctcttaatactgtataccaaaaaagtacaatactgtatccaaaaaaagtacttaatggcaaagaaaaacgtttctgtctctacaccattggagtattacatatggctttagtgagactgagtcaggccctgtaaaaggcaaggttgccttgaaaagaaccagcttgaactttaaccatcttttggggccaggtctcattcagatgaggtaatcttccagctttagagttggatgggtgttcaatgcttcagatagctaatgaacacagctgaaaccagagcaaatctgagaaggtaatgatatatcacagccttggattctctgaaagcactgctagatggaaatgcttgtgcaacatgaaattgccaatcatcactgtttttgacctagcaaaagtaatttcacatggttcaaccaacatgtctgttttcctgtctcagaaacttagggttgaagttgcagaagtccctttgagttagtagcatcctcccctactttccgacagctcctgcttccttaaaataaaatattaacaatattaatctcataggtccacccactatgccagtctattaaccctgccaaaagtttcttgcattcaccagccggtccttttaaaaaattaaaaattctcttgactgaattaaaagcttttggtaaagtcgggatgactgtcaccacagaaataaatccacaggaactggatccaagtcactcgttgatttatgtaggcagttggagagacatgcgtttgaaagggtatggtaagaaaatatcatggaaatcgcagacttaaaaaaaaaaaagatagattaaaaatagaaaagtttatgtcttattgatcaatatgagaatgtcacagcaatccaccaataatgccacttgtttattttcagtgagcaaggaagcaaagaaaaaataatgtttgcagcccaaggtaactacttacagctttagtcaagggggagccttccactcctctggatctcagctgctttcctttccaaggcctgtgctcctccagtcacccctggtgacttcctgttttgatttcactttctgggtgggccgtaccctttgagatgacagacaggagtcccagcagctgctggttcaaggatgctgcatcttcagtcagacaccaggagaaagagtgtctattttattctagcctggcaattctgattcctgagcttttctttcaaggagttgtatgggccagatgacacaggcgaggagcattgacacaatttctactgaaccaagctcagcagaggaaccacagcaatagaatcaggagattctctagcctacaaagcctaagtcgactctcatattcatgtcatagtctttctctttagcacattattcttttactgtaagacagatcccactccagactgtccttcaaattagagagaactaaattgtgtatggtcctgcatctagttatggagagcttttttctcactgtaagttataagggtcatggtggtatctaataataattaacatggacatggactctggggccagaatgcctgggattgagccacttcctagctatgtgactatgagcaagttttgtgccctctctgtgcctcagtttcctctatctgcacaatggtgatacgtgctgaataatttttgctattattactattgcttcattcctacaagatggaggccctattacaagagccatgcccaaggcagcttttacccagggtttggtgacataaccacctgtccttggttactgtcttgttaaaagaatgtcaatgtgtctacttctttatgtttgcattgttctgtctgtctccacaaagtctttcaagtttcctttcttccaggtcaacctgatctgaatggtttctcctaaaattatgaacttaaattctgtttctacttgctaatcttgatggcattccctccatttgtaccacagattctctttctgataaaaagctttcactccacctatttcatgcaccattctattttttaaaaaacatgctaaacaacctgctgtgtaactggattactcacacattgctgttgggaatgtaggatggtacagccactctagaaaacagcttggcagctctctgaaaagtgaatcatggctctactcctttccctctctgggtggcagccaggcatggaggcagggcaggatcatagcacctcctttaccctgcttatccttcctctggggaaggctgacaggacaggaatttagaggctccagtaggggaagaaattctttatgagctgtttcttcagtttcttgtaggctaaaacattaaccacagtgactacatgcaaaaacagaaaaatggaagtctggcatttgtctgcattttttaaacaccttaaaatgtgagtcgtatgccatagttctactgaatggagtttgtttatatggaaagatcaattcatgcacaatatcaattggaaattctcactcttctgaatcatctcaccaaagttttcagtgctgtgttatgataaattcctacagctatatgaatgaagaagctgtgggcagatcttaagataaattaagataatttaagatgttaaagataaatttaataaatttattattaagacaaattcttaattctcacagctatatgaatgaagaatctgtgggcagatcctcctttcccatgcagttctttccaattaataatgttgctttactgcaataatactgtttttccagaagatgcagtagcaagcatacgatccaatgccatagctgtcttactgcatgagatgattgcctacttcctaattcacatccctgtctccctcactaaatcgtgttccagaactacaggctggacccagcttactaacaaccaagacacgaaccaccaagccattcgcatttttatcagataactaaaacgaaagagacaaaagccgaccaataaacatggtgatagaacagaaaacaatagaagaaataatcatagccaaaagttctgaaaatatagggagaagaaaaggtattag

SEQ ID NO: 586033 - DNA, 4001 bp, Homo sapiens
aacaaagcctgaggcatcacattacccaaggctacagtaatcaaaacaacatggtactgttagaaaaacagacacatagaccaatagaacagaatagagagcctagaaacaaagccgcacacctacagccatctgtagctcaaacaaagttcacaaaaataagtatggggaaaggactccttattcaacaaaaggtgctggaatatctggctagccatatgcagaagattgaaactggacccctatctttcaccatgtacaaaaattaactcaagatgtattaaagatttaaatgtatgacctcaaactataagaatcctagaagaaaatctaagaaacaccattctggacatgaaccttggaaaataatttatgactaagtcctcaaaagcaattgcaacaaaaacaaaacttgacatgtaggacctaatttaactaaagagctctgtacagcaaaagcaactatcaacagagtaaatagacaacctacagaatgggagaaaatatttgcaaactaggcatctaacaaaggtctactatccagaatccataaggaacttaaatcaataagcaaaaacaaaacaaataaccccattgaaaagtgggcaaaagacatgaacagacacttctcaaaagaggacatacaagtggccaaaaaacacgtgaacaaacactcaacatcacttatcatcagagaaatgccaagcaaaaccacaatgagatatcatctcacaccagtcagaatgactgttaacaaaaagtcaaataataaaagatgctatggagaaaggggaacacttacacactattggtggaaatgtaaattagttcagccattgtggaaagcagtttggagatttctcagagaacttaaaacacagcaaccattcgactcacaatcccattactaggtatatacccaaaggaaaggaaatcattctaccaaaaagactcgtgcacttgtatgttcatcgcagcacttttcacaacagcaaagatatggaattaacctaggtgcccacaagaaggaacaaaatcatgtcttttgcagcaccaaaggacattatcctcagcaagttaacacaggaacagaaaaccaaatactgcatgttctcacttataagtgggagctaagcattgggaactcatggccataaagatgacagcaatagacactgggaactaatagaggggagagagagagaggaaggcaagggctgaaaaccttcctgttgtatactatgctgggtggtgcaatcattgtaccccaatcctcagcgtcatgcaatttgcccatgtaacaaacctgcacatgtactccctcaatctaagctaaaagttgaaattacagggaaaaaaaagcatctacatcctatgccacagattgactatttatcaacacaattaccagtcaaattcagtgagtttactgttggtgttttaccaaatcacaactttttgtttagaaattaatgatatgatattacctccaggggtctctacatggaatccagttcactccagggtctggtatatcctctagataggggtaaatgctctccctggtgaagatccaaccatagattccatcttctggggtcacaatgatatgtgcaccctgctcgaaacaagtggggcaaaaaagtttgtcatgaattccaaatactctttgaccaaactgcaagtctcctttacaagtataaaagggtaatacctgcttcgctgccagcttaactgctttctccaaaacatctatgttcttgttcatcaggagcaaagcttcttcttttgaaacaggtgtttctgttctgtttggtaatatcaccgcatgctcatatactgcagcaataaaagtgtccagtgcaccaacactcagagcaaggagggcaaaaactgccacacattttggaaaatgtgatataatcataactaaaatttagtgatctttgaaaaacaaactcagattcttacgttttgtttcactggaaaaactttacattaaatccctcctggcaatcagctgtttatattttcttgcacatatattacacaacacagcattgagaaaggatgttgtgcaagaaaactgacagccaggacgtaattggattgattcaagtgtacagtgcagttgttgacattgttcagagtcaagtcaacactaaaagattgagccaaccagatgaattcaccccagtccaaaacacactggcagttgaagtcttttctaataaaaaaaaattttcctggtaagccaacatttctattaatagggccaatattggaaggtagtcatcatagcaacaatttgttgagcactctacttacatatttgtatggccatttctatttgaaaagcccttgttctccatccgtctaagttccagctccccctagagtcctcccaaatccactccagtcctaagtgatatttctgaactcctatagcatttttttctgtgctgctgaatgtctctcactccttgctgttgtcttgacctttaatttaaatattataccaatacttaatattatatatgtatgttttgtcttcttaaagagattaaaaagaaacttgctgttttctttcagaacatccatgtccaataaacatctagacagagatgatgtatcctgggatgtggcccctggagggtaagggaagtgtcctgctcactgttgaacctcatcaccccagcacatgtgtgacagatggtgaaagctcaatatatgaatgaatgttgaatgacggaatctactacctgatgggccagtctattccacctttgaacattgccaattttaagaacattcttgttattgagatgcaatttactttacctgtcttctacagtttaaacccgcttccatatgaagactaatcaataattcaaaaagtgttaagttctcctttaattcttttattttttaaacatatcatccttataagtcccttaagggcagggtcacattataattctctgctgcttctatagaattttatactgtgctaagctctgtaaatgttttttgattagttaaattcacttccctcgcccaattttggattgaatctccttgtttgaatatcagttaatttaaaatgtagaattttttttaaggtttaaatctctgattctagaacaattaacactgcttctccctcttgagattctttctaagatctaaggaaaattgtaagttatggagatttgtgtctattttgggtttggtttgtttctataattcaaagtcccttggtttcaataaacttttccattatccaaatatttctgctcccagataccccacagtgtttccatatgtccttatgccctgataccatttcaggaaataaggacatatgaacataaattcagccctaaattctgagtttatgtctgacataaattgttttcatcagacatcagacataagttcttttccaaaaaaatttctgaggagaagagggaaactatgtaaaacagatggattgatctgggatgagaagaaaataattttcatatttcaagttgaaattctaactcttttcttggttcacctgactttctgaatagaatcaaaaggaaacatatgggaattccccttcattctcccagcccctagttccaggaaatgtaccagctttttttgtgtgttgaaatcaatagaaacttgagttaaatatttgattacccaatgttgttagtaatgtctttgcttcctaggtgtataaggcgtgcagctatgagttatttgaaacactgtattggtacataatccttatgacagtctggcattattgtaggattaagaagtttagagtcagaagttttgtattacaataaatataattcttcttttaaatatgtaagggacacatcttaaaggagaggtgctgtaataaaatatctaagagtttactggctttccccaaatctttatttctaaactcattgtaaaacctcctctccattctccttatcaagttcctgacccca

SEQ ID NO: 586034 - DNA, 4001 bp, Homo sapiens
agaagggcagattagtacaggggaaagcctcaccgttttaagagcttcctttactaactcatcctccagatttgcctgaatgtgaactggaaatagaagtttatcataagggtccagctccacagctccctctccccacattgagtatctgcacaccaatccctaccttattccttccagcccccatgcctctcagattacaggtactgcacccaccccatgccatcgcttaccatccacttcatccaggatgaattcatcagaagtgatatccaactccccaagttgcagtggttcctggagcccaggaccacccgcctggaaagggataagttaatgggagtagggtacggtgaaagacagaaagaaaaaatataattggatatccccagtccttcaagtgagaaggagctgcttttactgggagccacaggtactgctttgaaaaattctaagagtctcacgttgtacccactctcctattttgtgctgatgggtaaggaatacgacaaggagtgagacgatccagtgagacagtggaggtagcccagcatggtggtgggctccttgtagtcccaactacttagaagctgagacgggaagattgtttgaggagatcaggagttcaaggtcaacctgggtaacacagggaaacccgtctaaagaaaacaaaaaaaggtaaaagacaagacagtgcagtggaggccggacgcagtggctcacgcctgtaatcccagcactttgggaggccgaggtgggaagatcacgaggtcaggagatcgagaccatcctggctaacacagtgaaaccccgtctctactaaaaaatacaaaaaattagccgggcgcggtggcgggcgcctgtagtcccagctacttgggaggttgaggcaggagaatggcgtgaacccggaaggtggagcttgcagtgagccaagatcgcgccactgcactccagcctgggcgacagagcaagactccgtctcaaaaaaaaaaaaaaaaaaaaaaaagtgcagtggagatgaccgaatgaggaaagctaggaattgcagaggatagagcagaacttgcacttaaatttaagaccctcagactcctgccatcttgggtgttctatcacacctctggggaaccccaggctttctagaaatgtcaaaacacatagtgtttacctgcatgccaggtgcaatcttacacatattcatctaatcctaacgacgatgtatacaataggttctatcttcctcaccttaaaggtgtgagaaatgatggcacagagaagctggttaacttgcccaagggcacacagcgtgtaagtggcagagatagaactcaggcagtctggcttcagaggccatgttcttaacctttacactatactacttcgtgactctaccccaaaatgtggagtgaagttgaaattttgtgccccagaacatgagtttcagccactagggtcccgctcagggtcgggtctgatcacagggaagggtacggggagccaaacaggtaatatcacgggtagcagccaagttcccacccttgtgcctaaacccagctcaggtctttctgaagctaggagcaccggaactacggaggagaaacagctccgcgctctcaccagcgggccctcttcctcctccatatctgaggtcccagcccgcaacaccagttcccgggccgcagccgccatggtcgcagcggcggccattccccgcagcctcacttccggcaactgtcagtcccggcgagtccgttccccggagtggagctacaagtcccaaagggtcttcctcagcgcgaaatcgttcccagatatttgagttaagttgtttgactccagctgtcccctttcagctctaaccacttcacccaactgcaaatggaaatatggaagtctgaaacacaaactagccccggaaccttcgctgttctcttacctatgaaccttacgaactgtaaagaaaggcgcaccggaagttgtggtacccaagccatactctcataaatccagccaggtcgcgctgaaacagtttccggaagcacttctcctagatcgcaccgcctcttcctcctggaagctatataatgatatcgcgtcacttccgctctctcttccacaggaggcctacacgccgccgcttgtgctgcagccatggtaagactggaatccgtgccgtgatccagcggcatcgcagctcgggcaaggaaagccggctgtcagggttctggaaacgtcctgccctgagggcctgcgactttctgtatggagccttggatcgcgtccctggaaagggacaccaaagatttccaattccggagagcgggcccgaggaagggtcactgctcgggcgcacgaaagctgtctaaggcttgggcgtatatggggaactctggcttttgccacgcacttttgggaatgggcaggagacctgcttcctctctccagaggttgcattttcccaagcttgaacgcttcatgtgcctactctgcaggactgaggagtttgctctgtggtgtgaaaacctaaggaatggggggcgggtgtcttgccacttgtgtgacaggcttaacctttttgtatgaagttcgtttgccttatcggccttactgtttgatagtttactgtgtctgatttcttcccccgtactttttcaactagtctctagtgatccctgaaaagttccagcatattttgcgagtactcaacaccaacatcgatgggcggcggaaaatagcctttgccatcactgccattaaggtaagtgaagtagggtaaggaatagggaatgtaaatgagaattgggttgtgaagacataagcaaaaatgaagcaaggctggggagacttgagtctcatccagatcaccttgactgctggattaagaaaagaaagtggtttagggagagactgacccctttagcatttaccacagaaaataagtgattaaagccaagatagtggtctaaggtcaagccaaaacatttcacctggggaagtggggaggaggtatggttgctcacccgaattcgctaagattttcctgaaccacgagcttgtgagatttcttctagattcggtttctttacccatcccaccatcataacagcaacccttcctgcgaaatttatattccctgagaattggaggattattgggcatcttgagggataagtagaaataccaacagataaaaagtgtgaagaagcctgtagatggagggtggaagaagtctgagtgggacatttactcagatgagccataattgacactcctttcctgtcgaagtgtgaaggagtacatccatctttctttggcttttaagaatcgaatcaatgaatgcaagaatattatttcacttgagtatttctctccacaaacctaatgaattcttggctttctagatacataacgttctttttttttcccttaagtcagaatgtgtagttagttgtggaaatagcctaccagtatgtgtccatgcgtgcagggctaggcctgtcttcttggcttctgttgcatggtaggtacttaggcgacgttagggaatggatagtagtagggatactgttggctctgttgaggaatttgtagagggaaattccttctgttgggtgctctgtgaaactaataaggcagtgtgaaatactgtacttatttcagagaccggctgtgaggcttaagtagaggtgcagcattcataagtgtaatagagaataaccttcatggatgtatctaactaaaaattagaaatcttatttcatctatatctcttcccacacccattttgaagtaaatcttttcacttgtaaacatataattaaatttgaggcttagtgcagtggctcactcggaggctgaagtgggcggatcccctgaggtcaggagttcgagaccagcctggtcaacatggtgaaacctcgtcatttaattaataaatttgaaagaccctgctctcttctgaatcaacctaataatttgacccttggtcatgtttattt

SEQ ID NO: 586035 - DNA, 4001 bp, Homo sapiens
atttcaaacttacctataaggctggaaaagcagagctgcaactttagggaatgatatggtgagagtttatgttatatttttaaataaaggaaactggattaggtttagaaaaatctagagggaaaggacgacagtgagtaaggtgtccctggtttgtcacaaagatacatgatacagggatcgggaacaggaatttcctttagggatgagagattctttgaccttatcccatcactcccaagccccatccactccagtcacaatagtctacttactcctccttccagcaagcctctacttcgggacttttataacctctatggagaatactctttcccagatggtgcaaggtatgcctttcactcttttatttccccaaatgtcaattcagtgaagtgttcctgaccactatgaaactgaaatcccatctgcactccctgccaccactactcctgatactcttattccttttccttgctctatttgtcttcataagcttttaatactctatgtatgatagactctatattgttgaaactctctacctccattgtatgtaagctccaaaaatgcagcaaatgtagtcacagcgcctactaatgcttgatacaaaggtagctcaatgaacacatactgaatgaatatggaccctgcttgaggaaactgaagaacaagtataataaaaatgatgctgtaaaatttgaacaaaatgaagtaatgcacagagaataatcaatttgctgcccacagaagtggtgacatttgggttagatcttgaatcatgagtttgccaagtgcaagaaaaaggtgcacattccaagagagtggaagatggtaggtctgaaaaggccttgcacatttgagaaacagggtacatttggagtatggcagagataacagtgaccagattttagctaaccttacaatatacacaacaatggacgcattatatccaacttctcaactctaaatatccttttcagaattataattgtccagttacttgttttatttgcagtaaagttaagagtacagaatacaaaataaagttaacacagaattactggcactccctttactcactacaagtttgagcagagttaacctatattttttttaatcaaactgtaaattcaacgtataacactcaaagtgaaaatactgctttcaaaggtctcaacagcgggtattattcaaagaagtcaaaactaaaaattctgcatggtaggagagagcagctgggtggggaaaggtcaaattcaactgcttatttagtagcagatactccccatttaaccaaatgagtttctgattgggcttgcatgctgtcataaataatattcacttattactatgttttcaactagtctatcgtccttttatccacatcactccttctttcggacactcaccttcgttttaaacctaactcaatttattttcaggattcctatttgagacaagaagctcttgtgtgtacacacacagagaaaaccttggaagattatattccacagttcaagagcctgtgtagtcagtactggagcatttaagcacaagataggagaagcagtggacaccatggtgttttgggattcctactgccagggggtgggaacccagggagttccctgggtaggctcgaggtcaaagctcaggtttaaagcgaggggggcggggcatgccccaagaacctcagggaggtgtgtgggccctaaaatgcaactgggaaagaaagggcgcggccactcggaaagactcacagtaataagccaccacagggtctcgcttgtcatgctcctgagccgtcctcagatgatgctgtatgctcttgaactgtgcggggagcgggggcagcggtgcaagcgcggccatctctactccgaactcaccacttcctactcgcgctccaccggcacttccgcttccgtctgggcggtagcgcgcacgagcgttcagagcaaatgctgcccactcttccgttgctcagcgacgtcaagtcaactacggatccccagctgggacaacctcagggtgcttggctctcggcggttagaacccacagaagacccgagcattttggcgcttatgccgcgcatggcgctagcgctctctgctggtaggaggaagggtttttgttttgttttgcttttttgtttggtttgttgtttgtggcaaaaggaaggatagaaaaggaaaaacaagaaaataatgtatgttgactgggagaaagtataaaggcgagaattgcctttggcgtcattcaggaattaccacttccagttaatatgccacattaatattccatatagcagtgtcctttagaagcctttttgattttagaaactttaatttcaatacttgcatgagagagaaataatgtgtttaaattgtaaattaaatttttctatgttgacatactggataaaataatcagatttcgcgccaaattaagctaaacatatgaagcttaaagaagattgaacttttgttctcagctggctagtacgtattttagtgaatgaataatctgtagatcaccttttttttttctggagagtgattaacaatttgtaaagtattttcatatttattatcttgtcttaatgtaagatagggtgtttgggacgttttcaacgctggtaactcttaaccattgtacagtaggcatcacttttccttctaccctcaatgacttcaattctcttcctctcctctccatcccttacttatatctttcaggactgtacactttatttacttcctccaataaccttctttattttatctcagtcctcagttttgacaattcatcttaaaactagttttcactgaaatcacactatccccaagagccaaaatctccagctcggaaattcccctctgcctactattttctgatcactctctcacccccagaagaaaccgctccatgtcctcatattatcccactccacatacgttgcctagacctatttgcaaagtccatcatcttattctgggtcgggcttttttactcagcctgaaactcagttctgtcttcttccccaatctcagcggcatatttcctaccactggagaatgtatggtttctttctctttctcttactcccactatttggactttccagtcaaaagttgctagattggtagagaaatcaatgaagaaaagcagagttggataaccataactgttttctttctatactcacaacttttcatttatttgtttcctattacttcttgattctcaaccgcagctgcccttaaagatcaactttaaagcccactccaggcattctcacttaattgttctaggtgggatcctaaatgtcagtatctttaaaaggtcctcatgtaattttaatgttacgtctagggttaaggaccagtgctgtagtccacagatggtgtttcaaacttctctcgctctattcaagctaggcactcagccccaatttccttggtctacaacagcatttcctgctattgagattaaggccaccaccagatatgaattattttgccttgcctctaccacaacttaaagtaataataactagctagcagcatttgctgagcatcaactatgtatcatgcatgtttctagggtctttatattaatttatttaatttgcaccacaaccctatgaggaacatatcattattattttacagatgagaaaaataagacacatagaatctagataacttgcactaggtcacagccaggaaggatgagtattccacattaaaatctaggtattttggtttcagagcctgtgcacctagccattactacttgactatgatgtctttctagatcttatgttttatcttttctctattccatcatcttatgtctgagaaacaaatgttcctcttcctggtagaaggctgcaccctcctgttactctcctgatctcccccttcagaagtgaattttgccactctttctcatttgcatacattcatgtgtactcttatttgcataccctcat

SEQ ID NO: 586036 - DNA, 4001 bp, Homo sapiens
ccttgtgccaggttctggagctcctgccttggccagaggaggtgagggtgtggctgctgctcgcccagctccacccagttgctatgactgtagaaatcctggtccggaggacaggagaaggggagtgaggcactagtctggcctttctcaccatctccagcactaatatgccactcctttgagttccccatcccgaaagtcccctcccacccctactgctcccaccagacaccccaagtcccctccactgccctctctccattgctcagagcagagctttgcccaggtggaaactgtcccagcatctcttcccagctcagagtctaacccaaggcctctctcggcctgcagagtcctgctgcgtgtgctgctccctcagctctctgacctcgcagccttcctctctcaccctcacttctctccagccacagcgccctccttgctgttcctacaggaagcactgccagcttggaggtggggaactgggacacagcctcggggcaccgcgtgccagtgcccaccccttccagagtggaggagacatgatcaagaaggcaccataggacgcgctccatcccggacaggcacggaagtgaagacccctctgaccatcaacccaaccctgttctcacctgcagggcatgaagtgcagccccgaggcgctggcgagccagggtgtggtcaagggccctggctgccaccacggtctcccgcagagcccctaccaggcgcgcgcgtccctgacccagtcgctcagcatcaaagtgcaggtcggggtcattcctggaagttggcaggaagtcctgggctgcattggcacgagacacctcacctaaggctgctcggaaccgccgagaagaaccaggtccaaagtaggcggcaaagaggtcatcagcaaggagtgttcgaccctggggagaatagcgggcgacggggctccagggaggccctttggattgactgttgcccaccttatctcagcaactgacactcaaggctgggtatgagggtcctgagccccacaaaggagggacagtcccggacctttctaaggagggggactcctaatttcaggaccaagactactgggtattattgctgcaggggtggggccatgggtgtctcttctcttggcaaccagagccctcaaggagtagaggccccatggaattggggactctggcaggggtgtgacaggaccctgggatgctcaccaggaagtcctcaagacgaagaggggggcggcctgggggtggctgctccaggaagagctgcagggtgacgttgagcgctgcctcctcagttaggtcttggtgggtgatggagccaggggcagccagcaggctccagatgttggggaagaaggcagatgtggggggcagcaacagctgcagcagaagcaacgctgaggggcccgggtgggattgggggacctccgtggggagcatggctgagacatggacctgggagacagaaggctctcaagggaggaggaagcagccgcgattccagggcaggccggctctgcgggtctccatgggaacctgctttacctcaaaagtcgtgtctgctccagcctggcttccccaccctctcgctgtcacccagacaacctgagggcctcatcggaccattagggacatacacacctgccaggagaggggtccaaggttcctcccccacgcccccctccccagtccctggctgcgtccccagccctgccgcagaaacactccccatgctcaggaagcctgagtcctctcaggccctcccctacctggttgctgggtctcctgggcagggctggcccgggcttgacgtcacagggcacttaggtcagagttataattaaccgaggctcagcagagggggaggaaggcctcaacagggtgggggaggacaggcaacccctggccctttcgctcctgcctgcccaaagccacaggcagcagcccacgccagggcgggcctcccttggctgcagtgcggaggtgagtgagagctggggaggaggaagggagtaagcagcgtgactcaggcctggcacagtgccagggacagacccagatagacgcacccctctgccctccagaaccagggcctcactcccaccctgcagcccccaaggattcaggcacccagcccctctgctcccctctctgcccccaccacagacgacaagaggattttgtgggaaaatattttattgctgccatccccatggtgagccgctgggggtgaggggtgaagctgggtggtggatcacagcatcttctggaatagggcgatggcctcatccaccttcctgagctctgcttctgtctgttggagctggagtggaaccagggggtgggtgaggacccaggtccaagtgaagagacccccaaacacccaggacaacaaagttggaaagatgagcgaggaccatgggaggtcagtagctcagaggaggcgtgaacctggctggcctggctccccacccattcccaccagcacccccacttccaccaccacctcttgggtcttgcctttttccaccaagtggtgagtccccaagaacaaaggaacctcagagcctacgtgttccccattcagtgtccccacctaagcaggagagcacagtctcccaggccggtcacttcatttgtcagatgatgatgatgatattgcccccctcccagggctcttgggagaaccaagtgagattaaccacgtccactcaaggctctctagctcttggcctccatgactggttttctctgtgtctgtgcagtttactccactgcttctctctggcggaacccaggaggcaggggacaaacaagactggccttccagggtcagcccagtaggcttgaaagtaagtggtgggaggcccagggctccccgactacatgtggaccccaagcccagccccaggcatgcaggtttccacattttgggcagctgggtggggtacgaagggtctggctgggagataggatgcctggttctaggtcagcctccgtctcccacctgttgtgtgaccctgggttgtgcccagcccccagctgctccccatgtgtaaggggagggccttctatggtccctgctcaaagcgcctgggctccatgctccccagtggattccccagggttgggtacagagtccagcttccagaccaggattggtttttgttttgttttgttttttttccagacagggtcttctctctgttgcccaggctcaagtgcagtggcatgatctcggctcactgcagtcttgacctcccaggctcaagcaatccgcccacctcagccccccgagtagctgggaccccaagtgtgtgccactatggccagctaatttttgtatttttgttgtagagatgggatttcaccatgttggctggtctcaaacccctgggctcaagtgatccacccaccttggcctcccaaatttctgggattacaggtgtgagccactgagccaggctgttttgttttttaaggctagtgggagtggagaaggaacaaagaaatctgtaactggttacgatcaattagttgtcaacaccactgcactcggaccagcccagaccagggttttgatggaggaaggggatggtgtgggaaatgcccacccaggccacacaccttggcttcatctgcctcctggacttcgagcggcaccttgacaggatagcccgaggcagcacggcgttcccgcagacgctgggcctgccgctgggcctcaactcgcttggcttgcagcttgcccagctcccgtgcagggtccaccagcccctgaagctgcaggtggatggagcagcgatcagaagccagagccacagcgcaaccctggggggcgggagcccccagggccagaacagccaccacacctgcgctggccagggcctgcacgtagcccgacaccgccgatgccagggcgcccgtggcctcatccgccacttccaggaaacctgccagggagggagaaaggtgaggcctagctccatggag

SEQ ID NO: 586037 - DNA, 4001 bp, Homo sapiens
tgtagattcaagttagaaaaaaaaaaactggattctaaaacaagtaattaaatacatgatattgcaaagaaaaaagtgaataaaaaataaaatcagataaattagggaatgactgatatgatggttaaaatcctcatcttaaatattaaatccttccattcaatggaaggcaacgattagtaatgacatattctgctaccgaaaaacaaatacaaaacttttcttattcaaaacttccgaaattttatatcaaatacttcattcaaatattcaatataaacaaaaatgtttcctaacagaaacttagagcataaaggataaactgttcctgagagttcaaattgagactgcatttctaattatgatataatgctatgaacaatcagaaaaatgaatgttacctaccatgcaaatttaaatttaagaacattagacggattgaataaccaataagtcaattacatcaattagtgaacagaaaaaagaccttagctaatcgtgaatctaacaccaaagaaaaaatttaagtcgaatccaccgcacatcttattacatagaaaaggaaatgattagagtaagtcgtatttaagtacctagtctagctggggatcaattaattaatcggttatagggcaggacgtgaatgttgagatcggatgtgctttctttcatcgttattccagttcatcatccgcaagtgcaagagaaggtgtcagagtaccgaagctagggggcatgctgtagcaaggggaaaagaaaaatgggaaaggtgcaatggatgctgcatagttgaataattatctgggtggcacaatgggcgagtcctgccgacatgagcgctgagtgagcggctccgtaactctgcccaaggcagcccccatgaacaggcaccagaagcgacagcaccgcttcgcctccccttccaacgaagaaaaggatgcccgcactcgctttaccgttatgttttcagacaccgactcgcggagcaaacacgcaaacgcacgagctcgctttaccgagcctcgcgcacgtagggcgagcaggggattctctgtcgcccggggctaccgcctcccccggaaagaggcacggggcggaccgcgggcgcgggtgggcagggaagcccgggcggtggcacctcaggtgacacccacagtctctccagcgagagcagccccggggcggtccctgcagccaagccccaggcgcgcccgccgccgtctccctcggcacccagccccgctggcgggtgggcggtgggcgctcggaaaacccgcggatgggggtgggggccggggcggggaaggcgcgcccatccatccccgtcacctttgcgggccacacaccactcggtctgctccggccagtaaggaagagttcctctcccaacaccccctccccgaaaaaagcaattcctcagggactcgcgctcaccgtgaaatcttgggggctcacgccttaccccttcttcatgcttcggcagcggtcgccggtccccctcggctcgcgggactccgcctagagcccccaggagggtcgggctctggggcggaacccgctcagggcagcggcccaggcgccaggccacagggaacgccgcctggggcgccaacccgccgccggacccaccgtgtgctcgacgcgcgagtgaacaacaccgcgagctgccgttccccccgccccctccccgcgcgagacgctccacaaccgggcgcagggacccgcgccagaagcaggggggaccgcgagactctttccgcctatggtcccatccttgccccccgccccaggagctattcctggccagtcagaggtctcaaaacttcagattctcactttcctcttcagcctccagtgcccaggtgcagccgaggtgggaaatccagcctccgcccactcccccattagtggggccgaagctcgctcttcccccctttcctgaggttctgtggtattgcccaatcctcagtttgggggagggggacgaagagaacactgcttggctagggaatgagggaagatgatagccaattgaatggaacatccattcgggggcggggtcaaagggggacacgcccccgttccgccccctcgttgcaaactacacttcccattgtgccctctcgcgcttcctgccgcgctgcacgctgggagtgcaggaccgcgaggcctcaaggtattttggaactcatattctttagtcaactaggtcctaaatgttataaactattataattctccctttttccctagataaacttttttaagctctcagctcgacagtagttattctaataataattagcttattgtttcaaaatgtaagacattatttcttagcaaagaaagttaatgatgtgttccattgcaatctgtcaggacctgggagcctcttcttcttccgccctggcagggtctccgcagaagatttgttgccgtcatgtcggctgcgattgcagctctggccgcttcctatggttcgggttcagggtccgaatcggactcggacagtgagagcagtcggtgtccgctgccagccgccgactccctcatgcacttgactaaatcgccttcatcaaagccgtctctagcagtggcagtggactcggctccggaggtggcagttaaggtaagcacttttgctactaatgcagtgtgggaattgttggcttcagctccagaactgccagccgcttgttaggtaccgggttacctctttctcagtgctcagagataagttgctaacgtttgaatttcttctccttcccacatgcatcctcgggagaggcagaattggaagttcggaatagccctccgatgctctctgcccttgcctcccgccatcagaaagcaagtggaaggaggggatgaaatttgaatttgtggattagggacatagcctggaaagtgcaggtgtaatctcggaacataagtgaaattagatcaggacttcccaaactagagtattgtgtgagcagtggcctcgatttgtcttatttttgaagaactaggttctaatcctggcaccaccacttgtgtgaacttggacaagttatgcagcctcctttctttcctcacctgtacagtggagatcattttcaaaacatctgtctacatgaaaagatgagtgtgaaaattgagtgaaattacacaaataaagcatatagcacagagccaactagtgagagtgcagtaaatgttttatgattgtgtgtgttaatacagtgagaaaaaggccttggatttgagaaacagctgcatgatctcaatggaggaagctgattaataaggcaagagtttccaggcagaggtgacaggcaagcctgagaacgcaaagagcctagtgggtttgaagaactgaggaaaagctgatgtgtctggagcctgatgagagcatctaccaattggtagtgtaggcccagtagagcccgaggtaggtgatcagctcaagatgtgaagaggggaggcggtgtccaaaaattcctttgtatcatgtccccaagtctagtttaatgacttaagaagtgttttacaggtttttaacaagctgtatgtgaattttactttttaaaaatggacatctgtcatgaaagaatgcttagaatcctcctaacttcctatcaaaacaaaactttccaaacttaagcccctccagtaacctcctgagtcttctcctttcacagctcagctttttggagctctctttttgtcttcgtctcattttctcctcaacccaatgcagtctggccctatcctcttgggaaactactgtctgtgagtgatgtcccaggccttccagttgtcaagttcagccatctgacttaaatgtctgcatcaaatgacactgttcattagttcctctttcttgaaactttctctccgtttcgcttccatggggctctactcagcattctgttccaattattttactctcccttttcaatactggtgtttcccaggactctgctcttagtcctctttgcattccacatattctccca

SEQ ID NO: 586038 - DNA, 4001 bp, Homo sapiens
accccagcatcacttcaaaactgctatagaccagtgtctgccatgtgtctcccttttccaaaagggagatggttacaaaaaccatggtcatatttaaccactgcattttagtggggagagcaactagtttgtcttcttagtccatagggctctggaccacgaggaaccacagccaggcctgatggagagaactgtgcaatcctgagaaatgttctgtgttgcactaggcaccttgacaaagtgtcccccttggggtggggagagtgtgttctccatgtgggatcaagagtggagcagagatctggtcaccagaagagagactacggtaagtgctgttccttttccactaagccacttccctttccttctagacacagaactaaactacactccctagcttcccttgcaattaagtgcagccatgtagtcgttgagtgcctggcccataaattcctcctgcactgcctctcttctttccccacccactggctaaatgcggagaattcagagggcctaaggaaaaaaaccacaacatggaagaattttaggctgcagcttgcagagagctgcccaaaggaatcgtctgactagaaaccgctacacaggactgtgtgagcaagaaacatgcaactgttctattggggtgaattgctacagcacttaacctacctccactaatataaattgtttaacatttttttgaattacaaaagcaatacaatacaaaacatttaaacaatgcagaaataataaagttttttatccctacctcctctccctgctgtgccaaccctaggggataatcaatgtcacaggatatccccaggaatatccatgtacatacatgcacagaacaagtcagggaaaataaactaaatttattattttagtgagattctagtgcacctaacactaggtaagcacttcaggaaaaggcagtgacaagtgattgctaaagataccatagtcttaaagttaagtcagtaaacacaagatagtaatcccagataaactggaagctgtagagttaatactcctttactggtacagagcagtgtgtgtaaattgtagaaaatttagaaatacataaaaagatgaaaactctactactcgaggagtaccactgataaaatcctgtgcatttccgtttttttaatgtacatacgaatatttttaaaaagagaaaattactcccttctgattagaaaagatcgaaatttttctcttttagtgataatcaagtcagaaacttgctgtttggctcgagttaggaaaacctagcctggtagttaccacgcaggttgaaaggccagtggggcataattaacgagccctcagggtccacgctcccgccctcggagctcagaaccgacgggaggtgcaggaggccgggcatttctacagccctggttcgttcctaaactactgaatcttttaaagagatctgagtgctccttatacacagctgctttaattaaaataaccacctgagcccttttcctccgaactccacatgcgctcagttctcaaagcgccgatctcaagcggccgcccggatgctccggcccgacttgtgccccgaattcccctggagaccctcgcactagcacggcgtcaggaggaggcttcgggtgacgagacagcgggcaacggctctggtccagagcgcgcgtgtccgccgttggaagcggtcacggcggaaccctcaaatcgccccctttcctagagacctcagcggagccgcgagcaaccgcgcagcccccgcgctccagccctgcgccctaggcacacgccccagagcagcagctcgggttcggcgccgactccgcgccgagaccagcccgctaggggaggactcacagcacccagctcccaggagggcacgcagaggactaccgagccacactccgccccacgctcgccgctatggttacttgccagccgacccacgcgagccgctatggttactagcccgccgcccctcgcgcccacgcccctttcgctatctcgcgacagctggagaagcctcgcttccggccggctcacttacggacctagcgtcacttccgcctccggcgaggctccggcctcgggtccggatgtataaagcgcggccccctgcggggagtggtggtgagtccgagggtgccacagcggccctgcccctgcccctgcccctgccctgagtgggcgccgcgctacgggggaggggttaacccacccctcctccccggggcctcacgcgggtgggaagggacagtcccagcgacagaccaggcgcctggacgcgccgtggacccgcgtgcggacggcggggacaggctccggtgctgagcgcctccggtgtccccagcagcactgacccacttgcaggccccggagctgagccgccagccatggccgctccccgcgggagggccgcgccctggacgacggccctgctgctgctcctagcctcgcaggtcctgtctccgggaagctgcgcggacgaggaggaggtccccgaggagtgggtgctcctgcacgtcgtccagggccagataggcgccgggaactacagctacctgcggctgaaccacgagggcaagatagtcctcaggatgcgcagcctcaagggagatgcggatctgtacgtctccgccagcagcctgcaccccagcttcgacgactacgagctgcaatcggccacctgcggcccggacgccgtgtccatccccgcgcacttccggcgcccagtgggcatcggcgtctatggacacccctcccacctggagagcgagttcgagatgaaggtgtactacgacggcacggtcgagcagcacccgttcggcgaggccgcctaccccgccgacggcgcagatgccggccagaagcacgctggtgccccggaagacgcctcgcaagaggaggaatctgttctctggacgatattaattagcattttgaaactggtacttgaaattctcttttgagtcgttgaccacactctgggatataaaaccctccatctgtgaagctgattgcagtttgctgtgaaccttgctacttgtacttggttgaagttctaggtacctttagtcaagggatggaaaaataaagccatacgcagttttgttacctcagttaccccaaaaataggaaaagcagcaagcacagtattttaaagatcataattcctataaaaggactgtgcacaaagtgtttagactccattttcattaggcaggttgactaaaaatgattgcagtaacaggtttatataaaatagagcaacctttcatgctgtgacacaaatcaaaaggttgataactttgtaattttactctggagattctaaccgaagttggtgtaagttttcaagagttactaaaatcaagttggaaatgatttacgtacacttccctgagcctggactaaagcctcatgcctgtaccccaagtaggtgatggtacttttctatacaaaaaggatttcctggcaggcaggtatttacaaagtttgttcctgtaccagtccaataatgacaactctaaatccagctgcaccaaatcttagtgggccatttgtcatacctatgaaaattcttcagttattaaataactttgtcagtgctacctatggtaggccggaaacaatgtagattaggaagtttcatgaaaattaacttttggggctatggagaaacagttaagtatcttaagttactaaacatttccactgaatttttggagtgagccaaggttactataaaatactttggaagatgaattctctacctggagttagtttcgagagtaagcgtagcttttaacagaaataactgcagattttaagctcataatttgcaaaaaaaatcttttattggcatgaaaataatgttgtaaatggcaccaaatattccacttaaatgcatatacagtattagagtcaaaaactattttatccctctttgctgtttttcccccttctgcccactttcctgggtgttgggggggcccgct

SEQ ID NO: 586039 - DNA, 4001 bp, Homo sapiens
caattgggaaatgaggtcacaggctatcattcaatcaggaatggactatctcaccccaactgaccgctgacagtgaggccactgaccggatgtcccgcaccgcctccatgacgttgatctcgcacataagcttctttgttacccaatcaagggcagccacatgacctcggcgccctccaaaagccaggtgtctgttggaggtgaggggcaggcagggtgttaaggcaggggaccaccgactcagacaacttgaggtctgccccacgccagccccatctctccaggcgggcagacacatgttgctgtaggtgcttaccctcacacccaagcaaatcgaaggaccctcccctcatcagcaacccaaacatacactgggaatggctgaagtggttaaggaaacacatcttagttcaagagtcactagaattcaaccttaccttccagttcgagagtagtttagtctgtagggtccaaactgccgcagattcaagtcaaagtgctgggaaagagaagagtgaaaaaaaagagtgccctgcagtaacgccttcttctagcccccattcctctattgtcctgcaccaccaatcaatcccttggctcctttacctcctcaggctcaccttggctgcacttgcaatgtccacagcctccacaatgtcagcctggcatatctttgctgtgtcttccccatcctccccttccagaaacctgaaagcaagggttaggatggcagtaaagcttcccaatatgaagcaagtataccaacataaaaacgagaaaagacagtcccaaaaggcagggaatgggggtccagattagggctcactcacccaggttcttcagcaagcagcagctcagaacgagcagctttgatacttgtttcctcttcctcagcttcagccacctcaagtcggcttcgagttttggctttagaatgtggtagctgtaacattgttggtggggaggagtggcagaagaaccacaggataagtggggtcacaggagagctacctgtcccagcctccatccaactcacccagacactccctgcctccagcacttcccaactctccggctggacctcacctttcgggatttgtcaatgcgacagaacttctggaccacttccacagggacgggggcggggcctgggaatggatcttgggtctaggggaaaggaggacgcaattagcagacagccttggattgaccccaaccctctcactctcaaggaacgaggcggcctgcctcgccacccatcaggtcccacgctcaccccggacaagccgcgctgggactccgggttcttccattctcggggtttcttcgggacctgaggcttcttagagatccgagacttctttaagatgtaagcattttttggtctctgaggacggagctcccgattcttcttgttacgaggaggccctggagaggctccggctgtggtcggaacggtctcttcctcccagtatcgccgcggtttctacaggcacatcaggaactccgcactcacgccccgccccccgaccccacagctaaaaacttcgtttcccacccagggaggcctctacctttctcttggtctgaagtttgtctttcttgggcgggacatccttgcccggcttgggggctgtctccatctcgcccacccgaacggcgatccacgtgcaaaactcctctcagctgccacacagtcggcttgaaaactcccggaagccctctgtccttcatccaatcagcagcgtaccaggtatgaagctctctaggtgccatcttgagtgagggcacgctctccttagaggggcggaacagtttttggcaccttatcgcgagcggcagcttatgcaagagtgatttaaaaaagaaaggcaggtccggagccaggggctaagtagcggtgcggtttctttttctggattagtttccccatcttgcctaaaaatgtcctagtctagtctttttagcagaactccactccctaaacatgtcagaactacacttcccatcaagggtcagaaagaaacttccggcacagtcttttcccagcattccttgtttacttccgggtttattactactgaaggaagaacgtgagtaggttaggatttcggttgagaggcttggggtcttgcgtttcgcccaccatctcctggggacagggtggagtcgatatccgggacgggggggaggttgcggtgcccctcagggctacctctcaagagtgctatcatttccgcaggccagatcagaaaagggagctcaggtaccttccagagagtgagacccagcgcccttgtctcgcacccagtaggctttcatccccgccatggcggagctgatccagaagaagctacagggagaagtggagaaatatcaacagctacagaagggtaagggaacagggtcggtatggtctcgcccaatgcacttacaacccaaagccattaccgagataaggtttgttgccccatctgggccctcgcgtgcagagacttccccgcctcagtctcagtactcttccctgttcactcacccgctgcccccatccttttctgcttcctcagatccatatccacctgactaggattgtggggataggtggcacatttgatgtttctaaattgcctttcctctcatccccagacttaagtaaatccatgtcggggaggcagaaacttgaagcacaactaacagaaaataatatcgtgaaagaggtgagggactgggatttgtggggcgaggagggacctgtactagccatggttctgatcacatatgtcccatccctccatcaggaactggccctgctggatgggtccaacgtggtctttaaacttctgggtccggtgctagtcaaacaggagctgggggaggctcgggccacagtagggaagaggctggactatatcacagctgaaatgtgagtttttattccaccaccgtgtgctgcaccctgtgatgcaagtgaaccattggagtagaggtgttgaaccattgcagaacagctctccatagtggcccctagtcctccagttcctccaaccctttccttcccttttaaccccccttcttctccctcccctggatctcaagttttccacctatctctttcttgcgtttagcactctccatagtgagtcctactaatttctccctttctgcttgtctcccttgtctctccttagtaagcgatacgaatcccagcttcgggatcttgagcggcagtcagagcaacagagggagacccttgctcagctgcagcaggagttccagcgggcccaggcagcaaaggcaggggctcctggcaaggcctgaccccatggtggggggaggggaggggaggggagggaatgaggcagctctaggatctatactgtagctaataaaatgtaaaaacacctggctctgtttcctgaccaggcacttctgtcatatccccacagccccttccaccttaacacacaccacctgtattaccccctcaggttcaaactcttgcacttggaatctctttgtggcacagtgttctttcttgaaagtgaaatcctaaatgtcttcaaacctacttcttgcctgtatatacaacccttaactctccctcatcttggttggcatgattcttttggaagggcatttgcaacataccatattgctaggaatgtcggtttaattgaaaaagaatacacagttctctaacctgaggccccaggatgaaatgtggttaccctccttgccaacagccctggcatctctattagtacttttcagcctctgtcttcctagaatttgcttgaatgtagctttaaactgacttaaaatcccagcatgtaatgctttatggtattataagtcctcccaagtttatatgttgtccataaagttgttctgccatttccttgtcctaaaattgttttatacacatttgcagcaagggaccagtggtagagaggttactggagagaaactgttctgaggaaacttttttcaccaatacctca

SEQ ID NO: 586040 - DNA, 4001 bp, Homo sapiens
gacaataagcatcactagaatggtgcaatagaaagaataagcattttgacaacagatccgagctttgcaacagctctgtgatcttacagaacttcccatcatttgatctcctctgtaatatgggattaataatgaccaccttgtaaagttgttttgataattaagataataactaaagcacccttgggccggaggtggtggctcacacctgtaatcccaacactttgggaggccgaggtgggcggatcacttgaggtcaggagttcaagaccagcttggccaacagggcaaaaccctatctctactaaaatacaaaaattggcaaggcatggtggtgtaggcctgtaatctcagctacttgggaggctgaggcacaacaatcgcttgaacccaggaggtggaggttgcagtgacccaagactgcaccactgcactccagcctggaacgacagagcaaggctctgtctctaaataaataaataaataaataaataaagcacccagcacagtatttggcatatagcagctattcagtaaatgctaggtattatcagctatttcatgaatttatgaattcataaaagcaaagttaagcacaaaataatccatttttaccgctctttgtgtaacacctttctgtgtttgttgttgtttattttgtacacatctctctgtgttggaatacctgctgtctaagaacatctagctgctctcaatccacaatgacaggctttttctcaagaacagtggaataggaggcacacagacaggggagtgagcccctccacagaacagcagcaatgacctggaccactgacattcttgtcatgattcttttgaaatcgtaaatctctctctatatggtataacaatttgcaattccttgttttctaagatgtatctactacttatggccccaatcaactactaactcacagacacacccatgtttcctaaatcaccagatttcaaaagctctgtctcctgtctaccgtgtaaataaatcaacaattaagtcaccttgttttcatcttcttatttaaaaagactaaggcaatgaattgctcatagtaagttaaacttccctttggtctgttgcttgaaatatttccaagcctccatggactgcttccctttcaggaagtgagaaacacatggactgagaaaagacaaagtaagagaatgttttaaaaatgtaaatgtttattccaaagtgcccctttcaaagaaggacagacttaactggaaaaagtcgctgtcaaaattcgtttttccaggggctctttgcacattttgcaaacagcaatggaaagttgagcctccgcctggagctggcatggagagacactgtttcccgcactgtgccaggctgtgccttaggctctgctataaaaatatataggaaagcgtggcgctgttcaaacatagcgaaaggaggcttcggtgccattacctgaaagggagaaatgttttacatttctttcatgaagctcatgaacgaacacagaactttatttggaaagaaaaatggcttcctatttctcatgaagtagttccacaagccattgatcctccctcttcctccatcttcgttttgtttagttttgggcctgaagaactaaggatggccatagcctccggaagggaaagagtcgggggagaggacttacctgtgccaggccagcaagcagaagagtggagaagaggagcccctgcatgtcgctgggaccgtggagccaccctgaggggtagagaagtcgccgcttgttcattgctccgggtacacaaagctcccctgtctcctctgcaaaccccacgctcctctgcacaagaacacacaccctctacctcccacactaccaactttcagcctgcactttcatttttaaggatccgttttaataccctgtttactttcatgggactcttctaataacctgccttcgcagtgagcgtgtcacaggtcaggaatgggcgagcactttcctcccgggactcaggagggcagggcaagtagtgactgttctctaagtgactgtgttacctgttcctggagagcagagcctgcccccgacaacgggtggggtcccacgtcattcccttccttgccctcagcttctccatctgtgtttgccctgctccgggtcctctctaggctgcttccttctccagcttcaccctcacgtacagagtgcaggcctggcccccccaccaacagcacccatcgcagcctagccctggctttccccctccatattaatggcaggctctcgaaggaccctgactcccccagctcagattctctcggaggcacccacagtgccctgggctcacctttatcccaacacctttctcatgccaggtggactgtgagtggaaaaaatacagatggagcagggggcggactcctacagtacctggcctgagagacgcctctttttgtggccacagttccatgacagatgacaatgaagttaacctccatttttccgggcctaaaataaaacaattacactggtagcaatcattcatttaatgaattaagattaaaaataagcctggccaatatgatgaaatcccgtctctgctaaaaaaaaaaaaagacacaaaaattagccaggtgtggtggcaggcgcctgtaatcccagctgcttgggaggctgaggcaggagaatcgcttgaacctgggaggcggaggttgcagtgagccgagatcgcaccattgcactccagcctgggggacaagagtgagaattattctcaaaaaaaaaaaaaagattaaaaataaaattttgacaggtttgtactcctcttcttcatactcacctccctgaaaggtgtgaccaccagcgcatctcctcctgtgtcatcatgtgggaccttcgcttctccatgttctcagcctgggtctgtgttcccatcttcatttgcagctgccgtggtgctttgtccctctcaggtccctgaggcgtcccacctgcctgcccccatcccaaggcctatttctatttcctttgatcagttacctatccctccttttcctgctgccttacctatcctataccgattgctcacctttgttactgttcaaggcagtcactactgtataaagacaacatcaagcctcgcttaggcctgagctgagggcctgggaaaaacgaggctgtcctccaccacagagaatctggtgtccttggagaaccatggacaccctaaaacctgcagatcacacagagcttactaaggagtcattaaactgtaagtatatgcacatcaaacaacaaggaatacccactgcagttaggatgccaacgccttatcttgcctccctaagaaataggacaaaaccagataatggagtagtgaagaaaatgtgtctgttttggtccaatctgatctttttcttttctttttttttttttattattatacttcaagttctagggtacatgtgcacaatgtgcaggttagttacatatgtatacatgtgccatgttggtgtgctgcacccattaactcgtcctttagcattaggcatatctcctaatgctatccctcccccctccccccaccccacaacaggccccggtgtgtgatgttccccttcctgtgtcccagtgttctcactgtagagaagtccttaaatgacctgatggagctgaaaaccatggcacgagaactacgtgatgaatgcacaagcttcagtagccgattcgatcaactggaagaaagggtatcagtgatggaagatcaaatgaatgaaatgaagcgagaagagaagtttagagaaaaaagaataaaaagaaacgaacaaagcctccaagaaatatgagactatgtgaaaagaccaaatctacctctgattggtgtacctgaaagtgacggggagaatggaaccaagatggaaaacactcttcagaatattatccaggagaacttccccaaccaagcaaggcaggccaacattcaaattcaggaaatacagagaacgccacaaagat

SEQ ID NO: 586041 - DNA, 4001 bp, Homo sapiens
ggacatagtcaatatgtgggtaaatataaagaatcttatatttttcacttttcctcaggcatattttgattgttttcaacagcaaaatttcaggacaataagcatcactagaatggtgcaatagaaagaataagcattttgacaacagatccgagctttgcaacagctctgtgatcttacagaacttcccatcatttgatctcctctgtaatatgggattaataatgaccaccttgtaaagttgttttgataattaagataataactaaagcacccttgggccggaggtggtggctcacacctgtaatcccaacactttgggaggccgaggtgggcggatcacttgaggtcaggagttcaagaccagcttggccaacagggcaaaaccctatctctactaaaatacaaaaattggcaaggcatggtggtgtaggcctgtaatctcagctacttgggaggctgaggcacaacaatcgcttgaacccaggaggtggaggttgcagtgacccaagactgcaccactgcactccagcctggaacgacagagcaaggctctgtctctaaataaataaataaataaataaataaagcacccagcacagtatttggcatatagcagctattcagtaaatgctaggtattatcagctatttcatgaatttatgaattcataaaagcaaagttaagcacaaaataatccatttttaccgctctttgtgtaacacctttctgtgtttgttgttgtttattttgtacacatctctctgtgttggaatacctgctgtctaagaacatctagctgctctcaatccacaatgacaggctttttctcaagaacagtggaataggaggcacacagacaggggagtgagcccctccacagaacagcagcaatgacctggaccactgacattcttgtcatgattcttttgaaatcgtaaatctctctctatatggtataacaatttgcaattccttgttttctaagatgtatctactacttatggccccaatcaactactaactcacagacacacccatgtttcctaaatcaccagatttcaaaagctctgtctcctgtctaccgtgtaaataaatcaacaattaagtcaccttgttttcatcttcttatttaaaaagactaaggcaatgaattgctcatagtaagttaaacttccctttggtctgttgcttgaaatatttccaagcctccatggactgcttccctttcaggaagtgagaaacacatggactgagaaaagacaaagtaagagaatgttttaaaaatgtaaatgtttattccaaagtgcccctttcaaagaaggacagacttaactggaaaaagtcgctgtcaaaattcgtttttccaggggctctttgcacattttgcaaacagcaatggaaagttgagcctccgcctggagctggcatggagagacactgtttcccgcactgtgccaggctgtgccttaggctctgctataaaaatatataggaaagcgtggcgctgttcaaacatagcgaaaggaggcttcggtgccattacctgaaagggagaaatgttttacatttctttcatgaagctcatgaacgaacacagaactttatttggaaagaaaaatggcttcctatttctcatgaagtagttccacaagccattgatcctccctcttcctccatcttcgttttgtttagttttgggcctgaagaactaaggatggccatagcctccggaagggaaagagtcgggggagaggacttacctgtgccaggccagcaagcagaagagtggagaagaggagcccctgcatgtcgctgggaccgtggagccaccctgaggggtagagaagtcgccgcttgttcattgctccgggtacacaaagctcccctgtctcctctgcaaaccccacgctcctctgcacaagaacacacaccctctacctcccacactaccaactttcagcctgcactttcatttttaaggatccgttttaataccctgtttactttcatgggactcttctaataacctgccttcgcagtgagcgtgtcacaggtcaggaatgggcgagcactttcctcccgggactcaggagggcagggcaagtagtgactgttctctaagtgactgtgttacctgttcctggagagcagagcctgcccccgacaacgggtggggtcccacgtcattcccttccttgccctcagcttctccatctgtgtttgccctgctccgggtcctctctaggctgcttccttctccagcttcaccctcacgtacagagtgcaggcctggcccccccaccaacagcacccatcgcagcctagccctggctttccccctccatattaatggcaggctctcgaaggaccctgactcccccagctcagattctctcggaggcacccacagtgccctgggctcacctttatcccaacacctttctcatgccaggtggactgtgagtggaaaaaatacagatggagcagggggcggactcctacagtacctggcctgagagacgcctctttttgtggccacagttccatgacagatgacaatgaagttaacctccatttttccgggcctaaaataaaacaattacactggtagcaatcattcatttaatgaattaagattaaaaataagcctggccaatatgatgaaatcccgtctctgctaaaaaaaaaaaaagacacaaaaattagccaggtgtggtggcaggcgcctgtaatcccagctgcttgggaggctgaggcaggagaatcgcttgaacctgggaggcggaggttgcagtgagccgagatcgcaccattgcactccagcctgggggacaagagtgagaattattctcaaaaaaaaaaaaaagattaaaaataaaattttgacaggtttgtactcctcttcttcatactcacctccctgaaaggtgtgaccaccagcgcatctcctcctgtgtcatcatgtgggaccttcgcttctccatgttctcagcctgggtctgtgttcccatcttcatttgcagctgccgtggtgctttgtccctctcaggtccctgaggcgtcccacctgcctgcccccatcccaaggcctatttctatttcctttgatcagttacctatccctccttttcctgctgccttacctatcctataccgattgctcacctttgttactgttcaaggcagtcactactgtataaagacaacatcaagcctcgcttaggcctgagctgagggcctgggaaaaacgaggctgtcctccaccacagagaatctggtgtccttggagaaccatggacaccctaaaacctgcagatcacacagagcttactaaggagtcattaaactgtaagtatatgcacatcaaacaacaaggaatacccactgcagttaggatgccaacgccttatcttgcctccctaagaaataggacaaaaccagataatggagtagtgaagaaaatgtgtctgttttggtccaatctgatctttttcttttctttttttttttttattattatacttcaagttctagggtacatgtgcacaatgtgcaggttagttacatatgtatacatgtgccatgttggtgtgctgcacccattaactcgtcctttagcattaggcatatctcctaatgctatccctcccccctccccccaccccacaacaggccccggtgtgtgatgttccccttcctgtgtcccagtgttctcactgtagagaagtccttaaatgacctgatggagctgaaaaccatggcacgagaactacgtgatgaatgcacaagcttcagtagccgattcgatcaactggaagaaagggtatcagtgatggaagatcaaatgaatgaaatgaagcgagaagagaagtttagagaaaaaagaataaaaagaaacgaacaaagcctccaagaaatatgagactatgtgaaaagaccaaatctacctctgattggtgtacctgaaagtgacggggagaatggaaccaagatggaaa

SEQ ID NO: 586042 - DNA, 4001 bp, Homo sapiens
aaagaaaaataggagaaaaatcataaaagccttgtgtgcaaacgagtctgaatctcaaagctacaagaactctttacagtttgatccctgaattctccctttcccttcctgatgctggttcttctcccttattatggataaaagcatcctgtatttaagcacttcttagctttctctgttttctggctcacctcctccatttttttctcaagtgtttttccaatgacatgctttctagactcacaatatcctaactgccctcatctggaacgctaacgcctcacgaagggacacagaactggacaccaaaatgcacggatgtttcttctctagagtacaaggcattatgagaaaagttacggaaataccggatgaaaatgacttgcagatgaaaaagtttttatgttagttttgtaaatacatgagtatatttagtaaaatcaatatattctcaagaatataagaatgttaaataaacttattcttaagaataaataccagtctgttaaaccaacaactagtggaaaaggaaggaagcacaacagaattaatttgatttttttcaaagctgaatccgttattatgtacaaacggaatatacaaatgtttctttacaatttaaacatgctgattccttgcgaattcggttactaaatcaaagtctggggagggggcggggagaccgatggaagataaaggcagatcaaatctaagagtccacatcttgtaaaactatggattcacagacatcgtccttttgcaaacccggcaagcctgccttaccaatctgggggtgtgtgcccttttcacacccatcacagactccacctgtggaccaggcactgccccagcccagcccaagtctgcacccccttatccaggagaggcaggcggcttctttcgagggcagcacacccggctctccgaccatcagctgcatccaccgccgagataactacggaagcccaacggccaaggccgcactcaccttgccgcagcccggcggcccccacaggataagcgaggggatttcgttggtctccaggagcgagcgcagcagggtatcctggcccacggccttgctctgcccgaagtaatcctgcagcgtgtcaggacgcatcgtgtcggccagcggcttgccctgtagcatctgtcggatctcctcggcagccagcgcccgggggtgcgggcggcccccgccactggccccgaaggcggtggcggcttcggcagcgtccgcgtcccagtgccccgggtcgtcctcgccgtccgcgtccgcgtccccgtcgccatcgccgtcgcccacggcctcctcctcctcctgcgcctccgcctcgtcccagctgcgcggagacgcgctccccgccgcggcggcggccgccggcctcttccccgaccccttcctcccggggctgctggagcgggccaccgggaagtcggggataaggcgggcgccgctgggtgtgggcggcgcgtcgtagctctcgcggctctcggtctcgccgccgtcgtcgccctcctcaccctcgccctcgctgctctcggctgccgtcggggtggctggctgcttcagcgccgagctctccgacagccgccgcctcttggcgccgggcggcgagggccccttggcccgctccccggcgcggtgcgacccggccgcgggctccgcgtgccccgccgggtggagcagcagacagcggtccaggtgcgagttgatgtgcgcggcgggcatcatctgctggcacacggggcactgcacctggtgcagctgcgaaaggaaggggtcgtcttccggcccgctcacctccatggcggccgccgccctccccggcgcccggcgcggccgcagcaacccgtgcgcacgcggaggccttcgatgccctccgctaggccccgcgccgcgagaccctcgctcggggaaccagcaggacgctcgcgggccggaggagggcgccgctcatgcctcacgtccgcagctcccgcgtccgcccgccctcggccggccgctggcagcgcctcacgcggcgtgtcgggaagtgtagttcgtggccgtttgccccggcggcggaggcgcctcgcgcggcatgtaagtaagtgtagtccgtggccgtttgccccaatcaccgccgagaatacctcgcgcggcacttcgggaagtgtagtccgcggccattcgccccagctgccgtgcgtccatttccgactctgagaacagcctttgcgggggcgggggaggggcgggggggggggttgcgaggcgagcgtggtgcgcgtgcgcgaggttgcgcggtggcggacgcagccctccgcccaggcctgcgagtcgcgcgagggcagggaggagccacggactgcgcgaggttgttggagcggcgagcgccgctttcccggccttccgtgctgggctgttgaatgggcctgtggggacaagcaggaggcggccgcagcgggtcgtttgtaacgaaagggaaatgggggaaaaaacccaaaagcctccaatagaaaaccagtgttctattggacgtgaacagcagaaaaaatacaaacaagtacgcgagtgaaagaaatgctcacctcagtagtggtcagggaaatgaaaataaagcgtccctcgcccccttttagatgtgttggcgtttaagtcaagggcggttcacctacagcgcgcttcgagccaagagatgcttctcgcgggccgctgtgtaatagtggcaaatcggaaacaccagccttctgtctccttagcaaccaaatgatgggaggcgcccgtgtgcaattacgtcctagacggatagaaatggaaagaatatcagattaaaacaagtgtggtagtctgcatctttgaatgaattaccatgttattttttgcttttgtctaagtctcccgttttaaaacatgtatctcaaaacaggcatttttggtaactagaagaggtaaatgaattgagggagaatgaagacttttccgaaatttggccaaaacttgaatttttatttcatctgggcaagagcacattgagggtctcactcgttctgtcgcccaggctggagtgcagggccgcgaccagagctcacagccttgaactcctgggcgcccgggacccttccgccttagcctttggagtcgtcctggggttacaggctgagccaccacgcctggctggctggttaagagttgtttctaactaaaaaagttaggctcaaaaataagattaatagaaacgctagagaaacaagttaaactttaatcatcatgtaacgtgaaactaccaaaagaggatcgtgagctttcattatttttttgagacgcagtttcactcttgtccaggctggagtgcaatggcgcaatctcagctcacggcaacctccgcctcccgggttccagtgattctgctgtctcagcctctcgagtagctggaattacgggcgtccgccaccacacccaggtaatttttttggatttttagtacagacggggtttcttcctcgaactcccgacctcaggtgatccgcccacctcggtctcccaaagtgctgggattacaggcatgagccactgcgcccgaccgtgagcttttttttttcatttgtccctcagcagtgagaggtgacagcattctggcagccctctcagtcctcgctcgctctcagcgcctcctctgccttggcgtccactccggccgtggttgcgaaacccttcagcctgccgctgtactatgggagctctttcctgggcgggccaaggccggagctggctccctcagcttgtggggaagtatggtgggagaggcgcgggcgggaaccggggctgcgcgcggtgcttgcgggccagcgcgagttccgggtgggagtaggctcagataagcctcgcgctcggagcggcctgcaccaccggcccaggacggtgaggagcttagcacttgggacagcacttctcgccaggccgtagttgcctccacgcagcgcaaggctcaggcctgccatgcctgagcctcccccca

SEQ ID NO: 586043 - DNA, 4001 bp, Homo sapiens
aactacatcttcaaaggcagaaaatatttacagcaatatattttagtcagatggaacatcttgttatacacaatacacaatgaagtttactattgtggagatactgaaaagtttttctgtgttaagcttagtaactacaagaagcaaaatatttagaggcagaaaagttggagacaactaaaaaaattaaaaacaagaataaaaccaaaatactatcttcagtcttcttttgctgaaggacctactaactaacgtacaattttgaggagcaagaagcaaatacataatgatcaaaactgctaaacaatatattcaaggggattcaatactacatacaagaccataagagaccttgaacgctttaatgtactgtacaaattgtgacaatgctcatctccacatcacagggctttttacacattgtgtttcatctctaccagcttatttctgacaaacaatacacaaaaatattttcagcaaacatgactcaacgttgaattggaaaagctagacataaaagagccatgtaaaaataagcagtgcctgggacacactattattattacttttatcctttaggagttagcaattctggtagcttgtccaaattctgccaatgaaaaagtactaaaaatactgaacttttaaaccatgtgtctgcttaagataccttaacatataaaagcactgtaagaaacacacctacccaaacccttaaaatgtaacctcaaccttatcacaagccagctttgcggactgcaatctttccccgacttggctaatcagatgctacttgaatgaattaaaatgtatccatcttgaaaagatttttcgctcatagttttaaattacggttttaaatgtccacaacatgtttatctatcgtagaaaacttaatggtcaaaattttaaaatccaaaaaacgagaacttgcgatggatctatgacgtccacttatcttccgaagcaatggaattaactaaaactagataaaataggcacaaatacaacttccaattgtaacatactcatagaagtatttccctaccagactaaataatagtttttttgttttgttttgttttttttacataatcacagttatgctagtccttgataatgttaagctaatcctttgggatcaaacaaccaagtgactttcttatcaaaacaagaactcgggcttttccattacgtgtacacagacttatgaaaaacggtgaaaaaaaaatctagtaactgtctcacagggatccaaggtaagacttggatttcacaaaaatctgcaataattcagtttctttcctcagaatgcttatactcatttaaaaatggaagtctacaagagaacgtagtaacatcctactgcgtgacatgaaatgtagggaacgaatgtttctttttttccttgctgaactcgttagtgccgccaggtcctcaggagaggcccaagggaggtgaagggggcgaccccgaggcgaggaaaaaacgagcgccgccgctcagcccggggagggcatcctccggcctccgtgagtggccggtctctccggccgccagagcacccctctcaacccgggccttggggacggaggacagagataaaatggcctcgaagcggcggaagtgttccccgcaggcgggaaggtagagcggctcacgagagaccggtgccgcaccaggcccgtgtggcctttcgggccctgcccgccccttacccgccgggggcggctgcgcatcagccctcaggccccggaggtcccccgcgtccgctcccgccagccggcccgcgcctacctctccaggcagaagccgcgccggcgccaccggtcgcataggccgaggccgcgctgcttgccctgccgcccgggccccccgggccaccgcgcagccggacagctctgccgccggccccgccgcgctcctagtcccgccgcaacccctgcgctcccctttatttgtgggtctcgctgccacaaaatggcgctgagggaggaaaccaggccccgccgcccggccccgccccgccgcacggctccgctccgccctgccccgccccacagccggtccgaacgcgccgcaggccagcgccactgcctcccgcctcccgcctcccgcctcccgccagcctccccgctccgccatgttcgccttctggcccactcacaggagagtcgcctttcaggcgtggccgcagtcactcgcccgccgccgaaccccgccaggagaggaaaggtgaagggagggaggccgtcggcctagcccgatcggggcctcgaggcacaatggagcagctgctccccggtaacactccccgtcctttcccaggagcctggcgcgagctccgcgggccccggagctcagcaagctcagtaagggaagcggccgaggggaggggcgggccagcgaggtcggaggtcagccccagggcatcacgggaagggaaggtggaagtactcgccggggccacctgcggctgcggggctgcctcgtgcggagggatctgggcgaaggcggcgcgtgattggccgctctgtgttcgtgacgctcatccgtgatgcttccgcgtgtcggaggaccaggtgccacctcaagagagaggccgtgggcggcgagccgcgggcgtttactcttagcagaagctcacctgtaagttttgagaacttagaaaccgatgccttccctctcatcagtcgtgaggcgcagtctcctggccgctgggttcgttcctccttgacatctctggagacgcatcgaggagctattgttctctggcgtcggaggttgcgctgtgtccgcggcgttgagggccccttgctaactggaacacggggaaggcggccctgtgaggtttagtgaactcaatcaaagaggtcctgcaagtggagtagactccctgaagtaagactgccatctggaccgccgagtaatggcggtgttacctggagaacgtgaaacagtctctaaacacttactagaagagcacgtaattcttttgattggtctgtccttagccggctttatcaaacctgttcatccccaaaggagtgtcttgtagtaaggtgatttattaggataagattaaagtacattccagatggtcgtagtatatttccagtgaatcagatcggtctggagaaaatctttgcaactcgtatcacaagagctctcaaaaattgaaaacaaaaagtgcaaaagccaaaggagaaaatggggaaggacatgaacagatgattctcagaaaaaataccgtaatggtctttaaacatagaaagtcgctccacctcacttacaatggaaatacacgttgaaattacctttcctggtgggagtggaaaaatggttcaagttccacggagtacaaaattacttgtgtttattcttataccttgcagttatacttctaaccctaaccttattctgaaggtgcagctccacacatggaaacaataggtatacaaggttattgcagtgctatttgtcatagcaaaagttagggataacccaaatatccgttaatagggaactgattgggaatggtgcatccatacagtagaacacaatgcaaccattaaaaagattcaggaaataatcgtgtgttgctttggaatgagtctcaggttgtattaagtattcacttaaatatttaagtgtagtaagtattcactgtattcaaaagcaaaaataagcatatatgcttttatgtatttacttaaatacataaaaatatatatttatatttaatatgaatatttatgtgtatatgcttattttcggggaggaattggaaggatatcctggaaacttaacatttttagttgcctataaagagtggggggtggagacaagatttctctgtctttgaacttttagttttacatagccaaaaaagtaaataaaaaaggaaacaaagtaaatcctaaggttgaaagcaaattgaaacaaatgaacttaactgttaactaatataactaagatacacagaaaaaataattattctt

SEQ ID NO: 586044 - DNA, 4001 bp, Homo sapiens
aaaagctagacataaaagagccatgtaaaaataagcagtgcctgggacacactattattattacttttatcctttaggagttagcaattctggtagcttgtccaaattctgccaatgaaaaagtactaaaaatactgaacttttaaaccatgtgtctgcttaagataccttaacatataaaagcactgtaagaaacacacctacccaaacccttaaaatgtaacctcaaccttatcacaagccagctttgcggactgcaatctttccccgacttggctaatcagatgctacttgaatgaattaaaatgtatccatcttgaaaagatttttcgctcatagttttaaattacggttttaaatgtccacaacatgtttatctatcgtagaaaacttaatggtcaaaattttaaaatccaaaaaacgagaacttgcgatggatctatgacgtccacttatcttccgaagcaatggaattaactaaaactagataaaataggcacaaatacaacttccaattgtaacatactcatagaagtatttccctaccagactaaataatagtttttttgttttgttttgttttttttacataatcacagttatgctagtccttgataatgttaagctaatcctttgggatcaaacaaccaagtgactttcttatcaaaacaagaactcgggcttttccattacgtgtacacagacttatgaaaaacggtgaaaaaaaaatctagtaactgtctcacagggatccaaggtaagacttggatttcacaaaaatctgcaataattcagtttctttcctcagaatgcttatactcatttaaaaatggaagtctacaagagaacgtagtaacatcctactgcgtgacatgaaatgtagggaacgaatgtttctttttttccttgctgaactcgttagtgccgccaggtcctcaggagaggcccaagggaggtgaagggggcgaccccgaggcgaggaaaaaacgagcgccgccgctcagcccggggagggcatcctccggcctccgtgagtggccggtctctccggccgccagagcacccctctcaacccgggccttggggacggaggacagagataaaatggcctcgaagcggcggaagtgttccccgcaggcgggaaggtagagcggctcacgagagaccggtgccgcaccaggcccgtgtggcctttcgggccctgcccgccccttacccgccgggggcggctgcgcatcagccctcaggccccggaggtcccccgcgtccgctcccgccagccggcccgcgcctacctctccaggcagaagccgcgccggcgccaccggtcgcataggccgaggccgcgctgcttgccctgccgcccgggccccccgggccaccgcgcagccggacagctctgccgccggccccgccgcgctcctagtcccgccgcaacccctgcgctcccctttatttgtgggtctcgctgccacaaaatggcgctgagggaggaaaccaggccccgccgcccggccccgccccgccgcacggctccgctccgccctgccccgccccacagccggtccgaacgcgccgcaggccagcgccactgcctcccgcctcccgcctcccgcctcccgccagcctccccgctccgccatgttcgccttctggcccactcacaggagagtcgcctttcaggcgtggccgcagtcactcgcccgccgccgaaccccgccaggagaggaaaggtgaagggagggaggccgtcggcctagcccgatcggggcctcgaggcacaatggagcagctgctccccggtaacactccccgtcctttcccaggagcctggcgcgagctccgcgggccccggagctcagcaagctcagtaagggaagcggccgaggggaggggcgggccagcgaggtcggaggtcagccccagggcatcacgggaagggaaggtggaagtactcgccggggccacctgcggctgcggggctgcctcgtgcggagggatctgggcgaaggcggcgcgtgattggccgctctgtgttcgtgacgctcatccgtgatgcttccgcgtgtcggaggaccaggtgccacctcaagagagaggccgtgggcggcgagccgcgggcgtttactcttagcagaagctcacctgtaagttttgagaacttagaaaccgatgccttccctctcatcagtcgtgaggcgcagtctcctggccgctgggttcgttcctccttgacatctctggagacgcatcgaggagctattgttctctggcgtcggaggttgcgctgtgtccgcggcgttgagggccccttgctaactggaacacggggaaggcggccctgtgaggtttagtgaactcaatcaaagaggtcctgcaagtggagtagactccctgaagtaagactgccatctggaccgccgagtaatggcggtgttacctggagaacgtgaaacagtctctaaacacttactagaagagcacgtaattcttttgattggtctgtccttagccggctttatcaaacctgttcatccccaaaggagtgtcttgtagtaaggtgatttattaggataagattaaagtacattccagatggtcgtagtatatttccagtgaatcagatcggtctggagaaaatctttgcaactcgtatcacaagagctctcaaaaattgaaaacaaaaagtgcaaaagccaaaggagaaaatggggaaggacatgaacagatgattctcagaaaaaataccgtaatggtctttaaacatagaaagtcgctccacctcacttacaatggaaatacacgttgaaattacctttcctggtgggagtggaaaaatggttcaagttccacggagtacaaaattacttgtgtttattcttataccttgcagttatacttctaaccctaaccttattctgaaggtgcagctccacacatggaaacaataggtatacaaggttattgcagtgctatttgtcatagcaaaagttagggataacccaaatatccgttaatagggaactgattgggaatggtgcatccatacagtagaacacaatgcaaccattaaaaagattcaggaaataatcgtgtgttgctttggaatgagtctcaggttgtattaagtattcacttaaatatttaagtgtagtaagtattcactgtattcaaaagcaaaaataagcatatatgcttttatgtatttacttaaatacataaaaatatatatttatatttaatatgaatatttatgtgtatatgcttattttcggggaggaattggaaggatatcctggaaacttaacatttttagttgcctataaagagtggggggtggagacaagatttctctgtctttgaacttttagttttacatagccaaaaaagtaaataaaaaaggaaacaaagtaaatcctaaggttgaaagcaaattgaaacaaatgaacttaactgttaactaatataactaagatacacagaaaaaataattattctttgggtttttttttttttttttgagacagtctcactgtgttgcccaggctggagtgcagtggtgcaatctcagctcactgcaacctctgtctcctgggttcaagcgattctctcagctcagcctcctgaatagctgggattacaggcatgcgccaccatcccctgctgatttttgtatttttaatagagatgggatttcaccatgttggccaggctggtctggaactcctgacctcaggtgatccgcctgcaggttggcctcccaaagtgctgggattacaggaatgaaccaccaccactggcccctctgagcttttgaacacagtactctagtagtgtatctgtgttgtgatagtgtagtctttccttatatgcaggagattggatttaggaccttctgcgagcatatacagaaatctgcatactaaagtcccggagctgagcatagggaaagttggttctttgtgtaggtgtgttttgcatcccactgtacttctgttttg

SEQ ID NO: 586045 - DNA, 4001 bp, Homo sapiens
tgccttggcctcccaaagtgctgggattacaggcgtgagccactgtgcccggcccactaaaaatatttttttaaattagccgggcatggtggcaggtgcctgtaatcccagctactcaggaggctgaagtggtaggagaatcacttgagctcgagaaatcaaggctgaagtgagccgagatctcaccactgcacgccagcctggacaaccagagtgagaccctactcaaaaagaaactccaacctaagctatatgtttaaagttgcaaaacctagatcaatattatgtggatctccaagcacagttgctttaaaaatatatatttaatataaaaataaaaatataaaatatataaaagttacacatatataacatttcctccaagtggtgttcactctattttatgtgtatatattatatatatattatgaataaagaactgataaacattccttccagcgtgatggttccagattttttccatgctacggccaacagtagccctactagtgttggaaaaaaatggacacaaaggaataagaaattatttgttagagacatccccctgacgtacataggggtgaaataacaatttctagggtttcttttaaaaaccttcgaggcagggagagaggataggcggtggaaaaagtaaatgcggtaaaatctttgattgctgaatttaggtgacaggaacatgcagaatcactgtcgtattctctccacttttgtgtctattttaaatattaataataaaaaccaaactaatggaacccaattgtttctgattccaaaccctgtggcagacatctacatattgtaacatttcctccaagtggtggtcactctcttttttgaagttaacatcactttaaaaatgtacagcacaagtattttctcctaaatggccatttctcacagcccacacacgttgttttatgggcaagtaagcttgaattgtattaacacccccaaactgcaacataagtcagtcccaagagcagagcattcgggtctcacgcaaactactttcaggaaaccaaagtgcccttgttaaaatgcaaagtaagtggtagaagttatctttgcgcaaaatagcctaaaaatattacactcaaaaacatgggagaagtaggggtgcgagaatttccccggaaaatgtccaagacacaaacgaaagttagcgagatgttaaagcatataagcataagggtaccagaggggctggagctcggtcagggccaggggagtgggccagcaggaaaacgtttagtgcaggagagaccataaagaacgaagctggtgttgggggcgggatctacacgtgcgcctcgggaaggcgaggggatgtcgggcttggggaatgaaaatgggcgagggtcatgttgcggacaagagtgcacagaagcgaggaaagggggaggagagggctgtgggaagctgcggcgagatgagaagcagcatagggaccggagtgtcccaggcaaaggacaggagcggcgagtagagaaggcggcgatttgggagaggcgcggagggccgcgaggggaaggtcccggggagttgggaaaggaggtccaggggccgcgtgggcgggagactaccccagttacaggcggcgccggagctgctggggctgggagagggtgtcgggaccggcccaggacgccaggaccccagctaccttgagggcttccagccggtagcgctgggtggagttggggtccatcatgaccgtcaccgctttcaccagctgctcgcacagcgcgtttacttgatccatcgccatgcctagcgccacgcgccgagagcgcacaccactgcagtcccgggaccacgaggcacgacagctccctcggcgagaccacccgttggtaccgggccgcggcgggcggcgggggtgggaagctggaggaggagcgttagcagcaactcgcgctgggaagaagccggcgctgcgcacgcgcccggcccgccactgcgcacgcgcccgcggaagtggcggctcccgtgtgcaggttgagcctaggtgggcggggcgggaggcggaagggccgcggtgcgcagccgcgtcaacggcccttcgcagcgggcgcgctgtcagacctcagtctggcggctgcattgctgggcgcgccgctctcgtctgatccctgctggggacggttgcccgggcaggatcctttacgatcccttctcggtttctccgtcgtcacagggaataaatctcgctcgaaactcactggaccgctcctagaaaggcgaaaagatattcaggagcccttccattttccttccagtaggcaccgaacccagcattttcggcaaccgctgctggcagttttgccaggtgtttgttaccttggtaagaaaatttagaaccgttcgctgtcactgtgttcagactttctatgttgccttggctattggttttataatgtagcagtgactgggccaaggttgcgtgaaatataaatcatgctaacagggataaggccctggtactgtcttctaagatttttcttgtagaaaaaagtatgtttttccctgtagttgttaaacctctctcttggaattactttcctggatgtattattacctggtgggcactaaacttgttttgtgcggattggggtaactcgagatgtttaaagggaataattgcaatcagtgaaggtttgtgcagttttgataattggccaagtgctatgtataaggtttcaaagtagtgtaatccttatccaaaagcatggcttgggcagaaagtcttcttcattttccatctttataaagctcttggccgggcgcggtggctcacgcctgtaatcccagcactttgggaggcggaggcgggcggatcacctgaggtcaggagttcgagaccagcctcaccaacatggtgaaaccccgtttctactaaacatacaaaaattatgtttgcatttttagtatttttatacaggcgtggcggtgcgcgcctgtaatcccagctactcgggaggctgaggtgggagaatcgcttgaacccgggaggcggaggttcagtgagccgagatcgcgcctttgcactccagcctgggcgacagagcgaaactccgtctcaaaaataaataaataaagctcttgctttctccagtaaatacataaacggaaaacctcaacagctttattatctgttaaagtctgcatgtctgtttttgtgattgtgtgcttagtaaattgtgtgctgaacataaatcactgcttcctattcttgctccacttctggtatttggatctaatatggtgcttagcctgtgtttttttgtgttacaatactatttgttggctcagtctgttccagtactactgaaaagccacttcaaagtagagggacttctggcatgttatagttttaacttgtaaatgtttaaagtatcacattctgcctgttttaggcgtggtcgattggaatttataaggaattaatgctttgactgctctgattttaattatttttctttccactcaccttcctgctttgcagttgtaagacgttttttttttcaaggtgaatgttagtttttgaaaaactttttttagaatacagttgggtgctcactcaactgtataacctgtgtttctcgtatttaaatcatggattgctggtgtttcgattgtcttatttaggtcttggctcccaaactgctgcatattggaattacctggagagcttttaaaaatccccggcctggcgcggtggcacacgcctgtaatcccagcactttgggaggccgaggcgggcggatcacgaggtcaggagatcgagaccatcctggctaacacggtgaaaccccgtctctactaaaaatacaaaaaattagccgggcggggtggcacgcgcctgtagtcccagctaatggggatgaggcagaggaatcacttgaaaccgggagatggaggttgcagtgagctgagatctcaccactgcacttcagcctgggtgacagacggagactctg

SEQ ID NO: 586046 - DNA, 4001 bp, Homo sapiens
gttcttttttttttttttttgagatggagtctcactttgttgctcaggctgaagtgcagtggcacgatctcggctcactgcaagctccgcctccgcctcccaggttcatgccattctcctgcctcagcctcccgagtagctgggactacgggcacccgcctgtctaattttttttgcatttttagtagagacagggtttcaccgtgttagccaggatggtctcgatctcctgaccttgtgatccgcccgcctcggcctcccaaagtgctgggattccaggcgtgagccaccatgcccggctggcaagcacagagttctataggaacaccaggagagaacaaactggggatgggattgaggaatgtggaacagaggaagtgacatctgaggtaggttttgagggaagatgagtagtcagttagatggaaaagaagaggaagatggtgtgctattattacttgtttcagtgacaggtgcagtgatgagaggtgatggggtcatgaagacggggagcccatcagagcccagggcttgaaatctgactgtagtgtgcatgaaggtctaggtgttaggagggaagcttcttcaagagaaggctcctcacctgcttcgcacctgagcaggctccacatcaaagtagggtctgaggatgtcgatgttggcgtacaagctgaaggccctggaggcttgtcttttcccagcctgccacatctgaagtaaggaagatgggcataggtattgtggtactgttggttctagatcctgttgcctattttccgtttgatttctacatggttctaactggacaacctggggcgaacatcaccaacaccaattccagaacacgggacatacctaggtctacttttctacctgcagaggattcaatcttgcttacctgatctgccacctgccggctcagctgtcccttaaagcccttcatgcccaggaactctccatcctcctcttcagcagcagctgcatcagctgcatcagcgtctacttcttcctcgcgcaggcgctgatgcagctcacccatatcctcgaagctagagcctgaggtatcatccatgttctccatgtcaatcacagctgagcctccgccctgtgaagacaatggctcctagagtgcaggacttttctgttccatccattaagtcctctgctcatcccagggtttagggctttgttcttccactgctgaggatacggcttggaatcactacagatcatgccactccattccccctcatatgctctcagaacgcctggtttctagctttggctatcttttctagcctgggaaacctactagtcttccattcatgtctttctcctatgttacctatcaaagactaaaaggctgaaaaagtgcccatttccttctttcctaagccccaaacaaaactatacacatagtatgttttcagcgaatgccagtgaatcccacccaaccccactccatgccttaccccgaccaacctcctaacttgttccaagaataccttcttcctaatgcctcgggcgggccctgaaacccgagatcctcaggctggagtagtagtctggccctttcaggtcaatgttaatcccactgactttagtgtgcacgaagacccaaagaagagagttttgtaaatggagcggacttccaggcccagagggggaatccccaagacacttctggacatcgccggccctccggctgctggcagctggtgccttggggccattacctggatgttttcttcgaaccctccccattccgggccagctccatttcgggcgccgcccgccggcgccgctgtagttgccatgtcccttgagggctcccgtcgctgaaacccgcgctagccccgcgcgcggagtgggcaagatgtgggcctccggaaggtagacgtccagggtcgaggagaggtgggatcggccggaacacaaaaaggagaagcccggatgtttggacaaaagcaacttccggaagctggggacgtggacgggggcggggaaaaatctcgcgatatttaagattccaggaggcggtgcgttgccacggagacggagcagggctactaggacgcacgcgcgagatagaacctctagtctcgtggagagattgaagatggcggcttctcaggcggtggaggaaatgcggagccgcgtggttctgggggagtttggggttcgcaatgtaagccttgtggccttgagctcgggcgggaggaatgagagcggaacagggatgggtcttgggattggcgtggggatagctgtgggctcactgtcccttcgtggacaaattcgtccctttgctctaggtccatactactgactttcccggtaactattccggttatgatgatgcctgggaccaggaccgcttcgagaaggtaagtggggccggagttgtctggggagggttatgaaggccagaccttgtggtctgagcagcctgtgtctgtctcagaagctgctcttgggggtcgctccgtttgtaagtttgttgagcaatgtgctagacgctccgtttacaggccaaattagacacggtttctacccagttctgcaaagatgttcagtcttgttgaggaatggtgtgtataaacagtgaatctagtgtaatatggtgaaggtggttgatagcgatgaagacggcagggttggggtggggagcattacgctgagaccaggaagaggggcggagaggtacttaacatttcaagaggagggtacatctcaattgagccttgaatggtaagtaaaaaagaacaggagttaaattatgaagggtttgtttcaagtcagtgaagttcaggatatacaggttttgtgtgtatttagtcttttgtattgtttcacttagcttaaaataagggttaaaattgcatttaaatagattactgaatgttaccgtttaggcaactgacctttgcgtgcagcttataaacatgatctgtaaatcagtgcttgggaaaattttacttttttaacctgttgatacaaggaataaagtatgaacaatgaaaaaggttaatgcttgaaaaaaaattatggcttgtgtgaagtgtgctccgggcatgtccaagtagttctggcatgagtggtaggcaaggttgaagtgtgtcttgggcactgttgatgatagggagattgaatagttcttaagcagacatgatgagatttgcaaccttggtggctgggagggaatgagtttgaggaggatcatatggagcaggcagatctgttgtaagggaagctgaggttgaagacatgaactaagactgatggtagaaatagagcaaaggtagaatagaaggtaaatttatgattgctttggtaaaggctgtgggggtagcataaaatgactttttggcttgggaactgctttgatgcattgtggtatcatttactgagaggagaaatgggtctggggaacgggaatgatgatgcattgttttctgcatgtggagaaatctagcaggctagaagactgcatgcttgaaatgagatcagaagtgagataacattttgggagttgtcagaacagatagttgctaaaactgttagtacagttaaggtgacctgggagagagacaagaacctggcaaatttagagatgggtggaagtcgatcatcagagaaggaagaagagtggagctcagagctcagaaaccaggggaatagttcaaaaaaggaggagatttttttctttgcttttcatgaggcactcttatgtcccaggctggagtgcagtggcgcgatcttggctcactgcaacctccgcctcccgggttcaagcagttctgcctcagcctcccgagtagctgggactacagtcatgcgccactatgcccagctaattttttgtatttttggtagagacggggtttcaccatgctggccaggctggtctcaaactcctgaccttgtgatctgcccgtctcagcctcccagagtgctgggattacaggtgtgagtgactgtgccgggccaggagggggttt

SEQ ID NO: 586047 - DNA, 4001 bp, Homo sapiens
acacaaagatgggagggaacaatgtaaataagtgcttccaagacagccagaggaaggatgtgggggcaaatgggaattatgtacagtactgtatgtattcaggacttgctgtgctcagctacatcagatactctgaattcagctactcccacctggtggccccaaacatcaacttgctgggaaaactcatacatgagcttacacaatttcagcattatactgactcatttctggcatactgacctcattttaaaagattttgcattccagaaacatgcgtttttaacagatcagactgtatacataaagggttcacattctgaaagagttcagataaatgtatgaatagtatcactaaaaaatataagaatgtctggcaatatccacaatgttctaaaattactgtcaaagaaggcaaatatactcctttagaaacaactccactgtaatggcaaaaagcttttaaaattcttctaaaaataattttgagctcaaaacattttacataccaactctagatactgaaaagaaccaaggaaatcatgcaattagtattttcattgtacagatgaagacattaatgtcccagagaaggtgtaatatgcccaaggttacacagctaattagtaacagagcctagatagcttcaaaagacagtaattttttaaaaaaaatttactattgtatatttctttaatctcatagtcactacataaaatatattttctactggtaaaaaatagatcaagcttttccatttggttaaatcatttaattatttgtatcatacacaaaaactgttatctcatatgcacgcatctattcatctacaccagtgatcaaataagaaataatgccccaaaccagggtttccaaccaccagcgcgaaattactcccattactccattctggatccatgcacccaaattctccacagaagatggcacctccaatttctcacctgctgtctaggttcatcaagctccctctccaaatcttccagcaaagtcaccacctcttctccactctcaggattatgctcccgcacccaagactggagctcctcaggcaggatggtcaggaactgctccagcaccaacaattccaggatctgctccttggtatgtatctctgggttcagccactgacggcaaagttcccgcagttgactcagagcctccctgggcccaggtgtctcctgatagcagaactgcctgaagcgctgacgagagagttccctggtataagacaaattcctacgtagggctgattcctgatcccaagtgtggtcttcttctttaacctttactttgataatctccccttgttcttctggagcctggccagccaaggctgggaagaccctagagactgcttccatcccgagcttagacagctcaggcaaaggttctctccagttggggtctaggcaaatgggtgattttacttgagctccttttttgttcttggtcaggaaagtttttgatataagaaaacactcaacacaggacaactacagactcagtttaaaaggacttgtttacgtgacaacacagggcagttactcgggcaattccattgaaagtgaagccatcctctgaaaagaccagaaatagtgagcacagagcgactcactaaagcttcagggtcacaaattgagcggcaagatacttgcgagacagaaaaccgaggttatgacggatactttggccctaaataaagcctgggtgtatgagcctaggcaaggaaacgaagatcggagcagcctgggcgagggcggagagggagaggggctcacaagctgcctggggaagaggcccgattgtcgccgcgcacatgcacccttccctcggccgcagctcccacctctgaggagctcagaccctgtggaacccagactagtgggtcgagggaaacactctacagctcaggtggaggttccgcagacacacccgcagctgtgcccgtaggttccggccgggcccggtgagccacgctcacttccggtccgctctaggattccaggtggtgccgtcttctcactggttgtgcaaacacctacggtaccagtaattctggggaggcaagtactctggaaacgacggagaattaactccggaattacctagttatctggcatcacggtgaaaagagttccacagtgtgagtagtgctggagtagatgctgctggtctgtgttttcctgtcaccgtgataaaccatcgctggcactcagacccgtggtgctcaccgcagcgacctgaaacaaaatggagaggagcatccctaaggactaccacgtcagcgaatctgtaggatcgtcccccgcctttcctcgttaatttcgggccactttcacctttccctttcaccctaaatcagacttaaaaagaaatgtaagagttagtccattgtttccattttacggattagaaaaccaagaccaccgagaatgagcctcagttgtttagtcacggagcacagagccgtgactaaacaactgtgggaaactggtcccagaaatctaacaaaatctggacggctgatcagcgcctagcgaatcactggagtggagtaaccagaacattcttttcaagcagtcactgggttcctccatacctctggtagcgcagagatgcccaaggaatatttgttgaattgctgcctggttcccttctccattctctgtttccttctgctgtggtcctcatgttgatttctcacattttggcatttctgagtagagagtctttgaataatcagaacatctcttttagaaatctctaaataaaaaagaaatcttacgcttagagtccgtgaatggtcttgagtaaaattctgtataaaatttttgtctgtgtgcctgtgtcatccaaccctgaaaagatcattttcccagtcacttttaacgtgctgaacttatcttttgtttccccccctaactatcctttgcaatcagggattctactacctttttctcattctgcaaggcagtgatctctgccatgctgagcacagtaggcagttaacatggagtaagcatgacttctaagtcctttactgacgagccttactgttttgtttgttttgttttgtagatttgcatttgttaattactacaacagtgatagacacttataaaaaaagtcaaatatttaaaaagtcaacgtggcaagaagtgaagtttcttcatcctcagttccattcctcagaaaaattgatgccgagtttgttgtatgtacctccaacctatttttaaaatgtacatacaaaattgagtacaatattattatgtacaaatataactgagtcacaattataactcattataatttgcaaaacttaaatcatactagactacaattcaccaagttactgggcttttttggtttgttttaaacttaaatcctcccccagaaactgccaagccaacatgtgttacatgtctatcccattctttttagtggctgtagaagagactattttgatagatattgctaaaagatctgcaccccagagggatgtttatcgtgagtctcgctaaagtgtgttaagatcctttccttgcgctgtgctttccaaggccttgggaagaggttgctctgtatgaaacatattttgtaagatttgcaaaagtatgctagtatagtgaaaattagttaagacagcttcctctccctactccagcttatcctcagatacatcatacaggccttagagtacccataattttatgttgataacagctgttctttttcttaaagaggactttctaaattgttaagtttcagacctcacaaatctgccccggttgatttctggaagctaatttatgctcccaacaaaagcgcaggaaagagtgaagagatctccctgaattttattttgacagttactccttcttcagcagcaaagcgtcagctttcctgtcagcgtgagtctcactgaagcctgacctaactctttcggatcggaactagaaagtttattatcaaggagg

SEQ ID NO: 586048 - DNA, 4001 bp, Homo sapiens
tgttgctccttgaggtgccgcctaatggcaggcttgtgggcgaagcgcacgtcgcagtaggagcagcggtagggccgcgctcccgagtgcaggttgaggtggtcgtgaagggtggacttctgtgtgaagcacttgccgcagatgccgcacgagtgtgacttgacaccacgatgcacgttcatgtggcggttgaggttgctgctgtggttgaactgcttgccacagcgagggcacatgaagatgaagtgctgcgcccgcatgtggaagaccagcttctccacgccctggaacacttccgggcacttggtgcacttgatgttctttaaggggtttccacctgagaagcccccaggcaggggtccccggctgccccccgcccccaggctgccccccgccccccgggcagccatggccaccgctgctgcttccaccaggcccgaggtggcccccacgctggcccggcctccgggaatcaacagcaggccctccccttctgcatcttccgacaggctatagcaggccttcaccacaccctgcggtggggctacagtgctggggggaacgctgctctgggccagctccccaaggtggccacccacggagcctccaatgcccagaccccctcccaggcctccagggggtttgagccggtgtgccacctccagggccgactccaccttgacgatgcagatgtcagacacgtcctcatcctcatcctcatcctcttcctcggctttcagctccaagtcttcatccagtgggaactccagcttcactggccgcaggagtggagggggtagaggaggtgggggtgggggcttcggggctggctttggggtcctggctggagggaggagggacttggtggcgctgatgctgctcacaaggctagcctcactgaccccatcctctttgaggcctattttgggctcaatgaactggctgagggcattccggcatttctccaccacgtgctccatctgcaggtaggaggcggctgtaaggtagttgacgatgtccctaacagcgaattccaaggcgcccgtgtagcaggagaggagcaagtcggccacgatgcgtgcactgtgcatcagggagacctgcagctccgagctggggttcagcaggaactggtcccgcaggaagggtgagcaggcggccaagatgaccttgtggcctcgaaacttgaggctgtcggccacaatggtcacgtcgcagaaccgctcctctgcccggagctggttcatgttccgtagcgttgcggcctcgtggccgggcagctggaagcgcaggacttccaccccagaggccattgtggcgggggtgggcaaccctggttgggaaggaaaccggtcagagacaaaggtctctggctctccgaagccaaggctccaggaccctcgcccccattcttgcccagccccccggcatccgatctcccggtcttcagatttcttcctcagtttccccaaccctggggaggtgctgtccctctgagaggagggaggcgtggttctcgggggcggggcagcggcgtccacaccccccagcccagcagcccgctaggatggggcgagcccgcgcgcccacggtggaaggacggagaaaaaggggggccagaggcctggggctctggactccaaggtggccccggttgcaggctcttctcaccccgccccctttaccggctgcctcattcctccgccccccccttacacgtttgcacgcgcttttcacgtcctcccccccgccgccagcacgcaccgtgcacgccctgcccccacgctcagagctccgtggcacgcccccccagccccacgaccctgagtgcacgctcctctcacctggcccggttccgcgcgctgtttttttaatcccttattttccccacccccccccggggccggcagcgacccccacacacgggcagggcctgggcagcgcgcaggcgcggggatgcacgggacgcgcgcgcgcgcggggccggctccgcgtgggcgtaaggggggaggggcgggggcggctcgtgccgtgtgttccaggccccgcgcgcgcggcggcggcggcgtcggctaggactcggggaggaggaagaggggagggaattaaaggagcaggatccccccttcccgacccccctttcttcaccagcacccccacgcggttaaagggccggacggccttgcctcctctttggccgggattatttgtccgccagagcggaaatacgttccacacccccctctttctcgctccccctcctctgtacctccaagccccgcggccagtttgcgcgtgcgtgccaagtgccgcgcggaggcccgctcactcgggcccgccccccaatcccggctgcccatggcgctactcgctccgcgtccccgcgccccgcccgcgccgcatcccgcagcgcgcgcgcgcacccgttctctcggctgcgggcgctgccacctgctcccaggggtggtgcgtctccggtccagctgtgccgagcgctgccctgggtgcatccgtggcacctctcagggccccatccgccccgtggctaacagagctgttggtagctattacccacgcctgcctcctctgctgagtgtgctcacagttgctccagacacattcccaggcttttccaactcttgtaaagctagtaaccgcctcagcccttcaggcctgaaatatgatttcactttccacaaagccagacgatccagtgccctcaactttcctccactccatgtcagtcctttaaaatcacacccgccctcccctccattctcaggattgatcccaacttcttgccaaggcagtcgccctccgcttgtgctatcgatgaccttgcccatttcacctttagtatataattaaccctaggactaattttaatgatgtgatttattatgttagtatgattctactctaatcttccaccgctccgtcccccttattcctcacctctcctccagactgacaaggtccagctctaaacaaaacttcccttcaacactgcgcccgggccttctctttctcttgtctctctcagactaagttatagtctccacagcttcagcgacagcacttaggagcgtcttgaaggctggtgccttcccttccacttcctcgtacctacacccacttccccacctatccaagtccgcgtgaagatgccactgtttcctgccaattggatttcttttttacgtccttcaggagactagtgcgttttccatacatttcaattctgatgaagtttcttattatgtgttcaatatctggtttccccattagactataaacttcttggttgcaggaattatgttgtgggttttgttttgcaaataaaaatcatgcaatagggagggtgtggtggctcacgcctgtaatcccagcactgtgggaggccgaggcaggtggatcacctgaggtcaggagttcgagaccagcctggccaacatggtgaaaccctgactctactaaatatacaaaaattagctggacgtggtggcaggtgcctgtaatcccagctactggggaggctgaggcaggagaatcgcttgaacctgggaggtgaaggttgcagtgagcctagattgcgccattgcactccagcctgggcgacagagcaagactccttctcaaaacaaaacaccaaaaaaggtcatgcaacaaatgattgttgaagtaattcctctttggctcagccagcatccacccataaaaagtttgttcttgagctgaaactgaattcttgaactcaagggatgctgtttggcaggagggtggaggcagcgtagacagtgtttaggtggtaccttgactttttgcctttttcttttaaattctctgatttgtatgcccgcacccagttccctctgttgaatctaagagtctgttctaaactgctctctttgtatttaggccttgtagatttgaggaagaacacctgattttgtgtcagacgcacctaggcttaaagccacattcctaggagtttctgagcc

SEQ ID NO: 586049 - DNA, 4001 bp, Homo sapiens
cgcgtttaagcaaacccagagaccccctggagttctgataattctgaccttctttatgctttattttactaaaacaataccctgataaaatgaatagaatcaaggctcacaaactcagtggacccattgtatgatgaaagagctaatgaacaatgcagctgggggaggcggggagcgagagccgggttatatccccaaggcataattaggagttcacgtattcgggtggaagttcctgcagtaaaaggcgtagctgcagcttctcccggcccaggcactcgcctgctctgctaccctcgcttctttattgcctcttttactaccagctaaaagcggcaaaacccagcttcctttgcagcttctggctaaaaagttctctcttgcggctttgtttaaacaagaagggtttagaggtttcgctacaccgagaaaacgacgccggccccgggaagcagcctccccgccttggagtccggttggggcgtgagggccgcgcgggtcccacgccccaaggctaagcagccgaaagcacagcgcgctcggggccaaaccgggctgtatcgcaggcgcagatggcgcgtcgggcggaagctggaggccgccggctcaacacgctccgtacccgggactggggcccggcctgcagcctcagcgagcaggcgacaagggcggcgccacagaggccgacgcgtcccccgcccgcctgagcgcgccgcaacagccacctcgtcccacccgccccggggcggggccgggggcgcggcgccggggccctctggccccctccggtctcgccggccccgccccctccctgtccccgtccccgaggggctgagggggagggaggggcgacgcactccggccgcgttgcacgctcgccgcttccctcagtcccgcgtgcgcgcgcgcgctcgccccaagtcccgcggagtttaacacaatgccgacgcctacgccgtgcgcaacgccccggccggcgcaacagccccggcgccgggggcgggggtggcccagacagggagagagggagagggatgagcgcgcgcgagagccggagacagcgcgagacccgaggaggccggaagcgcgcgtgcgcgcccccgcccgcgagcgggaggcggagccgcagcagtagcggcagcagctgtaggagccgctgcagctgggagaagcgccagagaggccgggcctgctccggtcggaccggatccctcccctccccctccctcctccctcccctcccccaaacccacttccgcagctcgcggccttgccgccgaagcagcagcggcggcagcagcaggaggcggcggcgaggcgtcggaaggattacgcacctgacgggcccgcctctgagggctccagcgcgggacgctcaccggccgccgccgcccagggcgcacttcgcggtggcggcgggaagggagggaccggccacggggaaccgaacgcgaatcgcccccctccccttcctccctcccaccctccctccgatccgccgcccgccctctcggcttccgtcccctccccctcccacaaaaccccggatggaggcgccgccgactcgccgccgcctggctccgggggatggttttgtcaagcggccagagccccggcgccaggcgcagccgccgccgcccccgcgaggcgcccctgccctcgcttcccagaaccgggtccccgagtggcccgggccttccgcctgcctgcacccgtagccctggtacgagggtcattcgtcgtctttgttgccaccgcctctgccggaaccgtttgcgagctccggtggcccccgcccccccaccgccttcccggaccctgggctgggggtggcacgtgggcaccggccccgggaggcggaggcggtgcgcgcttacctgtcgccggtgctgctgcggcggggggtgtggaggaggcgcctctgggcagcctcggccgtgctgtcctccccgccgccgccgcctctgcctctcgctgctgctgctgctgctgccgccgcggtcggtgtctccggcgcggcggcggcggcggcggcggggcttttcctgtccggttacgttaaggtcacatgaccgagagagcggagagactagtgcaaagaggctgcgagcggctcccgccgggggggagaggcggcgagagagcagtggcggcaagagccccctccgccccccccccagccgctcccctccccccgcccgcctccgcctcctgctgctctgccgccgccgccgccgcctgcagcactccactgccgctcccacccaggctccgcgctctgctccagccaaacttctgcagaccatgtgcagccgaggcgaggaaacttctctccacctattggggctggaggcctgagtcacaagccccttgtttacataaagtgtttaggtagcacaagtccttgagatgctcggggtagagatggagagccactgctcgtatccttctgccggcttctgcttgagatctcttggcctttacccttgtcccttgacttttcgtgtttgttttaatctttaagacttgaaatggagtggcctttagaaccggggagatactgtaaaccagcagtatctttgtgtcaccaatggtaactgaaagtcatgctgaagtacagattcctgtagcgtgcacagaggcagaggtgcttcctttaccttgcagatgagttgagcggcgtaagatgtttctgttagggttgaatttcatggttatttcagcaacgattttcgtttttgaagttttggcccccccaaaaatgaaagtctgcaacgcatgtttgttaagagaacagtttattctcctgttaggttttggtctttgaggtatggattccagagttggctattctgttagatttagaggtgtggaaaatcttttaacggggagatcctgaaacacggaaacatggcagggaagttagaatttcctgatggtcatttttaacattttaaagtttactttttggttgttgccatttttctagaatccgtgtcttttttggggaaatacagtcctttgaggactagaatttaatgatttctttacacatctaggattttttgagatttagaaaggatatggctttattcctaaggaagtggaggcagcagtttctaggatactctggtttcaaggcatgctaacttggttgtgatgtctaacccattttggtttacacagtctgaccactagcacaatgcctggcacatagtttacaaatcatttaaggcaagcttaccatcttaagacaatttaatacatagaagtgtccctcctaaaaatctgagtttgatttagaaatccagttatacctgcaggtactgatgactaattccttctttgaagacaaaataagcagctgtgtagcttcagtggctctcaaatggataatagattcagtgtatactcgctttgaactttcctgttttttgatcagctagataaatgactttagtgggtaaatgtctgcctccaaaaccaaattctgaccctgatctaagtattctactgcaccgctgtcactggaatatcaaagttggccttcagactggtgcctggttccttggattggcttgagtattgaggtctgtctcatcttactagggaactaaaatgatgttgattgttttgtagagaattgtaattagagatctgtaggttcttaattcttttggaattccattctgaaaattttcaaccttatggtgttggtggagtgctcatgtgaagagtgaaactgacttaagaataaaagaaaaagtgggcaaaactaatgctaaacttgagaccattgggcagaaatttgcctgtgtgtgtagagtaattggtcttgagtcaaagtaactatgcttatttttaacatcactgaatattttctagcgttacactctatataggcttgtagaaataaacccaggggtaagcccagaaattgaatatcagtcctaaagaaagcctatcaagagcatcctattctctttaagagctgctattcg

SEQ ID NO: 586050 - DNA, 4001 bp, Homo sapiens
tcctcctcttcctcctccagatctgggtcttggggaaccaggggtgttggcgctgggcaattaccacctcgcttcacgtatacccagtgtttctgtggcatgatgctagggggtgtgtaggtgggtctccggagcccagccccaggaaccactgcccccctcccatccccaccatcatcgcacagctcatctgcctccagcagcagctttccagatgtggcccctccactgccaacgacaggggctgggaatacagggccacctcctcgacgctccccactgcccactgcagaagctgcaaatgcctcttgggaggaagatgagaaatcagtggactccctggggctgaagtagttgctgctgctgggagattgattctcactggcccggctggaggcatgggagcgcgcagagcccatggtagcaggggccacagtgcccccactcccggatggcaccccagcaccagggacagtgacagaggtggctgcagcagtagtgatggtggtggtagctgaggcccggccttctcggagtagttcagtgcacttgtccacaatgtgccacatttggagcacagaccccactgtaaggaagttgacaatgtcagcagcagccatgctgaggcggccagtgtaagcggaggctaggacagtctcaaaggcgcctgggtccatgacactgggcagcgagatggaggtcatgcctttgagtaggacctgatcatggaagtaaggggaggaggcagccaggacagcccgatgagcccggaactcccggccctgcactctgatagatacatcgcagagctggccctgcagacgctgctgattgagggactccaagagggcactggtcacctcagggaaggacacatgtaccactgcagctgctggcaggggtagtgggggcggagccagcgacagcggcaggggaagtgctgccccactgggagacagaggagatggctccatgttgtggagggaggggatacccccccagccacaggaacaaagaaaggaggagggcggccgggggggtctctgggaagaaaaagagaaaagaataatgataacatctcataacgacacagcccgttacaactcaaaaatatgttcacgctcattatctgtgtaactccccacaacagtgaggtaggtattcctctcaaccccatttgacagatgaggaaactaaagctcagaaagattaagagattatccaaggtcacacagcaagtggcagcgccagcaaacacaggtatctgacaaatcttgtgccctttccttggaggttagagaaataaggtgctcttaggggctggagtggcttccttcggaattataccctatttccgacttacctgagagcctgacattccaaaatctacctttttggtgttttgcacccactttttgggagggggcagggcagctctgctactgaaaaccaacgcttgctccatctcccctcaggctatgccccccaagctctctcgccgaccacgccccctttcgccccagcttctctagccccgcccctttccaggcccacccccccgtgccccgcccactatcgggcctttcgaccccgccccttgtctacctccgcccacaacggaccccgcccccccccgctccgccccaagcgctacctcggcctcttctcccacccggaaggcgccccccaacctcgcgcgtccccgcttaccgggccgcgcgcccccgggccccccccgcccctcactcggcggccagagcagcaacctgggcccctcccgccgccatcttgcgccgactccctccgccctccgcctccgctccgcctcccgcccctccgcctttaaaggcacagccgggcaccccgcccgtgccgctgggcaatactcggccgactcggccactttgcctttaaagaaacatcgccacattccaccttaaaagatcaggtcccctcctccgctgggagctcaggacttggttcggccgaagcatttattcccctttaaagctataagcctgccttttcccattggcgatgggtccaggtatcgttccccaggctccgcctctgagctgtgaccattagctggttggtgggatctaatcgccctcttcctagctccttacagtcccactgaagccccgccccctttctccgggcctggattggctaaataaccttgagtcggcccctcattggctttctcactcctactgcacgaagtgaaaaagtaaagtgcgttaaggcggctgaagcacttaaaaaaaaaaaaaagtactgcctgaacaacgtggcgaaaccccgtctctacaaaaaatacaaacaacaaaaacaaaaattagccaggcatggtggcacgcgcctgtagtcccggctactcgggaggctgaggcattatcgcttgagactgggaggtccaggctgcagtgagctgtgatctcaccactgcaccctggcctgggcgacacagcgagacaaaaaaaaaaaaaaaaaaaaaaaggccaggctagaaaggacagagcgggactaccccggggatactgggctaaccctgagcaaggggacagctaatgccaatctgtaacagtagaaggacaagaaaaagacagtgatacagtaagaaaagaactttattgtttattaatgtttctgtgtaaaacttaagcttttttttttttttaaagaaacaccaccaaaaggggattagcttagtccatcccttcctcagtcatctgcttcccaccttcctccaaatgttatcccagaacattctggaggcagggagaaggggaggcagctaatcagagtctgagagcacgatgatctcttctggatcgcattgtgtggccacacttgtctgcagggaagtgagagacaaagagtcaaagagatctggagtacaggagaaaagaaacaggaggatttagaggataaaatgggtgggaaaaaggaagagacaggatgtggcacgtggaatattcagacagagcagctgaaacagccaatgaaagagaacaaattgtcagaggaaacacgccctccccttcttaccttgcaagtaccaggccgaggaggctgtgaatggggggtttgggacagccgggctggagaagggatgcagagggagctggtcaccaggccatggctgggagagtccaccctcgtggaggaatcagcaactggggccaaggaagccaagggggaaggtgggctgggcagggtacatatctttttcccattcttctcatgcactgacctttgcctttccacatagctagaaacagaaacataaatatgtggaggggtacgggaagactgaggctggaggggggcagtccagtctctcccagcagactcagttccccagtattgctctccgaaagtcccctgcaatccctccttggcttccctcttcctcctcctcttgttattacctgtttcctaatggccctgatcctgtttgcttcttctccttccgagattttttgcaggggggaccagaatctccccagttgtgaggagagacgcctccattgaaggaagtagaagagaccatgcctgctccattctctaagacagtggtgaagggctcctctgattgcttcctggaagaggaaatgtccgtctccacagaggaaggggtatccaggggcaaagcttcaatctctagctcaaagagctgagacacagggctttcttcctccagggtcagctcctcaggctgttctccattgctttcagcatctatgctggagggggccaggggttcttctgacagtaacgatggtgacactatgcgtcctttgttttgctgctcccctgaagatctgctgatctgtttgccaggttccaggttcttttcattggagatctgtagtgaggacatggggctcttgtctccatctttacctggaaaagaagaaaaggggagagggtagcctgagaatgagggggaaaaaatactgctgagaggacactaggaggaggaagggaaaggt

SEQ ID NO: 586051 - DNA, 4001 bp, Homo sapiens
gccacaggacccccaccctcatatgggccaaagtcattggaggactcacagaagttgacctgctcctcccccttgtctgggggctcactcagggtacggacatcacttatgctgagggtagcctcaggccctccccccactggaaccctggagctaccccctagttcttcatcttcatcatcctcacaggtcaacaccagatcttcctcctcctcttcctcctccagatctgggtcttggggaaccaggggtgttggcgctgggcaattaccacctcgcttcacgtatacccagtgtttctgtggcatgatgctagggggtgtgtaggtgggtctccggagcccagccccaggaaccactgcccccctcccatccccaccatcatcgcacagctcatctgcctccagcagcagctttccagatgtggcccctccactgccaacgacaggggctgggaatacagggccacctcctcgacgctccccactgcccactgcagaagctgcaaatgcctcttgggaggaagatgagaaatcagtggactccctggggctgaagtagttgctgctgctgggagattgattctcactggcccggctggaggcatgggagcgcgcagagcccatggtagcaggggccacagtgcccccactcccggatggcaccccagcaccagggacagtgacagaggtggctgcagcagtagtgatggtggtggtagctgaggcccggccttctcggagtagttcagtgcacttgtccacaatgtgccacatttggagcacagaccccactgtaaggaagttgacaatgtcagcagcagccatgctgaggcggccagtgtaagcggaggctaggacagtctcaaaggcgcctgggtccatgacactgggcagcgagatggaggtcatgcctttgagtaggacctgatcatggaagtaaggggaggaggcagccaggacagcccgatgagcccggaactcccggccctgcactctgatagatacatcgcagagctggccctgcagacgctgctgattgagggactccaagagggcactggtcacctcagggaaggacacatgtaccactgcagctgctggcaggggtagtgggggcggagccagcgacagcggcaggggaagtgctgccccactgggagacagaggagatggctccatgttgtggagggaggggatacccccccagccacaggaacaaagaaaggaggagggcggccgggggggtctctgggaagaaaaagagaaaagaataatgataacatctcataacgacacagcccgttacaactcaaaaatatgttcacgctcattatctgtgtaactccccacaacagtgaggtaggtattcctctcaaccccatttgacagatgaggaaactaaagctcagaaagattaagagattatccaaggtcacacagcaagtggcagcgccagcaaacacaggtatctgacaaatcttgtgccctttccttggaggttagagaaataaggtgctcttaggggctggagtggcttccttcggaattataccctatttccgacttacctgagagcctgacattccaaaatctacctttttggtgttttgcacccactttttgggagggggcagggcagctctgctactgaaaaccaacgcttgctccatctcccctcaggctatgccccccaagctctctcgccgaccacgccccctttcgccccagcttctctagccccgcccctttccaggcccacccccccgtgccccgcccactatcgggcctttcgaccccgccccttgtctacctccgcccacaacggaccccgcccccccccgctccgccccaagcgctacctcggcctcttctcccacccggaaggcgccccccaacctcgcgcgtccccgcttaccgggccgcgcgcccccgggccccccccgcccctcactcggcggccagagcagcaacctgggcccctcccgccgccatcttgcgccgactccctccgccctccgcctccgctccgcctcccgcccctccgcctttaaaggcacagccgggcaccccgcccgtgccgctgggcaatactcggccgactcggccactttgcctttaaagaaacatcgccacattccaccttaaaagatcaggtcccctcctccgctgggagctcaggacttggttcggccgaagcatttattcccctttaaagctataagcctgccttttcccattggcgatgggtccaggtatcgttccccaggctccgcctctgagctgtgaccattagctggttggtgggatctaatcgccctcttcctagctccttacagtcccactgaagccccgccccctttctccgggcctggattggctaaataaccttgagtcggcccctcattggctttctcactcctactgcacgaagtgaaaaagtaaagtgcgttaaggcggctgaagcacttaaaaaaaaaaaaaagtactgcctgaacaacgtggcgaaaccccgtctctacaaaaaatacaaacaacaaaaacaaaaattagccaggcatggtggcacgcgcctgtagtcccggctactcgggaggctgaggcattatcgcttgagactgggaggtccaggctgcagtgagctgtgatctcaccactgcaccctggcctgggcgacacagcgagacaaaaaaaaaaaaaaaaaaaaaaaggccaggctagaaaggacagagcgggactaccccggggatactgggctaaccctgagcaaggggacagctaatgccaatctgtaacagtagaaggacaagaaaaagacagtgatacagtaagaaaagaactttattgtttattaatgtttctgtgtaaaacttaagcttttttttttttttaaagaaacaccaccaaaaggggattagcttagtccatcccttcctcagtcatctgcttcccaccttcctccaaatgttatcccagaacattctggaggcagggagaaggggaggcagctaatcagagtctgagagcacgatgatctcttctggatcgcattgtgtggccacacttgtctgcagggaagtgagagacaaagagtcaaagagatctggagtacaggagaaaagaaacaggaggatttagaggataaaatgggtgggaaaaaggaagagacaggatgtggcacgtggaatattcagacagagcagctgaaacagccaatgaaagagaacaaattgtcagaggaaacacgccctccccttcttaccttgcaagtaccaggccgaggaggctgtgaatggggggtttgggacagccgggctggagaagggatgcagagggagctggtcaccaggccatggctgggagagtccaccctcgtggaggaatcagcaactggggccaaggaagccaagggggaaggtgggctgggcagggtacatatctttttcccattcttctcatgcactgacctttgcctttccacatagctagaaacagaaacataaatatgtggaggggtacgggaagactgaggctggaggggggcagtccagtctctcccagcagactcagttccccagtattgctctccgaaagtcccctgcaatccctccttggcttccctcttcctcctcctcttgttattacctgtttcctaatggccctgatcctgtttgcttcttctccttccgagattttttgcaggggggaccagaatctccccagttgtgaggagagacgcctccattgaaggaagtagaagagaccatgcctgctccattctctaagacagtggtgaagggctcctctgattgcttcctggaagaggaaatgtccgtctccacagaggaaggggtatccaggggcaaagcttcaatctctagctcaaagagctgagacacagggctttcttcctccagggtcagctcctcaggctgttctccattgctttcagcatctatgctggagggggccaggggttcttctgacagtaacgatggtgac

SEQ ID NO: 586052 - DNA, 4001 bp, Homo sapiens
tttgacggatctccaaatcctccgcttgctgtatcgactctggcttgcctggccatcctcggtcttgggatcatagttctcatctttttcaactggcatttcctcctctctacttggctcacaagtaggctccgattcttccttttcttttgctgcaatttgctcattcagtacaccactgtctcctttaaccacaaagttttgtctattctgaactgaattgttcactcttaactgtatttcttcctctgcagccagttctgatttctcctcctgcaatgtattgactttttttggtcttccccgtttccgctttggaggatcgtttttcttattagagataacaaccactggggcaccagcagtgttcaaagttgttggctttggggagctatgattattttggaagtctgtgtaagcctttaccaggtcatagacttttaagaactgagcagtagccaggatttgttctgtacttttctcactggcatggagataacctgtgtagataaattccagcaggataccaaaggtgtctgcaaccatgccttccagcatataaatggattggccgatttccccctcttctgcaaacatcattgagaagtattcactactggcagcaagtaaggctttgtgggcccggaaatgtacattctccacgattaaagtaatgtcacagaggaagcctttcttcctctgatcctcaaaactggccagcacagtgtcactgtgagcgtctgagtgtacaacaagctgcccagaaggctctggcgatgtttctgccattttcttcagaagccactaagggttaaatctgaaataagaaaacaaggtttaaaaaggagaaagcactgtctaaaaggttaatgccagcccacatgaacttcctattcacttcacatcattaactgaattttaccattaccatttttgtctgtctacaaacttagctctgggcccgggcgcagtggcctcacgcctgtaatcccagcactttgggaggccgaggccgacggatcacttgagaccagcctgggcaacatggagagaattcatctatacaaaaaatacaaaaattagcctggcgtggtggcgcccgcctgtggtcccagctactcaggaggctgcggcaggagcatcacctgagcctgggagttcgaggttgccgtgagccgtgatcgtgccactgcactccagcctgggcgacagaacgagaccaccacctcaaaaaacaaaaacaaaacaacttagctcgcggttttttttttttgagacggagtctcgctctatcgcccaggctggagtgcagtggcgcaatctcggctcactgcaacctccgcctcccaggttcaagcaattctctccctcagcctcctgccgcacattaactagctgagtgactctccagtattcatggaacggttcagggtctaccttctataaaatgaaggaatgggattaaccatctccaaaatcctccgcaagcacgaactttctatggttgcacaactatttcagggagaacgaagctgcctccatctcccagattattagccatttcgtatgtgggaaccaatgtgaagagtgaagaaatgtgcacgtgcaaagtgaatgtgaggtagctgcaataaaatactaataacttaagctgcgtggggccgccagacacactaggggcggcgcggagccccccgcagccccgggtggtcccagcagggagaggtggcgcggaaagacccccacctccccgcccaggccccgcgggcccgactggggagcacacggcgggggaggggtcggcgcggcagacctaccgctcaggggcgcccggtggggtccgggtcgctgccaactcacccggcggcctggcgggagacccacgccggggcccgctggccctccgctccgccccgcccgcctctggggcttctgcgccgcaccggtttctgctcctgcgccgccgccgcagccacagccacagccaacccggaagcgcggcgccaagagccgcttgcgcgcggacgccgaaccacgtggcccgcagaggcgcccctggaggtgggggccacgagagcggcggggaggggaagggaggtgaggggcggggcggggcgagatggcggggcggggcggggcggggcaaggcggggcaaggcagggcaaggcggggcgcgaaggcagttcaagggttggggcgtggcaggggaggggaggggcaaggcggggcgagaatgcaggcctggggtcgggggagccgcggcggggcggggcagggcggggcgagatggcaggcccggggctttggggccggggccggggccggggccggggcagggcggggaggggcgcggcttcggaggagggacagtggccggggcggggcgcggccaggggcggggcggtgtcggcgcccgaggtcctgcgtgtggcactgccggggagcccaggcaggagcgacttttgcggtgaattgggggcaatggacaggagaggcgttgtgacccctccctttgggaagttttatatcgtattaaactgttagctcaacgccaataccttaattttatctcttctccgacaccgaatctggtgttgttcttgaatgtataaaggcatgaaatcccccttaccgtcatcatcattgtcatcatcatcaccatcgtcattatctagtgctaatataataactattacttacctcctaaatgtttttcacatctgcctccttttcctccccactcctgatgccttagtctaagggaatgaagagagcactgcagtcagagaaacctgggttctgagagatcttgggcaaattacttaccctcacaacttctttaccttacctgtaaaatggagatgttaacactagtgccactttggtagggttgctattgcataaacaaaattaagtatgtaatgggcttaggaaatgcctggtttaattcgtctgctgtgattaaaatgatcattattattcaaactttcatcatctttgttcaatagactgtttctaactggtctcagctgcagcgttgttctctttaattcgcagaagtacagaggatttctccaagtacatatgagatccagagactagagtcactccttggcttagaatccatgtggctcccacatgccctctggataaagtccaggcttcttaatgtggtctacaagccccatccagatctactccccacctgcttccatccatttatttcagcattttctctctcttagccaatacctaattacttatttttctgcccatttccagattcccaacatgccatctatagcctccctgatcttgaaccggaggtgtaattagcaacctggctcttacatttttactagattttattaaaactagctcaagccacacatgctccttctctgaggtttccctttcatattgaattgtctctaagtcctctggatttgtgggggtacaagtgggatggggagcgctccctgacttctgcataccagcaggaagttagctacctcattgtttcttgctgctacgagggttgcagtcaaatcactgtccctccagaggtcctcaacggcataagaagactcagtgccaaggtaagccaggtacttccatttcctcattcaatcattgctcactggagcataatcctgcgaggaaagactgagtctggaggatcttccagcatcagccacccacaacacagactagccctttcttcaaggcaattttgttttggatccatactgactttttcaaaacttttgttcttgttaaggccagccggtctacccctaacaggtcttcttaaatttaaatcttgcagaacaggatttggggtgtcatacattcatctaacagatatttatcgagtgtctactaagagccagacattggcgtcaggtgttggggatacagcaactaacaaggcctttgctctcatgaagcttacattctactaaggggagacaggacaaatatacaagtaaactaatga

SEQ ID NO: 586053 - DNA, 4001 bp, Homo sapiens
gtatccatcagcagcagtggttatcttgttctagaagctagtgtatagcctcagcagtcacttgtaagtccagtgggcagtggcccagccctggcccttgcataggtcccggtggcggagaaaacaggcatggactcggaaccgacggccacagtggggacaggcatgcagggctccagcatgggtcttcatgtgctctgtcagatggtgcttcagcttgaagcgcttgttgcagatgccacagccaaaaggccgaaggctgaaggtcagcatgatgtgccggtcacgctttggcttcactgcaaaccgcttcccacacaggcaaccaaagcgttttccatctgcagggggtgtcccccctagcttcacaggcccatgcacggcctggcctgctcccccaggtcctccaccccctgacaggatttcattcccatgaagatccactggtttccaggatggaccccctcccccagatgttggccctggccctgaaggcaacaagaaccctagctccccattcccttcagtgtcccctccagaaaacactttggtttcctcctttgctcctccaggctgagttccgcttcctgatatctcctccttaggctcgaagggttcctgcttaatgtagaagattttggggggcagtgcaggaggggcaggaagctcaagtggtgcactctcaccctctggaagctttcggggagtagcagtcatgggcagtgggtggggtccatgaggacggggaaaaacccctgatactctctggggctgaggagtctgagagagtgtggctgacccctggtcctcatcatcatcatcttcctcctcctcctcttcttcttccacctgaatttgcagcacttctcccagttcacttccctcccctcccacagggctctcagtggaagcagggctttcagtagaagcagaggactgtactggggtctggaaaggcgaagagcgaatgcaccagcctcctgtagaggatgtagtggaaagaagggcatggtaggagtttcctccacgggctgaaattccaccacctgaagtttctaattctctaagaatttctgagcactgatctactacctgccacatttgaaggccactggccacaaggagatgagcaggaagagcatccagtggcaggcggagacgccctgaataaatgagctggagcagcccctcgaaggcatcggcttcaatgacactcggtagagtgagacgaggcgcatcccccagaagcagcttgtcatggaagtaaggagaggcagcagctaacactgctttatgagccctaagttcccggccctgcaccaggagggacacatcacagaactttccctctagcctgtggcggttcagagattccagcagagacgagctatgctgtgggaactcgatctggattgtccgtggggctgggttgcaggtcggggaggcgggtacaggcggcaaaggtgttggggtttccatggcctcctcgaaggtgacaagaattgggaagaggagaagggcttgggggtagactccacgcgggatgaaggctgcagaggaaaaagatggaggtcacagaagccctggataaagggagccacatcttctcaaacaaccccctccccacgagcaataactggaaacttttaagtcagtggcggtttctgcaaatcagtcccgcacaccaagaaagcaaaaacaaacaacaacaacaaccaccaccactaaacaccaacaggggttttaacttccagcccctgtggaagataagaaggaggtccttcagccaccagcctgccttcacctgcccagaacagctcctgccccgccgctccgttccgcctcacagtgcccacagaggtctgctcccgggaagccgcggtcacccggacaccgcgagtcccggcccgattgtccttcccgccgacacgcccccgccgttacacacgcggcgctgccctcgcagttacagtgccgctacagctccgtcccagaccggaagccgccgcctccccgccggacaccgtcgccaagtgcggcgggcggagctagagccgtagccaatcgaggaacggcagcctacaagcctcgtgttgattggctactgcagacgaggagggcggtgctagtaggagggcacaggcccagggtgtcctcgcaacgggcgtcccggggagctgctgaagtcctccccgctgcagaggaccgagaggcagggcccgggagagaacagcccggtcggagggggtgggccgtcagccgccccggaaagctgcgtttcccggtgattaagtgtagcacccgcccccggtaggtcctgagaggggcgagattagttgggtacttaccatgtgggcctggcacttgcccacatcactttgtgtcttcccaccggccctgcgagggtgggggttgccgtcctcagtttccaggcgggggaaacgggctggaagcgtcactcagctaatagtagtggacctgggactggaactcagatttgctaaggaaccaggcaggttctttcctgttttctgcacgggagcattttaaccagcaattaaagaaaccttatttctaggtaatttttaaaagagataaatgtggatatatacatgaactcttttatcagataacgccgctgttcctggcctcggactaagtgacacagtggtgaggggagagttagattggagaagtttggccggtgcaaaactcctgctctaaaatataaaaaatctcattgggaggggagagtgacattctatgaggagagtgtggcatcaggtggggatatacggttttcctctcaggctgtcagcttcctttcagaaagcagatcttaccaccgtacaggtctggagagccctgcctaagaaagtcggcacagcgataaaagaacaatctccgtttattaaacatgtttttttctgtttcaccacacactccagaaaaaaaggaaatggggctgggagtggagaaaaggggacagtgaggggggatagataaggctgggagtggggtggggagggagaacgagaaaacaaaataaaacaggtaggaagagcaactccctacccttgaggtggtgggtggggagggaagcagaggggcggggggggagggggccaggaagctctgtacagaagggttgcccccagcccacacacacacaccccggatatgtacagtacaaaccccagataattacaacagccaaagaagagagaaggaaggttggggagggtccaggggtagggcctgaggtggggaaagggcacagggataaaatttcacatatttacaacttttatataagtataaatttggccccggctgggtgtatgtgtagggggatgggactgaaggggaactgtccatacaaaagaaagaggagtagagtctaggagagtctcaataccaaacgcaaaaggatgaagggggcaaggctgggtaggggacagcagtcagggaagagggggtgccaaggaggggcttctcccctcccatggcctacccaccccaaaccccatccatcctacctcccctatcccgccagaaaactatgtacagagaaacaccgaaaaatcgtggagctggcgggagggagggaggtggaaggagattgggagggggaggatgagagggaagcccagccctgtcctacctcccccaggggacagagtcatggaagggggccccccaacacccctcctccaacacaggtccccccaccctgggggagagagacatggcttttcctagagtaagttcccccctccccctgggagtagagaccaagaagagagaaggaaggggcagaggggactgtgtgtcagagtaggacagatcaactagcctgtcctcccaacatacacaccctcctaaaccctgacccctcaccctaacctcaattccaccccacccaacacactgggggaggggggggcataagccccctcaccccgctctgggaccagccgagagcagatcaggtgtgggga

SEQ ID NO: 586054 - DNA, 4001 bp, Homo sapiens
gcagcagtggtgagccactgctcccagtcagccatgtgatcacgagggcaaattgataactctacagcgtgctgtattgccagatggttttgcacaactgtgggctaatggaaagtattctgagcaagtttaaggtaggctaggctgagctatgatgttcagtaggttaggtgtagtaaatgcatttttggcttaccatgttttcagcttatggtgggcttatcagggcataatcccaccacgagtcaaggagcatctgtggtactatgatatccaagtggttttacaccattcacgggcagtgcttaaacaaaataggtgggccgggtgttggcggctcatgcctgtaatcccagcactttgggaggccgaggcgggcggatcataaggtcaagagttttgagaccagcctggccaacatggcgaaaccctgtctctactaagaatacaaaaattagctgggcatggtggtgcacacctgtaatcccagctactcgggaggctgaggcaggggaatcgcctgaacccgggagttggaggttgcagtgagatgagatcgcactactgcgctccagctcgggcgccagagcaagacctgtcttggcaaaaaaaaaaagtttaagatacaaattcttcaagattttgccccctgcctggatctcttaggcctttctctcctccctaaccccagtgattctaggccctgctatggttctatgtttaattcttttctgaaatctttcccatctatccattcattcatacactactttgtgactgtatactgaatgccaggcacccttccagacctaaggataaagcaataaataaaacactgtgccttcagggtttgtcctgcgagaggagactgaaaaacagtcctctgcgtcaacagatgttgtggagaacataaaccagggaaggagggtcaaggatgcaggggagggatgcgtgcaggatttttaaatacaagctcagggaatagcctatagtgaaggttacagctgagcaccaaccatgaggaaggtctgtctgcagtgaaagcacttctgggggaacagcaagtaccaagattctaattacaagtggtacttaccacgatagtattgccagttacatttcgctgcacctatcctgcctcctcagaccatgtggctcctgaaggcaaaaaccctctgatctcttgggctcccaacatttagcatggagcttttatgttcagttcccaatcatcatttatagatttttagagaaccaagatatcagaaaattcatttaaagtatcatgaatttgttcttcagaataaaattaaaatatttaagtttggagtataacctgcctaaatcacaatatgcttcatcaagactcatggcctagtctttttctcttaattgcaaaatatataatatatggatttaaacacagtgaagttagcacctcataacacagaatttgagtaacatgacaaagaaacatccaatgcctattaagactcttgctgtttttgagaatcttcagttgagacagctatcaaaataaatggccaatccttttagtacttacattctcaatattgacataaaccatcatctgaccctttacttcacaggttggcatttaaatacattctctccagtatcctacttctgcaatgacaagctcttcagtcaagatttttttctagccaatgttggtagaatacctaatgccatcagttttgacaactctttaaaaatcctacaatacttagatttaaacggatcacacatggtagaacaagctaatacctaccagctttggaaaagccataaatgaatgattacagatgaaggcattttctaataatttagatatcaagtgcagctcacctgccaaaaatggttctgccccagccattctgttcctaactcagagcaacagtgttcacagatttttacagcccagtccagataacatcatactagtcaagaacataaaccaggaccactaatctgttgcaagaagtcatagtttaccaaataatcaacaattgtgatgatgtcattgcctaaaccttgaaaaagtttaaatcagttaaaacaaaaatcaactcatcaaaaacagggaaagttttcaacgatgtattttaatcaagtatgaatggttccaagcattaactgatgttgaaaagacaaactccccagtttaaactgaaataaatatttctgattttgaactagggactcactgaagccaaataagttttcttatttccttgactattctgtttcctgccttcactgttcctaaatcccaaaagcaagtcatccagtaatataacaggaaatatgaatcttaagaaccttaatattcagttttgccacacttttgaaacagtcctttgtatacagcaagggaaaacttagcttcctaacagtggaaccttctcagaaaaactcatcttacactaaacagaataaagtcagcatttcaaaattgagtttaaccaggccacttttctatttacagcaaattaaaccatgtaattcctgaaaaggcgtggagaggattcaaagaaatatttgaaaacatctgcaaaaaacaactatgacaaccatacaaataaatgaatacaccaattccattcacgttatgaagatattttcctttaatttatcaaacatttcacattcatgaagtcatttacttcagagcaaatgtaagcttataatattaaaaattaaagtattacaatatttacaagatggttggcaggggacacttactagtataaaaataatacaaatattgtattttcctcttatctgccagtaaaaatggcaaacagttttgtctttctgaagtttctagtcaataaccaaagatgaggagcccctaataaagtgccttgccctgtatgctccactgtctatagctttagaccctcaacattcttcttcaagttcagcagctctttttcttgccttcttttctccagtttaaatgctaatttgttagctttcttctccactcttcgttcctgttataagtacaagaatatacttgtattattcacatctttaaactgatacagactgcttttacaaaattcccctaatttcccctccaccagctctttgtaaatctcacatttgaaaaatatattttaccttgcgctcttcttttatagcttgctttcttgctcttttatcttctttgctttcatttttagaacgtggctgagttgatactttaggaagatcactgccattaatcatctgtattctttcagtttgctttgctgtgagtcctttctttggtaagacattgagaggtattcctgttttagaagatattcgaatttgtttgggctgaaatacagataaaatggtactagagttacttctcattcctattaaaaaatagctcattaatgacatactgttgatgctttttctaatatcactctagccataaagataaaaagttattgtgcgaaaatgtgcactctattttttatgcactgcatccttcaaatagctcagcacactaggacttacctttggttgatacttgataagctgtggatggttatataaatttgagtatgtacctaaacaaacaaataaaagtcatgtatcagtaagcatgttttcagttccacaaagcattactgaattcctactatatttctgaccttgtgttttcatagtgcaaaataacactggagtctctgatcaatgttttataaattgcttacaactcagtattggaatattactctttccaaataatttttcacaaatttcctaaaagcctaactcttattaaaatatatgtattttttcaaagttgatatatgtttttttttagacagagttttgctcttgttgcccaggttggagtgcaatggcatgatctcggctcattgcaacctctgcctcccaggttcaagctattctcctgcctcagcctctcgagcagctgggattacagttgcctgccaccatacctggctaat

SEQ ID NO: 586055 - DNA, 4001 bp, Homo sapiens
cacctcgcccctgccccccaagtctgttcccgggtcacctctgccagctccacagaaatccacgaaattacagcctccagaactcagccaccatggtgaggagaaagttgtcttgtcctgagcttttccacagaggccaaacagaaagtttctggttcagctcagagctagaggccctcagtggagctgtcagttagattttgaggaagtcacagagaggcaaagacggtagttcatgggacaagtatttctcgcctggcctttatttttttttaagggaatttgtaaatttttttaattttctttaaattgtggtaaattatatgtaacataaaatgtaccactgtaactatcttaagggtacaggtcagtagcatggagcacattcagactgctgtgcaaccatcaccaccatccagctccagatctcttttcagcctgcaaaactgaaactctcagctcattaaacataacttcccatttccccagtccctggcacccaccattgtacgttctgtctcaataaatatgatgattctaggcagctcttaggagtggaactgtacagtatttgtccttttgtcaccggcttattttgctcagcattatatcttcaatacaaactcccgggctcaagcaatcctcctacctcagcctcctgagcagctggaactacaggcacacactcccatggctggcagggttttttttattttttgtagagatgggggtctcactaagttgcccaggctggtctcaaactcctggcctcaagggatcctccctccctggccccacaaagtgctgggattacaggtgtgagccaccactcccagccaatttctctcgtttttaaggcgaaataacattcctctgtatgtatacaccacatcacgtttatctattcacccttcagtggacacttgggttgcctctgcctctgggcctctgtgaacgatgttgctgtgaacataagtgtgccggcctggccttttcctttctcaaacttgtcccctgctcttctgcattgtgatggtttctctaaggcggacacacaagcatttaagccccgatccacatcccggagcaactctactgtagtccacaccccagcctgttcacgagtcagggatgggcaccccacgattggcattgcctggccttagagaaaagctcataatcttgggggccatagctgaggtttcttatggctgcagggaatttgtcttcactgcagtcagattaacatttagttcagtttcctcattagcctttgggaagcccacagaggcatcctctataagagatgctaccaaaagttcctgactgcattcagcctggaaactaggcttcccatagatgataactagtctagaagatgctctcatgagcatggtgacagggctcaaatgtgcctgggagttctactctttctgatttcctaatacgtaaatatcttcaaaggccacagcaggaggttttactgaaactgaagagctccctctggttaatctttcccccaaaaatgtcatctggaaattaagcacaattttgctaaaatgagcaaggatttcacctaaatgaaattaaagagggttatcttattttttttatttagcacttaaaataatttagagtgtgagaaatcagattgttcagggtcacacgcccccaaggactgctctctaacagccctcctcctgcctctgccccggggttccagtctctctcctccacccctggactcaagtctgcgtggtgttggccacactgactgacagccaggggacatgcactcaccagcagggtgtgtccctccggtcttcacaatgaatgctggcccagtcgccagcagccttcacgccaatgttctcccgtcagtgaggccaggcccccaggtgccactggagtcagaggagggcagctggcgtgcgccaagcagccactaggagccacttcatgccaatgctccacttcctgcacgccacagtcacgttcagctgcaaaagtagttatgctttgggtttttttggtttttttttttttaagaaaaaaaaaaaggaaaggaagaaagcaattaaaggggcgggggggacttaaagtttgcacctcagcatgagtcaccgaatcaaagttcagcaaccacatgcaaaacaaaccctccgtgagggcagcaagtctccgtgaggacggctgggattggctgcacagcaaagccaggagaggctccatgaggagaacagcattcagagtccaagggggagaacccctgttccaagtgggaacttggaacagaagttctcctgcctccagctgagaagatgatcagattctagctgctcctggggaaagtcggtactcacagctggacacaaacatagcttgcaggaggaagagtgtcagagcaagagacagagcagagatggctacggagatatgggtgcatatggggacatggcacagggaggactctgtccctgccttcacgaaggggaattccaaacgagtcacgaagtccttctgactagggaccaaggcactagcctgtgtcagagataacatggccctgtggctccctactgccgccctgcgtggcgtgggtggtggcttctctcccactgtggcaggggaagtctgaacccacctgaccacagcattctgcagactgcctggtctccagcctcaccaggtacaggcaacagacccagaactctgaaattatttcctaaatttggtgatgcccatcaggggtcagaagaagaggaaagaacacaatcaacccacacagtagcccacctcccaacaaacctccctgtctcaggcagcaacttgctccaggacacacagtcaaccagttggccaaggtgggtttagaacccaggtgttggtgctagggaggtaagaatggcacatggtaactggaatgtgtagctctttttatttattcaccaccggtctcccaaagaaaatgtgaagcagtgtagatgattaaaacacagagaatggaataattaaaataaaaaattaggccaggtgcagtgtctcacgcctgtaatcccagcactctgggaggccaaggcgagaggattgcttgagcccaggagttcaagactagcctgggcaacatggccaaatcccagctctacaaaaaatataaaaattagccaggcatagtggcacatacctgtggtcccagccactctggaggctgaggtggattgcttgagcctgggaggttgaggctgcagtgagctatgattgcaccactgcactctagcctgggtgacagagtgagatcctgtctcaaaaacaaataaataaatttttttgaaagttcaatcagaaatccttacaagaaaaaaagaacatcataccagaaagctagattagagtagtcactgcattagaacactaattctagctttgaaattttctggtacaatggattttcaagtaacagctcccatttttttcttttgctgttgttgtttgtttgagatggagtctcgctctgtcgcccaggctggagtgcagtggtgtgatctcagctcactgcaacctccgcctcctgggttcaagcgattctcttgtctcagattacaggtgcgcaccaccacacacggctaatttttgtatttttagtagagatgggttttgaacatgttggccaggctggtctcgaactcctgacctcgtgatctgcccacctcggcttcccaaagtgctgggattacaggcgtgagccaccgcacccggccgacaactcctatttgtttagcaccaatgatatatatagtagtttacatcaaagtgccctaatccccacaaaagctcgatggcattggaataattattcccatttccagatgaggttattggggttgagaaagggcagccaacctgcccacgttcactcattaagtggctgagtgaagatggaagcccagggccatcaggctcaaaaacgtgccttacacaaacacacattgcctccaagctcc

SEQ ID NO: 586056 - DNA, 4001 bp, Homo sapiens
tgtcaagagatcattcatttccaattgagacagcatttggaagagcaaaagccaggcacaaaattagagcctattaatcctaatcagaaacaaaagtaaataaattcaaaaggttttaattgagcctacccaacaggaggaggcggagactgaaggagtatcaagcccaataataaccaggatttgggaagcccaaagaagagctccctataaatatattgctttctttaaattctgaggggaaaaaagtaactccacctttcattgaacataggataccagaaattacataaggagttgcattccaaatgttggatgcaaaaaaagcaaccaaaattgattggaatgtggtttaactgctttatctaatcactgctaataaataagaagacctttcattagttggcaggaggacagttgctactggccaatttgattttcctgaaaacggtgaagacttgcatgcgctttttatccccccagatataatccctgaagtccagactgtttctggaatcggaagttgtcacgtagtgtcatcctcttccttaacagacctaaggtctcctttcacatgttcccaaattgtttgttttggacaccttttattgcaacctttttgaaagtgaagagtttagaaacctcatggcaaataagaaattgttaatccagagtgagcatgtaggaggctggagaatgcaatgatctatccagggcacactaggcagccgacactttgaaacctgaaatagccaagattcctcaattattcgtcgaagttacatgggagattcagtcaactgagcttaagaagatgccctatatgttgtcagcaagggggaaaaagtcagttccatgtatccctgacttaggaatctatcgcaccccaccttcccacggcaggctacatctgggctgatttgctgggtccccaaactcggtagagagcgccccaaggatcagggaccggcggccccacctgctgggtcccatccgccacctggattggcaaggcctggccccccttgcaagtggaccccttccctccctgctcccagaagcccagcccagaacggcgttctttccgggggcccaaaagcaatcagacctttaaaagaaaaaagagggagcgcagactggcattatataacaatttacagtagataagacttctagaaaacgaaagcagcccgaggaggggcgggggacaggggagaccaggggagtgcggcgtcgggggagcggtcgccaccacttactcgaaggcgaagaagagtccgctagtgaccaggatgaggacgagcgtcaggtagaagacgcccgtctgccgggccatcatgatcctcccgttacagaagaacttgtttcttcccgggaacacctcccatttcctccgggccgcgattttcttcttcttgtggggcgactccatgggggaggagctgtgggtgctgatctggctgtactcgcagtctttcatgggcccgccgccgccgggaggcatccacgagggcagccggctgggggcgcacacccccaggagccccccggccgcgcgggccccgccgagccacgaccgccgccggccgcccggccgccccccgagccgcggcgccgcggcccctacacgggctcccggctcggcgacaactttgccgaggacacccaggttaaccctccggggagcccaactgtcatagcagaatccccgctccgtgaggggacggcgctggtccgcagcccgcggcagcactcctccgtcgcttccagcccgcgtcccggggcgcggggctcagcccggccggcccccgggtcgccgagcgcccgccccctcgcgcggctgcccgctcggccccgcagcccccggctccccggccgcgcctcggctctggcccgccgacccccgagcactgcgccccgaggggacacgaggcggcggccccggcgccggcttcctcgggagccacttctgcggcgcggccaggttgggtccactccttcctccggcagcggatcctcccaggagagagcgctggcgactgggcggccgcgcgcggcaccggcaacccctcccaggggtggggacaaccacgcacgtttttctgtcaggagcctctcggcgagagccggggcgccgctcgcaccgcgacccggtgtcgctgcgcctggcagcctagtcgaatccgcggcccccgcgcggggatgcgcgggccgagggcggcggcggctcgcgggccgcgcggcgagggctcccttgctccctcctacccggaggaagcggccccggcgcgaggagggccgcggggacacagcacagacacttgtttgcaaggctcagcccggcgcgcgcgcggcgctccgagtgggtccgcctcctccgggccgggtgggcggtggcctcgcgcctcacccgcggctcctcctcctgctcctcctcctcctcgcccgcgaagccagggcaccggcgcagcgagattccagccccagccccctcgggcgggcgccctggggtgtggaaggcgcggggctccctgtggcatcgcccaagtagggatggggtcgggcgcccgcggccccgccgcgcagtgcgctcctggccgacttcagtccgtctcgcggcttcttccgggtttatcccgcgcagcagctgccgcctcgggacacgctcattcccacggccaccggcaagccactcctggcgactccccgggacctgaggagccgcggcgcggaggtgaccctccccggcctgcgcctcccttcttcctcctccccagctgggcgcgtggtcgcgtcgcccggggactctggtgatgcccgagaaatgggctgggggtgccgggtgccaggatggggtggggcggccctaggccggcctgacttcgggaccgggctgcgggcgagggtctcggggcccggctcggccggcttccgggccgagaaagaagggcagaggaagcggtcagggtcccctccggccccggcctccctcccggagtataagcccttggaggccaggttttgggttgctgccgcccagctctttcggtctccacttctccccacggacgtttacagctgctcgctttatttctccctccattcccccgtggagccccctcggcagcggaggggtcgcgtgcttctcctctcccgcctgcgcctccccccttcccacccgacagcccaggaggagctgcgggcgcggccctgggacggccggagcctggggcttctgctcgctcgcgccctcccaggcgttgccgcgggtccgagcccccgcagaggtgggcatagccccggggccgcagaaaacgaaggcagctgggcagggatgctcaatttcccgagccccactttcctttcacagcccactgggatgtgtagttcttccgcccgcaggcctgcgccgaggagaagcacgactcggggccttagaaactacaagtccctgcatcccccgcgacaagggcaggagaggcgtggtgctgggcgttctggggctaggtggtgggagatgggaaccaacaaagggggttgtggggaacggtgccttctctgtactgggcagtttgcacgttacacatgttctttgtctaatcttcgccggaacccggtgaggcattattgtatccagcttagagaaagcttaactactggccaaacatcacaaagctcccaagtagtagagatggcatcgaacccagagccctaagtatgtcccttacaaagcgtgcctcagtgaggagtgtcgaagggggatgagattggcttatccaagagggccagttgggaggagctgtggtaaggaaaaagtgatgggaatagcaattagagtatgacatgcaattacaaggagttttgaatacaagtgaaatttacaggggtccattccaaagccggttagagtctagggagaatggatcttaagcacacgataataattgggttttaattattttagatattgtatgagagacaagcatattacagggacaatt

SEQ ID NO: 586057 - DNA, 4001 bp, Homo sapiens
cggcaaattatccacccaaagcctcagtttccccagctaataatgagataatggttcctacctcgcaagattcttgtgggaattagacagtccatgaaagcacttcacaggcaaaccaattattttcaaatcaaaatgaagggaagactagaaatattttcacatttttaggactttttatatgccacaacttatttttgactaatgtccttccacagggaaatttttgagaaaggcagaaaaatgagaaaatgaaaatccacttctttgtcataaccttgagatacgacaacttccacagaagtctacattaagatccactttctaatctttctctgcactcccaaaattactcttaatttctgttaaccattcctacaatatgggagatagcaaagggaaaactacttccatacttcttcccaagatgtcctcaccagaaacaatcttccttcctgcctctatgtctccaaatatacggaatctctcaaaaaataaaactaaaacaaaacgataaaagagaaaagggactcaaatcacaaaagccagccttcaaagtctccagctttcttactgcagaactacagtcatgtggtatgatggaggcacctgttaggtggcaatccatgaagcttaaagtgttaccaggagaatttaaacagtaatggggggaggaagaggagctgatttcccacctcacatttttttcgccttaacacatgatggccaaacaatatatgctacccactgtcaacatttttatcatttttacttaaattgagaaagaggagaatttgagagccaactgaggaaactggatctcatattccccaatccaggctgacttcaggttttgtgtggtttttttcttcctttttgacaaggaaattttacatatctcctgaaacgtgttttacatgaaggtgagacctcaacaatcttataactttaccccagcctggttctggactcggtttttacaaacgggtgacgtgtgaatagcttcctaaaagcaaatggggcactgggatataatctaggaagtgatgatgcaagtctccggaggacggggaggaggggaggtgaagaagtcagaggaaataccctcctagtgcctgggcaccaactcacgccccgggagggaggaagggctggcttccacatgcccacggaaggggcacccctgctcctcccggagcggtcaacgccgccccctcatccctccccgccgccctgcccccctcacccgtggcccaggaggcccccgtgggcccgagcttcaggccggcgagtcccaaagggtagcaacgcacccccggcagggccttctctgcccacccccagctccccacccggcacccctccccggaacgcgacccccaccccctccccgtaggcccgggctgggcccagcctccaaggttccggcctcccgggccccgaggcctgcccaggctgccctggcgtctgcgcccccggcccccgccccccgcccccacccggccgggcacttacccccagaagccgcagggacagcgaggcggcaggctgggcgctttgctgcgctcgctcccagcgtctcccatggtgctcggcggcggcggagctcggcggcggcagcggtggcggcggctgggcccgggccccgctctgaggaggcggtggcggcggcgtcggggggctcggggcggggggagggggaaggagcgggcgcgcgggcgggcgcgagtccggggctcggagccgggattccaggccggtcagctggaggcgggccgcaccactcggcctgcggagacggggagggggcggagaggcgcggagagaagaaggagggagccgaggaggaggggcgtgcggacgcaccgaggaccgcgggggaggagggacacagacgccctcggcgggtctcaccgccgctccccagccagagagatgtcctgtgcggtggcgcagggaaggaccggagccccccgccggctccggagtcgcagcggccgctctgaagccccgggccctgctgtctccgtaacaccgtcccctcccccggaggctgcgctgaccggacaatggccgctccgccccctccccggcgtgcgcccctcccgaggagtcacaatggtctcgcccgggggagccaacgccaaagcccagccgctgatcagctgggatccgggcgtgccacttcgttccgcgcctcaaaggcggagtgcggggctgtgggagaaaacgagagcctcgggctgtcgcccggcgacgggcggctgaggccttcgtattcttagaacttttagaatctgaagcaaacttatcttccccctgtctgaagaaggggagcaggtttctgagtactccggggcgcggtgcctccccctaaacgcgaatggtgcgctccaagcgggagggggaggagcagattagttgtgtagggtaaattgggccagtcccagagtggcggcgcatgcgcccgtagaacccgtaaccgagtgcgaggaggggcctgggggagcaatgccaaacgcggaagtggagctctggcttcccgggggcgtcggagtcaaggtccctggagctgccgctctggctcctgggcgattccggggagccattctccccaatttgccaactccctgggcatctctctctctcttcctggtcccgccacacccaaacaactcttatagttccacccggtatactggtctcttgacaggaacttttgggaaatgcccctcccccagccccttgtctggggcaacttccttgtctcttctcccccaccggtgttggggagttccttgtctccactcccaaccacagagccacaagtacattatctatgcccaggcgagtccctatgcccaggctaggagagccgcacttcttcctacagctgacacgtttggtttttggaggggaaaggggagctgtagctgaatcagtaatggaaattggtaagtgaccaaagaagtttgagacactaaaaaaatgagtcctttaacgatcctagtccttgatcctgagctcattctgatctccagttagtcatgaacagagaaatcgattattgatgactaattcaacacggaggcaacatcctccagaccttttggagacccatcgctgaggaagacttcctggctcttaggaatagctgccgtataccctccttgcctgtcgggtatatcagagcctcagagagactattacctagattaatttgattaccaaatgttgctatcttatttctttatataccaaatcacatttctgtttgtgcatactgtgtgggtttgttaacattgatgtttattttggcctctaaagagcaaggatcgcatttagcttaatatgccacagatgctgttgatggtgaagttaatgattgcaaaaatcaagcacttaaagccaaaacaccctaaaatgtgagtgctgatttattatgcacaatgtttagttttaatttggtggattttccaaagccttcaataagtatatctgtaagaaagtgcatagaaaaagccggacgctgtggctcacgtctgtaatcccagcactttgggaggccaagacgggtggatcacctgaggtcaggagttcgagaccagcttggctaacatggtgaaaccccgtcgctagttaaaaaaaaaatacaaaaacttagccgggcatggtggcacgcgtgtaatcccagctacttgggaggctgaggcaggagaatcgcttgaacccggagggcgggtgttgcagtgagccgagatcatgccattgcactccagcctgggcaacaagagcgagagcgaaactctgtctcaaaaaaagaaagaaagaaagaaaaaatgcatagaaaggataaagccatacagcacaccttgctctcattggattcatattacccttaaatcttcatttaagccgacataaaattcccacatgcgtgagatacttaacagcctttgagtttaacaaagattaagtgggattatctctcttggcatctt

SEQ ID NO: 586058 - DNA, 4001 bp, Homo sapiens
aaaaaaaaaaaaaaaaaaaagagagagagagagagacttggatcttcaacttgaagtcaagggacttgagcctatgatattaagctctctttcaactccaagtctgaccaggctggacagaggtacactaggagagcatctatagagcattcatcctcttcatcagctctccatcctttcaggggttatcctgggcccttttccccttcctccctgcttggcaattcttacctgaaaggccttctgtgtttgggagatggacaaactctctccactgttcctcttcttgctcaagcttggtgattagctctggcttatgcagaaagattctggctgatgtgtgggaatgagaaagagttgagttggtcccaggtatggccccttcacatctgatggggacaacaggctacctcctgtagcctttgtttaagaaccataacctgggacatgtagatgcggaaaggagacattaaaaggccagctgctagcaaagtacctggttctcaggagtgacttagtaaatatttgtttgatgaatggaaaaatttgcatattttgagaacactgtcatcatgttacaagtgttatctttgccttcatgcaggctatcatttcttctctttaccactgagcttagtgactcagatctttcacacctggaaagcatagaaccaggggtcagtgaaactaattgtaagctgatctacctgtccagggaaaccagatgttccagggcccttaggacagggggcttgctgagggaagcccagcctcttacccacagatgttagattcttaaaggtttccgacataacatcctggtaaaggaccctctggctggcatctagacagtcccactcttcctgggtgaaattcactgccacatcctcaaaggtgactggcttctggaagaacaggagagactcaagaagtttatataaatatatatgtgtgtgtgtgtgtgtgtgtgtacaagattaacatccagtctcaagattcagagaattaaaacctaagagaaagataaaaccatggaaggaagagagaaatattaaaagacagacacaaggccagcaactgtgaagtatagaaaggaaaggaggccggacgcggtggctcacgcctgtaatcccagcactttgggaggctgaggcaggcagatcacgaggtcgggagttcgagaccagcctgaccaatatggtgaaacctggtctctgctaaaaacacaaaaattagctgggcatggtggcgcatgcctgtaatcccagctactcaggaggctgaggcaggagaattgcttgagcccgggaggcagaggtagcagtgagccaagatcgcgccaccgcactccagcctgggtgacagagcgagactccgtctcaaaaaaaaaaaaaagaaaaaaaaaaaaaggaaaggaaagatgaagagaaagggagaaagataagatgtgggggagaggaaagaggatatgcagatatgcagaatataaacaggaaagcaaagcgaaggaaaaaatgctgccactctaacaaatttcaggaagtactccatgaaggatgccaggatggtgcgggagatggagaaaggtcttgcagctcctttttctggatgtcgttcagtctggaacaatctgagatttcatttgacctgcaggcaggagtatgtatgaaagagctcctggagtccaggacctggaccccacctctctctagcttagtctcctcaccttcttcacccgtgcctccctccagcaatctctcttcatggcttcctgcagggtggcagctacctcgcccacccatgggagcgtcttctgtacaggttcgattggcttcagctgttcaaacatcttctcttctgtggtgtctctttctagctttatccactcctggcctggtgcccaggcctgactggattccttcctggggctatctacctcccagtaactgggcagatggagaggcccagcaaaggccccagggtttgatgtggcttcctgtgacaaatgtatctgctccaagaggctgtcttccttttttgttctgctgtccaaattctcctcttccacaattgagaacaattttgcttccctcaaagctgggccaccgagttcagggccctggtcacccttggctcaccagctgccattgtttagtaacaacaccagcctgggctaggtgtctgccgtctgttctaccctgcttctagaaacctgaggtcagagaaaaacaaaacatatcagcaagagggagggtaagaaacagcttccttatttggtcagggaatgccagcagttactaaacccctacagtgtgccactggatgctctcagcaatgaggtaacaattactggccctgtcttaaggacctaatgcagagatgctaaataattttccaaggacaagtggacattcttgatctacaaaagttaatgtttaaacctaatgttaatgttagactcagtaccattggaaatcatgtagctggggtaaccaggctaggatctgtcacagatcacctcgagtgagtctctttattctttctgacttggtttcatcagaaatgtgagaataaaggagacactctctaagatctcttccatgaccaaaattatacacacacacacacacacacacacacacaattctgtgatctggattttcaatacatgtagtagttcccctttatcatggttttgctttccaatgcttcagttacccatggtcaaccatggttcaaaaatattaaatgaaaaattccggaggacaggcacagtggctcacacctgtaatcccagcattttgggaggctgaggtaggcagatcatctgaggtcaggagttcgagatcagcctggtcaacatggtgaaaccctgtctctactaaaaatacaaaaagaaaatagctgggcatagtggcacacatctgtaatcccagcaactcaggaggctgaggcaggagaatcacttgaaccctggaggtggacgttgccatgagccaagactgcgccactgcactccagcctgggacatagagcgagactccgtctcaaaaaaaaatccagagataaacaattcctaagttttaaattgcttgacattctgagtagtgtgatgaaatcttgtaccttttctctctggcctgcccaggatgtgaatcatccctttgactagcatatccacactgcagacaatacctgcccattagttccttagtagctagccatctcagttaccaggttgactactgtagtatagcagttgcctgtgctcaagaatgccttattttacttaataatgacccaaaagcacaagagtagagacgctggaaattcagatatgcaaagagaagccataaaataaaaaggtaaaaattcttgtcttaaggaaagaaaaaataatcatatgctgaggttgctaagatttacaatataaattattttgagagagataccacattcatacaacttttattacaatatattgctgtaattgttctatcttattactagttattgttgtcaatctcttaccatgcctaatttgtaaattaaactttatcattattatgtatgtatagaaaaagaaaaccatagtgtatacagggtttggtactattcatggtttcaaagtatccactggggtggggcgcggtggatcacttcagggcaggaatttgagaccagcctggccaacatggtgaaaccccgtctctactgaaaatacaaaaattagctgggcgtggtggcacgctgtagtcccagctgctcaggatgctgaggcagaattacttgaacccgtgaggtgaaggttgcagtgagccaagactgtgccactgtactccagcctgggtgacagagcgagattctgcctcaaacaacaacaaaaacaaagtatccactagagctcttggaacatatcacctgtggataaggggaaccactgtatatacagatctttgtgaagaatactgctaacaacccaagagcaatcacttattcag

SEQ ID NO: 586059 - DNA, 4001 bp, Homo sapiens
tttgcgtgtgatcatgatactatgattatattaagataaaagtccctgtatataagaaattgacactgaagtacttgtacttgtgagtgaactaaaatgtttccatctgcaatttgctataaaatgaaagagaagagagggacgaaatgaggaaaaaaaagagataaagagggggagagggagggaaggaaaggaagacaaagaaaggagggagagggaaagaaaggagagagggaaagagggaggaagtaaaagggaaggagggagacaaaagggaaggaggaggagaagggaaggaaagagagtggaaaggagggaaaagaagaatgaaagaaaatgaccaaaagatgatggctgaagctgagtcatggttatattggtgttcattgtaacattctctctacaattaaatgtgtttaaatttctctccaaaattttagaaaattaaacaatgtcctaacttctttccttcctgaataatacagccaaaaagcattaaggtagggtcaaggaaggcgagagagagccacagcccaacccagagtgaatctggagcccaagtggaatgaggagggtgtccacggtggggaagggaggaagtctatggcaggaaaacaacactgatacatttatatcatttattccacaaactccatttaggtttcactacctggcccctacttggatctgagccaaactgatcacagtgggaaggcacaagattgggaaattggttgccaacacaaagtatttatcaaatcagtaaatatactgaagataaggaaaggaaagtttctcattaacagaaaagagttacaagtctatgaaagagctaaccctgtaaaagttgggttgaaatgaagggtgttagtatgaagccagtttcaggctagggcgttcctggaagctcgaaaactggtggatctccagcactaagcaggacatcagatttttgcaaaaaccaggggtcctagtcctttttcactattaaaaacttctattgttcctcctaatctccagccaaggaaaaggtacccccgagtcttaaagcctttgagagtttgagtatcacaacgtccaacacaaaccagttttggtctttgctttgggataggctctttttcagagtatcttatttttccctcctaaaatatagaaatcatccattacaaagtgaattgatgaatgacagtaaaattgaaagcaaccgtacaaaagccagtcactaatgtgtcatcatagttataaataataatagtaccactaataaaagcaaatctttaaatcatgcttactctgcaccttacccatacgaatgcattcaatcctcacaacaacccagtgagttagggaatattatccccattttacaaaatagtaaaatgaggcagagagagagcttaggaactagtgaaaagtcacacagccagtaagtggcagaggcaggatttgaaccaggtaatctgactccaacgttctggctcttggccagtaccacagaataatttaaagaccttgaaactgaccttgttaccaggcagtgcaaaaatgtaacggctcccattctcgaggcttgtctatgtgacccatgcatcccgtctccaaataccctcaagaaccgacccggacactcggtaacggccctaaacaagggacacccatattgggctctacgcaggaacgccgaggaccacttcattccgccgcagagcgcccttccctcccccacggcttctcgcaggggtctccctccttgggagccgaggctgcaggaactggggagggaagggcctctctccacaaacacacacacacacacacacacacacatactcctgcaaacgcacctctacccggggacaaaagaactgcaggaccgacaggaggagagccgcgggatgagatttaaccccacagtggaaggccgacgccgattcaccccatactcacaaagtgcttgaaactagcaaaccacccgcagggcggggcacagaagccacttccgggcctctctagccacctccctgacagactctgtcgtttgctagctcggcaccttgtgtcccctccccttttgctattaaagaggcttttaaatttttatttttccagctataactaagggagaaaggcaaggtgcagaattattttcataatttgctatatttgcgaatagaagagagtaaaaagaatctaaattatgtgtgcgtgtgtggcacaaagaagccctggaaaaatcggaaaattaataatggtggttacctacgagaggtgaacggtcagaaactgagtgaaaacggggacaagagtgagaaggaaagtgttagggtgcatgttttaaatgtacttttaattttagagttgattgcattgcctaattagaatatgaattctaaatacataaattttaaggaacatgctgcgtggtttacataaaaaatccaagataatctaacactcaaattatgatgattaataagagagtttagcaagttggctggactttttaaaattcatgttcacaatcacattctccatcaaaattataaaaatagaatttttaaaagacatctatcacagaagcaaatacttacaaaagatacctgaatggaaacattagtaactttattcattagggataagtagttgaaatatatacctatatatatgagacatatatatacacctatatatatgagacatatatatacacctatatatatgagacatatatatacacctatatatatgagacatatatatacacctatatatgagacatatatatacacctatgtatatgagacatgtatatacacctatgtatatgagacatgtatatacacctatgtatatgagacatgtatatacacctatgtatatgagacatgtatatacacctatgtatatgagacatgtatatacacctatgtatatgagacatgtatatacacctatgtatatgagacatgtatatacacctatgtataagacatgtatatacacctatgtatataagacatgtgtatacacctgtatatgagacatgtatatacacctatatatatgagaactcaatatcataaagatatcattccttcctaaattgatacacaaatccagtacaaagcaaatcaagattccaattgtgctcagtggaacttgactagttgattttaaatgtatatggaataatgaaagagtcacgaatccgagacatttttaaaacaaatgaaggagctgcagaaacttgccctatataatttattataaaattatagcagctaagacaatatagtattggcacaactacagacaaatagaccaatgaaacagaactgaggactgagcaacaaacatgtatgtgtggatgcttgatatatggtggaaattgcattacaaatcagtgaggaataaaggagctacttgacaaatagtactgtaatatttggatatctaaatggaaaaatgaaataaaattgggtttctactttatatgttgcacaaaaaatcaattccagtcagctaactttcagacttttaaaagaaaatttagaataattgctcttttttctattcacaagtttgcttctatagaatcatttttttatgagctcaagtaaaacaagatttcttttaaactgcataaacatacaaactataaggaaaacaataaataaatttgacctcattaaaaattaaaactatatcaaaagatactagaaactaatggtaaagacaattaaattaaaaggttgggagaagatatttgcaacacatatagtcaacaaaggatcagtccactgaatatataataaacatctacaaatgaataagagagaaaaaagccaacaatcatacagaaaaaaaatggcaaaaaatatgcacaggcaattcccagagaggaatctcgaatgaccaataaacatagcatatacagttaatcattagcaattaaataaaggcaaattttaaatcattttataccaacacctgagtaa

SEQ ID NO: 586060 - DNA, 4001 bp, Homo sapiens
gcccggctaatgttttgtacttttagtagagaccgggtttctccatgttggtcaggctggtctcgaactcccgacctcaggtgatccgcccacctcagcctcccaaagtgctgggattacaggcgtgagccactgcacccagccaagggtggacagtgtttaagcagcttgcccatgtcacccagctaataagtggaaatgctaggatgggagctcagacagaatgactccagatcccgtgttcttaccattactctaggctccctcattatatacatctgtgtgtttacgaaaaccctttggacactggtgctaaattctcaatactaatatattttctaatctgaaaaatgaggataataatttctactttatgaggttttggagaccagtaaataagatcacagtatgtgacatcacctaacacagggcctggcacatagttatgtcctcattaaaagcaggtttccttccagacattgatagttaaattacagttttcaagttactgtctcacgtgcagctcagaatttcccacatattttatgaagaatgaagctaagagatttgcaatgacttcccactgctacagggcttgcgtgcaatagacctaagtcaagaaccttggtatccagctcaccagttagaagatttggccacacaggtcctctgaagttgtgtgcacagggacacaggacgatgcaaagaggaaacagtccctcataaaacagggaagaacatggaggtaaaaataggcccactttctaccagaggttcataaccagtggtccatggactttctcccaagtggtccatgaacttagaaaggacaaaaactaatcttatttttactggtctttaagagagagttaacatttccttcaattatgaatggaagcaacaaatcaaggtagcataagcagtacccaggactttgtcaccaacaaaacctgcacgttttcacaccacattacaaccaggcaaatagatgcttatcgccattttgaaattgccaattataagccctgtccctaggtcttattatttagtgcagtaataaaaatccacatatatgactttaatacaaatttaattctttgctaactgtatgtcaatatagttgtgttcttttgtaatcctttatagtttctttatatatttaaaaatataattctgagaaggagtccagggacttcaccttactgccaaggaggttcacagtacaaaaagagatgaagaactcctggaccttaaaggaatgcccctcgctccgatctgggatttcaggaggaaacagaccacagcgctcagatactaaacctgttctttctacctgcggcgccggctcatccagctgcctctccaaatactccaatagcaccaccacctcctccccgctctctggatgctgctcccgcacccagctctgcagattccccggcaggatggtcaggaactgctccagcaccagcagctccaggatctgctccttgctgtgcatctcaggctgcagccattgtccgcagagttctcggagccggctcaacgcctcgcgggggcccgcagcctccgggtagcggaagcctcggaagcgctggcgggagcgttcggggccccgagcagggctgcagggtgctctcacctccgccgtcaaggcggaggcttcctccttctccaccttcacggtcaggagccccgtctggtcttctgcagactgggcgtccagggctgcgttttttctcggttctctagccattctgacccaaggcagtactcgggtctcactctagttgcgacctgtatatcttcagaggattctggaagggtggtaaattttccagtagaactgcaagtggtccccctcctgtcatgcccaggggcccaggacaccccctgaggcgcagctgcacagatctctcttatagtccgtgcctttgcagggtcgtcctctgcaccccactctgaatcccacagtaagtatcaccaaaggatgtctttgggagtgaaagtgatcactctccagacataggagggaagttgaggctggggcacaggaagtctcgatgggaactaaggccacttcctgggcgctctaggaagcttctctcggtggttgtctccgaattaacccattagctaccctgtccttacctccacgcaagggaaggcagttaagggatagagaaggaaaggatgacagaccttggatcataagaaataggactgagcctttaaatcctggaaggatgccgctgcggctcatatttctttcctatgtaaagcttgcttaagcagctggcataaaattgacactaaaattgagctggaaagcaggggttccccagagccccaagaaccctggcagggggacctttagtctctctcagaaacatcaaagcagcagaacacatcaccaggcacttgcctggagcgagcagtggctgcccttggtccttccccactcacccccttaatctgtcactttttttcctcctccttaaggccagactactcctcccgaccctgactgtagccctcacctcccactaatcctcaacacactgtcccactcccccactcaccactttgcacattccatggctgcttctctggcaatcaggcttatgctgctctccacctccagaaactctctagtctctggcttcagggaccccattctcttctgctttcttccttcctgtttcttcccagcccccaatcacagtcaagcacagtggctagatacgcaggtagccaggttacctgtgtaatcctggcttaccctccctgtgcccgacttttccaatctgtaaatagggaaagtaatagtagatagggatgttgtaggcattactagggattagataatgttgtgagcactcttgtgtaaagtgcttagaacagtgcctggcatgtgataaactaggcctatcctataatagaagaaagccctgagaattctttgaactagatgggactcgattttaagccataattgactgtaagttatttgactggacacttcagtaagcccctttctgcccagtggaatggagaagctacaaaatgcaagttcagtagtttatgaggggaaaaaatatcatgtcagtactttcttgagtttttctttctttgcctatgcctctacattccaaggattaagaaataacataacttaagaaaatgagaagtcccaaagactgttgcaaatgaaaaatactacaaaatatctttctcttgatgagctaccacagaaggtagggggcactgcccatgaagtatccttataagtgaacttgaatctaagtacttttctagatccaaatatttacagaaataagttaagttagcagttttcacactctgtgtcacacagaatcactggggagcttttaaaacatcctgatacctaggctgcaaccaagatcaattaaatcagaatgtcacaggatgggactcaggcattaataacattttttggttgtttttgtttgttttgcgacagagtcttgctgtgtcacccagggctggagtgcagtggcgcaatcttggctcactgaaacctccacttcctgggttcaagtgattctagtgcctcagccacccgagtagctgggattacagacatgcgtcaccatgctggtctcaaactcctggcctcaagtgatctgcccacctcagcctcccaaagtgctgggattacaggtgtgagccaccacgcctggccaactttcctaggtgattccaacatgcaggtgagtttgagagttaaggaattaaatgacactttaaaaaatcaatcagccaaatccaacatgtgggacattctatagaacagaatgatgcaggacaagtgagccccaaaattagggcttagctcaaaaggatgctttgcttcgcccagggaagagttcaagggcaagccagtggtattaggcagcaacttttattgaagtgtcagtgtacagcagcagcagaggtactgctccttacagagcagg

SEQ ID NO: 586061 - DNA, 4001 bp, Homo sapiens
caatttgtttttgtttgaataaattatctataattttaagataatttattttaaaatggtcttagctaattttaaaataatttaatttttcaaatcaaaacaaactcttaaattttcttaaaatagctacttatggtttaatgttaaaaacttaaaggtcaatacatgggacataaattctgtttagaatgtgatgttatatagtggtagtcttaccatgttttcttataaatttccttaaagccaaggttcatttttaactactgaacaactggccatctattactgagcaatcctcatccataatggctataaaatattattattattatttagggacagggtctcactatgttgctcaggcttgagtgcagagtctattcacaggtgcaatcccactacttaccagtacaggaggctataaaatattttaatgtgaagtgcgcagcattcaagaactttatattgttgatgtggtattaaaaagtctcaataacaacactgatgaaaaccagctaattatcaggtttgttcattttttataccaaatcagccaacaggtcttgcccattgctcatcttgattattctatttagtggctaattttccatttttttaagtctcttccctctctgatcagctggtttttgagaattacaacctataaataactgagtgcaaaattactccagtatgtaccttcctctcagttttgtgcgtacatgtctgtattaagttggtgagcactttgtggatacagactgatttttacatagtctccttaaagaacacctagtcaagtttacatgagtttaaaaggcaatctttaaagcttcctctggattttaaatactgtaatcctgtgagatgctgaaggcacaactcaattttaacagtattattttttcaatagttgtggaaggaatgtattcttccttcagactatgtctaatttgagaaatgtttgggaactgaaaacaaaacaaaaaagacattttccaggatttaaaatccaagaaaaagtaggtgaagccaatactatgctttgttatctcaaattgcattagctgaaagttttaattaacatctatcacattttacatttaaacaacagaaattcaaaacatgtatgtatttgctaaaacaatgattgctacgtaaatatactcaacggaactaacaaacaacagaaatatgtttttaaaggtggtggtggcagtcaaagtagcctgacaaaaattactcatgactaaccagagttttggaaatggggccctcccagagttcctcgttggctaacttcagtttgctttaacaaatgaaataggcattctgataatgttgaattctgaattaccctgaaattaaaaaaaaaaaaaaactttcgtacaattatctagtcaacacaccaccagtttctgaatacactaaagaaagaagagtaacagcaaaaattggtttccatggataaacggggcttccaaaagcaaaatatgtcttttttaaaaactgagaattttgttgtgacctaaacgcaaaagagcgctaagtgaaaacaattcagactctggaaatagttggataaaaaataacatggggggggcgttccccattttaagataaacaagatcgactacaaaaacataccacaacacgattatctatgaagaaagcttcataaaaggttccctcgcaaaaagttcaagggcaattcgtggggacgtactctgcctgcaacagcaactaaggcgtcagaatcggtccgcggcgccgaacaccgcacaggcccctctccggacccctcaggccagtcctcagctgcggcctggaccagccacaaagcacccactttcctccggcccagagcccgaccgtactcactgtgagttgcagaggcgccccgtcgtggggaagggaggctgcaacggataaacagactcgaaggaaggtcggggagtaaaggcgatgaaagctgtactcggaccaggcccctccggccactaacttctaaatctgcggaggcacaacaccggccagcacgcatcttgccccaaaggcacttccggaagctctctaggagtcctggaggtctacaagctctatggtcggccgactgagggtaccggagtaccacgcccctcacctgctgtgtgctgtgcctcgggttcctcccgcgtctgcgtgcctcaggcttgcgctgtcgctggggcagtgaacgtgctggggaataacggaccttggtgtcccctccgccttgtgtgcccatgcagctccgcgcgctcgctgtcaatagtaacggtcccctgggggtagatatcggacgtggggaggctggagctgtgaataggaggctgggaaagtgttggaggagggagcacttcatggatccttaggattccaactggattcgcgtttggctccgttacataccctgtactttactgttctcgattcataaacatatccagacctctcacatagagtacaaacttcatgaggaattcctgctaatcacagttcatagttttgtgaaatccctatggcatggcacttaggaatagcatattttattaagtattcaaaaaaatcgtaattaaatatatattctttttggatctttacatatttcccactctttcctatcttaatgaatttctatcgcttacagcatctgctttgctgcttagctgttttaatgctaaacctatgatgtaagcttgaagagtagaccctaggtttaataccacaagatatggggaacaaatctatgttcattctttctttgttagtctttttttctttttttgccttttttttttttttttgagacagggtctctattgcagagtgtagtggtgtgatcatagctcacggcagactcaaccttctgggctcaagcagtcttcccaccttagccccccaagtagctgggactacaggtgtgcaccaccctcagcttaaaaaagaaaatttgtagaaacggggtggcggggcggggcgggggtctcactatgttgcccaggctggtcttgaactcctgggctcaagtgatcctcctgcctcagtctcccaaagtcctcggattacaggcatgagacaccaccctggccctgtgttcattctttacagacctgttgcattagagctttttaacttttgagactaataggatttcaggggtggaggttgtggcaagtgttattttttgttgtttaagtctcatgtatttatttccttcagcacctttcccaaccacctattattgagttctcagggctcctccaattttcaccttaatttccctctttatctgctcctgctggtagccaccaccaacatttctatcccttcccaattactaactccccaatattttgcgtactgacaaagtcgttttgatttaagggttttgtcatctaattatcacatgaaaacaagtaaataatagtaaacactgggaagctacagtgcttctggactccttcaaagtaattatttttgctttttatttcacagctgttgctttccacctgggatggtaactggaagtaactggtgacagactagaactctactttcagtttcttttttcacattttaaaagtaacttttttggctgagcgcggtggctcatgcctgtaatcccagcactttgtgaagccgcgggaggatcacctgagctcaggagtttgagaccagcctggccaacatggcaaaaacccatctctgcaaaaaatacaaaaattagccaggcatggtagtgggctcctgtagtcccagctactccagaggctgaggcgggagaatcgcatgagcctgggaggcagaagctgcagtgagctgagatcctgccattgcactccagcctgggcaatagagcaagaccctgtctcaacataaataaacaaataaattttttttaagtctgaagttgtgcacatatgtagttgtacaaattcaatgtgcacacaactatgactgcacatactatgtacaaagtt

SEQ ID NO: 586062 - DNA, 4001 bp, Homo sapiens
aaacaaacatacaaacaaatcctacatagagagtgtgtacagaaaagaaagggaatttgaaaattatttttcaagttagacaaggccgggaacaacagggtggagagtaaactacagatcagaagaaccaaggagcaaaagatatggttaaatatatcaattaacattgggggtatagttcattgattatgactttacaggaaagtggaggaatttgctagaatagtgagatttgggggaagagtgaatttgaggaagatgctgagattttgttgagaaagggtaatcaatttggttttgacaatttgtttttgtttgaataaattatctataattttaagataatttattttaaaatggtcttagctaattttaaaataatttaatttttcaaatcaaaacaaactcttaaattttcttaaaatagctacttatggtttaatgttaaaaacttaaaggtcaatacatgggacataaattctgtttagaatgtgatgttatatagtggtagtcttaccatgttttcttataaatttccttaaagccaaggttcatttttaactactgaacaactggccatctattactgagcaatcctcatccataatggctataaaatattattattattatttagggacagggtctcactatgttgctcaggcttgagtgcagagtctattcacaggtgcaatcccactacttaccagtacaggaggctataaaatattttaatgtgaagtgcgcagcattcaagaactttatattgttgatgtggtattaaaaagtctcaataacaacactgatgaaaaccagctaattatcaggtttgttcattttttataccaaatcagccaacaggtcttgcccattgctcatcttgattattctatttagtggctaattttccatttttttaagtctcttccctctctgatcagctggtttttgagaattacaacctataaataactgagtgcaaaattactccagtatgtaccttcctctcagttttgtgcgtacatgtctgtattaagttggtgagcactttgtggatacagactgatttttacatagtctccttaaagaacacctagtcaagtttacatgagtttaaaaggcaatctttaaagcttcctctggattttaaatactgtaatcctgtgagatgctgaaggcacaactcaattttaacagtattattttttcaatagttgtggaaggaatgtattcttccttcagactatgtctaatttgagaaatgtttgggaactgaaaacaaaacaaaaaagacattttccaggatttaaaatccaagaaaaagtaggtgaagccaatactatgctttgttatctcaaattgcattagctgaaagttttaattaacatctatcacattttacatttaaacaacagaaattcaaaacatgtatgtatttgctaaaacaatgattgctacgtaaatatactcaacggaactaacaaacaacagaaatatgtttttaaaggtggtggtggcagtcaaagtagcctgacaaaaattactcatgactaaccagagttttggaaatggggccctcccagagttcctcgttggctaacttcagtttgctttaacaaatgaaataggcattctgataatgttgaattctgaattaccctgaaattaaaaaaaaaaaaaaactttcgtacaattatctagtcaacacaccaccagtttctgaatacactaaagaaagaagagtaacagcaaaaattggtttccatggataaacggggcttccaaaagcaaaatatgtcttttttaaaaactgagaattttgttgtgacctaaacgcaaaagagcgctaagtgaaaacaattcagactctggaaatagttggataaaaaataacatggggggggcgttccccattttaagataaacaagatcgactacaaaaacataccacaacacgattatctatgaagaaagcttcataaaaggttccctcgcaaaaagttcaagggcaattcgtggggacgtactctgcctgcaacagcaactaaggcgtcagaatcggtccgcggcgccgaacaccgcacaggcccctctccggacccctcaggccagtcctcagctgcggcctggaccagccacaaagcacccactttcctccggcccagagcccgaccgtactcactgtgagttgcagaggcgccccgtcgtggggaagggaggctgcaacggataaacagactcgaaggaaggtcggggagtaaaggcgatgaaagctgtactcggaccaggcccctccggccactaacttctaaatctgcggaggcacaacaccggccagcacgcatcttgccccaaaggcacttccggaagctctctaggagtcctggaggtctacaagctctatggtcggccgactgagggtaccggagtaccacgcccctcacctgctgtgtgctgtgcctcgggttcctcccgcgtctgcgtgcctcaggcttgcgctgtcgctggggcagtgaacgtgctggggaataacggaccttggtgtcccctccgccttgtgtgcccatgcagctccgcgcgctcgctgtcaatagtaacggtcccctgggggtagatatcggacgtggggaggctggagctgtgaataggaggctgggaaagtgttggaggagggagcacttcatggatccttaggattccaactggattcgcgtttggctccgttacataccctgtactttactgttctcgattcataaacatatccagacctctcacatagagtacaaacttcatgaggaattcctgctaatcacagttcatagttttgtgaaatccctatggcatggcacttaggaatagcatattttattaagtattcaaaaaaatcgtaattaaatatatattctttttggatctttacatatttcccactctttcctatcttaatgaatttctatcgcttacagcatctgctttgctgcttagctgttttaatgctaaacctatgatgtaagcttgaagagtagaccctaggtttaataccacaagatatggggaacaaatctatgttcattctttctttgttagtctttttttctttttttgccttttttttttttttttgagacagggtctctattgcagagtgtagtggtgtgatcatagctcacggcagactcaaccttctgggctcaagcagtcttcccaccttagccccccaagtagctgggactacaggtgtgcaccaccctcagcttaaaaaagaaaatttgtagaaacggggtggcggggcggggcgggggtctcactatgttgcccaggctggtcttgaactcctgggctcaagtgatcctcctgcctcagtctcccaaagtcctcggattacaggcatgagacaccaccctggccctgtgttcattctttacagacctgttgcattagagctttttaacttttgagactaataggatttcaggggtggaggttgtggcaagtgttattttttgttgtttaagtctcatgtatttatttccttcagcacctttcccaaccacctattattgagttctcagggctcctccaattttcaccttaatttccctctttatctgctcctgctggtagccaccaccaacatttctatcccttcccaattactaactccccaatattttgcgtactgacaaagtcgttttgatttaagggttttgtcatctaattatcacatgaaaacaagtaaataatagtaaacactgggaagctacagtgcttctggactccttcaaagtaattatttttgctttttatttcacagctgttgctttccacctgggatggtaactggaagtaactggtgacagactagaactctactttcagtttcttttttcacattttaaaagtaacttttttggctgagcgcggtggctcatgcctgtaatcccagcactttgtgaagccgcgggaggatcacctgagctcaggagtttgagaccagc

SEQ ID NO: 586063 - DNA, 4001 bp, Homo sapiens
tctctgcagcactgtgacatgctcatgatggccttgacgcccacgctggaaggttgtcagtttactggaatgagggcaaggaacacctggcccacccagggcagaaaacaatagcatgagcgatctgtgccttaaggacatgttcatgctgcagataactagccagagcccatccctttatttcggcccatccctttatttcccgtaaggaatactttcagtaaatcttatcactggcttgctgtcaataaataagtgggtaaatctctgttcaaggctctcagctctgaaggctgtgagacccctcatttcccactccacactctatatttctgtgtgtgtctttaattcctctagcgccactgggttagggtctccatgaccgagcttgtcttggcagacaagattcatgaaaagggtagttgaagatatgtaacagtattaattctccaagagtatgaaataaatatcactaggttcagactgaaccttggaaaacaaacaatttgagtataagtaagaacaaaatttatcaatgataaagaaaaaaaaggggggttagttccatggtatattaaccagagagtctcaatcccttatattttactgggccatttctttgatatttctggttatgtttcctagatgcgctaaccaagtagtgtcctaatgcttaatgagcatgatctcatttaccatagtaagatgggtgtaaagtaggcccatataatccgaatgaaatttcaattatgctgagcagctggttctatgacatgttatctcagctgacagtactatctccaggtgttttatcacttctcatctatttaaaaccgagtccccctaaagctggtagctttaaactaataaatattgattgagcatctagtgccttataatattgtgttaggaggacttacaaaaatgggtaagcagatgtgtgaagaaacgctaggagaacagagaggaacgagtaattaattatgatgagaaagttggaggttaaagagcagggctcctgatggatgaacatgtcttggtgggcatgttgcgggaggggaagacgggtgagagttttgttggtggagagggagacagtcaggggaaatccggtagagaccacaaagcagaacagagacttcaaggggcatgctggtaaaggctcccatagtaccttgtgtttctcaagggcagggggtcagtgttggtttaactgcatcctcggcacacaggaaatactatttaccgtgtcaataaatttcaggacaagcggggttgtccccaagtgtcctacaaaacggcggttactcttcccaagggaagcaggggattggggatggtcctcgcagcagtttcttttcgcagacaatggcagatctgagacatgtggcacccctccccgttccacctggctggaatgggcaactcctcttaccagtgaccccaaattcaggatcagtaggacagcccccaccccacgccaccaagccctcagcgctccactatgacgtcacgcgcggcggcggtaactatggagaccgccaaaccctcactaaatgcgtaagcgcgcctgcgttcccaacgccgaagctggttctacctttctccgggattcctctgagggccaaggtctggtcacccagaggctgctaatttcaaaggcaatatgagagggactggatgtttggagggggacacggggctggacatctggatccccaaacccggactcacctctcggacagggctgattccgatcggacacttccggtggaaggactgagcggcgctacacttcaagaattccgtccacagggacttgtgagtctgcgcagaaggcgggatgcctttggactacaattccaagaatccttcctgggtctcttcgggcgcagacttttcgccaaagtcctgaagatctcagggcttgaaggagggggcatcttttttctccattgtagtagtgtgtcttgctaaataacagaagggactcctgaaaagaaaatgacgttggccgggcgcggtggctcacgcctgcagtcccagcactttgggaggccgagacgggcggatcacgaggtcaggagatcgagactatcctggtttacgcggtgacaccctgtgtctactaaaaatacaaaaaaaaaaaaaaaaaaaaaaattgccgggcgtggtggcacgcgcctgtagttccaggtgctcgggaggctgaggcaggagaatcgcttgaacccgggaggcggagcttgcagtgagccgagaccgcgccactgcactccagcttgggtgacagagtgagactcagtctcagaaaaagaagaagaagaaaaagatacacactcgagcacacattttctcagcaaagcaatttacttctatagaagggtgcgtctcacggatggagcaatggcgagagcacacctgaacaagggaggggaaggggttcttatccctgacgcaggtagtccctagtgctgtgtcgttcccctactggctagggttggaccgcacagtctaagttaattccgattggctattttaaagagagcaggggtatgagccggagtggtagggtgagcagtttcagtgggaaggacggttacggaacaggtgactaaaggtgactcaggtcagagcaggtgaccaggggtgactcaggacggagcaggtcaccaggggaacagatgtgaactactgattagaactggtggaaaaggttgtttactgaaactagaggcaaggagacgaggaaaatgaggaagttaaagtttaaaatggagaacaaagaattgaacatactgacatactgattctttgaagagaaatttagaactcactgtatttaacaaggagttcaaggccagcctggccaacatggtgaaaccccgtctgtactaaaaatataaaaattagctgggtgtggtggtgggcgcctgtagtcccagctacttgggaggctaagacagaagaatcgcttgaacccaggaggtgaaggttgcagtgagctgagatcacgccactgcactccagcctgggcgacagagcaaggatccatctcaaaaaaaaaaaaaaaagtttattcgggaataggaaattgcaataagaatagacgtgccagagtaaactatgtttctattcagggaggtaaaggaagacaaaggtttttaaaggaagaatggggaggattatttaattgttttgaaatcattattcttgactacaaagatcggtaacgaggatgacaccagtctgaggttagacaaacagttgctgggcggatgtccttgcagaggtatttttggtgtaagatgggttttgcagtcatatgtgatagttttcttatgaggcatacaagcctgagaagtgtctcttcatagccctccctggctctatctgtcagattattgcttttgtttttattttttaacactagtgggccgggcgtgttggctcacttttctaattccccgctttgggaggcaaaggcaggaggattaattgaactcaggagttcgagaccagcctgggcaacatagttgggacctcgtctctacaaaaattaaaaaaaaaaaaaattagtcgggggttgtggaatgcacttgtactcccagctactcgggaggctgaggtgggaggatcgcctgagcccaggaggtggtggctgcaatagtgagctgtgattgcaccactgcattctagcctgagtgactcctgcctctatttaaatctcaggtggtgaaattgaagcccacgcagcagggttgcaactgaaacttcatctcctctgcaaaaccttcctgcattcccagacaacttttcttctgaggccttgtttgattcatccccttaccccagtggaactcagatattcaaaatggtattaattaaaaccactggctgtcattggtccatgcatggccttaaagtgtgaacattttttaatccattacctagtctataagaactgtagattgacaacaacttagatttaatactactct

SEQ ID NO: 586064 - DNA, 4001 bp, Homo sapiens
caacaccaatgcagagagaactccatagggacatgtcataagcctctatccttaccctgatctgttcaatgacaggtaggaagaaatagaaggaatattcatcaaatccgctagtggcattaagttagaaaggacagttaaggcactgaataactaaattaggattcataatcattctgaaagcctaaaacatgtgaccaaaaaattgaacagtcataaatgtaagtcatgacattaaggataataataattccattacacaaaaatggtgtaaatctagatcactgcagtttatgtaaaaaagatctaaagtttacagtacatcactgatagtttttaaagcaaatgtgatctaatgccaaacagcggaagtataatccgagtcaaaggaagtagtacattatcctctcaggtacttttcaaagcacatccaaagagctatgtttaccattaggcactgcattttaagaaaaatgctgacaagcaggagagttttcagagaaaggtctagatacatcacatagaccaatcaaaagaagtgaggctatattgcttagaaaagaatttatgaggaggagttgtaacagctgaattcacatatcttaagggcagcagtgtgaaagaaagaacagacagtttccttttctttggaggactaagaactaagatcaacacaaaagttacagggacaagtacatctgtttaatataagaaactaaaaaagaaagccaacaagggaatagtctgcacccaaaatggcgagtttaatgccacactagttcgggcatagggttgacagacagccgtctgccaaggagatttcaaaactgactctttcattgaagggataattgccaagatgtcttctgacttcaagattataattttaatatttaatattcagaagtcatgtggggatcacagatattctgaatgattatgtcttttcattccccaatggaacgaaagaaaaaaataaactcctctcccaagtatctctctataaaacagaatctctccctacaatgtaattcggtttctttgctaatccctaagcataccgttccttccttccaaatctcctgctctgatctcaagtatttgatactccagtcatgactgttctcaagcctccatcaccccgctctcccccaagtcgaccccactaccttccatctcaggagctcatcccgttcctctggaacttgaacaccagggttcgccaggcagcgttccttcagctggtatctcggtctaggactcagatgtctaactccccttgcagggaatctgcaacacgctgaggttgtctaccctaaaagacacaggatggcgtcagcagcatacgtcacacaatcacacatcagagtcttgcaaagtgaccaagaggtgctacacaagagaagtgccccaagagagcactagagaggtgtgtggcactccgatgaacaaaacagagtggagatcgggtacgcgggttctgcttcagatccaaaaaacccttggtgcccaccctagaatctggccggggcatccacagacctggtgtgttccctctgtgcacacttgtgactcacacccctgcgagctcggataacacgaagacacacctgttgcagagcgttaaagctggaaggtggacaaacagggcggggcccggcacccgacttccccttaggccagaacaaaagaacaaagccctccaagggatcagggcgggaccgccccgcacagaaggaggcgaggtgcgcccccttcgaggactccccagctttctcctgcagaggcctctaagcgcgaaatcagaagggtgacgtcacgagtccggagggctggctgttgccatggtgatacctgagctcccctccccctatagcgatccacacactctgatcccgggtccggaagcgcattgaccgccaccagacctaacgcagggagccgaagcaactggacttccagcgcgccaacctctttccacgcctacaaccggcttcaacggtcacttccggtcgttacgagcgagccccgccccgcacgccggcgccgggcgggcacactggaccagcgttcccagaacactccgcgaaggtgttcctgaacttcatttcccagaggctttagctaacgtgtactttcgccctgcgatgggccgcacattttcgccgccagtcttttgctcctgtttcaggtatgcgtgtgcattgtaaacttgtctgactgaactgattataagaaatgcacgtctactgaccgagcgcagtggctcacgtctgtaatctgagcactttgggaggccgaggtgggtggatcactaggtcaggagttcgagactcagcctggccaatatggtgacaccccgtctctactaaaaatacaaaaattagccgggcgtggtggcgcgcgcctgtagctactcaggaggcagaggcagaagaatcgcttgaacccgggaggaagaggttgcagtcagccgagatcgcgccactgcactccagcctgggcggcagagcgagactccgtctcaaaaaaacaaaacaacaaaaaaaaaaaaaagaaagaaagaaaagaaaaaaaagaaatacacgtctacacacagttttaaaacgcaaacaatcgttacctttattacatgttctaccttctattttctgttctactcttttgtcgttttgaaaatactggtagttacccattaaaattgttttcacgactctcaaatgagtggcgaccaacttttttttttttttttttttttttgagacggaatctagctctgttgctcaggctggagtgcaatggcgcgatctcggctcgctgcaacctccacctcccgggttcaagcgattctcctgcctcagcctcccgagtagctgggattacaggcatgcaccaccatccccggctaatttttgtatttttagtagagacgagggggtcaccatgttggccaggctggtctcgaactcctgacctcaagtgatccgcccgcctcggcctcccaaagtgctgggattgcaggcgtgagccactgcgcccggccccaacatgtttttctaatgcttaaggaaacccggagataatattcccatgttttgccacttagtaaagcattttatatgcctgtgtcagcgagcacatagctgcaagtgtagcccatggccagtctgtcactgtgtccttggcagaaaaaaagaatccaacaaatcggtaggtttttatatttaagacatggcacttgcattttattatgctggcgtgcatccccagcatttggataaggggccaaggtcaagtctctcagactgttggctgacaaacattaaacctggaaatcctaacagagtgtatgaaaaacaattacagtcaagggaacatgatagagaaagcttcggtcatcttagagaatgcatatattgccatgaagagaacattggtttaaaaaaaaatgttcaagagaatgaaaagacaagtcacagactgggagaaaatacttgcaaagtacatatctgataaagaactgatatccaaaatatataagaactcttaaaactcaacaataaggagacaaaccgattaaaaaaataggccaaagaccctaacagatgtcaccaaagaagatatgcagatggaaaataagcatatgaaaagatgctccacatatgtcctcagtgaaatgcaaattaaaacaatgggatgccactatacacctgtcaaaatggccaaaatccagaaccctgacaataccaaatgctgacaaggatgtggagcacaggaactttcattcattgctggtgggaatgcaaaatattagagttacgttggaggacagtttgacaatttcttacaaaactaaacatactcttaccatatgatctagtaattgtgttccttggtatttatgcaaaggagttgaaaatgtatgtccacacaaaacgtgcccaagaatgtttatagcagctttgttcatgataggcaaaacttggaagcagccagatgtc

SEQ ID NO: 586065 - DNA, 4001 bp, Homo sapiens
agtaattagccttaaaactatcagtggacactattaggggaaaatgtctttcagcaaagctagactttaatagttttcactgattattatataaaaactgattcgacttacaaatgaaatacttcctattatgggtatcttagagaaatttttttatctctaaaataaatctttaaagaccaattaagaatgagtgggtactgcaaagtagagaaactgagaaatttcaacaatttttaaatattaaaattcaaaggaatgagactttaattttgccacaggtactcaccagacctatttacctaagtagggagctttcacattgcacatcctcctagacgtcaccacttgatctcacagtttttgtttttaagattatgaacagccatcaaataatttgtgacaataaagtgcatacagcaacggagattcttttgtatgtgatcacgtatccccgacataataaagaaaatatttcaatatttggaagctaaaaaataagtgaaaatgtaatctactcagctaaaatggtcaaccattgttctacgttaagatcagtatttttccaaaacgaattctctgtaatgatacactcacaagttaactctaaatatgacctgtgtaaattgtgtcttctttttcctcctcaagacaatcaaatcaaagtcttcaccagagccagcaacactaccttgaaattttaaacctaagtgtaaggctcgtaatgaagtgcaaatgtagtcccaaactctccgattttcaccatggatgaaatgattttcatcactagcaaacagtgttattaacattccaaattctggttagaatgcagtcactggtgagcagtgcccttgggcaagcaaagaaaagatttgaaactacccaaagcacagatccacatgaacctcagtcttctcccacttcatcaggaagccaaataggaaggactccaagaaacaggggtgagggggtgatcgggacagaaaggatagtggaaatcatactcctcgaagggcgaaagcaaatgagaaacggactctggaaaaaccgccccaaaaggacactcaacctgagacagatgtacaggcacagctcctctacactaaggagataaagctttaccacagaagtgatgcaccaagcaagcaagtatgggcaggaggggacaacctccgccaagcaccccctcccgaacgtctagctcaactagaaggggtcggcggggactgctcctccgaacatcaacaaaggccccttcagtcctaaggcgaaactcgaacaacaaaggcccggagacagccaggacagggccggggctggggggcgggacggatgaaagcaggggaaggcaaaggaatcaaaccagtgggggcggaggcccgtcggagtgggaagcagaggcgcagaggcgggaggcgcggtaatccccagtgcacaataaaaggaggaggaggaagagaacctggcctccattctcctactctctccaatccgcaccgtgtacatttcctcagccgcggggaccgcgcagtcccgagttcagggaaggaaaggggaggggggattttccgccttgaccgcaactcccttcccccagccaggagctgcagacgacaacaaccgccacaactgcagccacacaaaggcgccttccttctactcccgctcccacccaggcggaggcgccgatgatgccaaggaagcggcgaccacctctcggccgcctagcgctcgctcgccctcttccccctctagctggggaaagggggaggggaccaccgggcgccctcacctggcacagctgctgacagtagtcggtggccgcttccacggccggtacccggctctcccgcagctgtagctccagctcctggagccgctcgcccaggcgctgcagctccgcgacgcagccgccttcgccgcaactcaacctctcctgctcggcctcttcgtccgccatcttcacaccccgctccgtcgcgtacgcacctgggtcacgtgataacacaatgccacgttcggcggggtcacgtgccgggcgcgcttgcacggcgccgagcacgtacaaagggcccgatggggaagatatgggggtggggagagtggcgcgagagagcccgagggaggtgaaggcaaggggaaaggagaagggcggggttggggcggtgcggaaaacggcggtttacttaccccgagcgggaagtgggcagcagcggccgaaaggggcgggctggtgaaggcctgctctcggtcacgtgggcgccgcgacgggaaaaagcctagggaggggcgaccctctccggcgtcccgatcccggcgtggctttccccagtccacgaagtcttctacggacatatcctcctgttccccaagaggatggcacagggagagttctgagtggtctcgggcaatggctgcatttgctgttggcctgtaagcaggccagaagcagaggaagagagagaaggtaaaacccgcccatggaccgcaagcgtgagagccaaggcaggactatgaactgtcaaaattgtctctgacttctcaccaggccggagaggagggatctagtgcgtgaggtaccagatctcgtctcacttgactctcctcctcttcagcaccaagaacgcctgtcccctggaaacacattctctagggggtggaggcaacaaaggaaaagaacaattgggtcagagcagaatgaggttcaatcctcagtctggagaacggagcaaattcatgaaaagcatagtttaaaagaagtcagaatatgaacagaccagatgacttttaaaccacgaaaacatttctagaataagtgataactaactactctgtttcaccgtgatttagactctactacactctacagaaatcaccaacaatgacaacaggctatatatgaaagctattgaaaagaaagtaggtcaaggaaaaaaaaaacaccaataaggactccattaaaaatcataacggaggagaggaaattgatgctaaaataaaacaatattgtcgagaattattataaatatctacagcatttttttttcctaatgctacaaatagaggtagcattctgaaccacattttacttacaagctgaaaagaattaatacttggcacttgaacaaaagagtagaagaggtgctacaaaaatccaagagcttaaccctaaagttcttaataaaactaatattttttttaccgttagagcattagacaaaagacctatctctcttgcaactgaatagtctacagaaatttagaaacaatgatattgatgaggcacccagtcttttcatttactctgagtgaagtatatttttttagtacaaggatctaaaataaaaatacttcccattgtgggcagcgtcctcttcaaaagatttctagtaattaatggaaagtgttctacatactatgttgtccagaataaatgttttataacgcatcagtgatggtgatgtttttaaagcggcattatataaggtgaccaggcacagttaaaccccttatgaaaaacagtatcagttaatattacatattaacaaggtagaatcttcaaatgtttaatcttcaaatgtttactcatggaagagactgggaagtacattcaaaggctgagaagagaggatataatagtatcactgagttgaaaaaggaacaattaaggcagctaatgatttttaatattttcagttcactttcccaagttaagtattttagatacccaaaccaggtttcaccagtttatgttatcttaggattccagtgaaaaaatgcaaaaagggaaatatgaggttagccaaatgtacccgtaaatccaaggtaaggtatcacaggttagcaagctcatttccacttcaagtataatggtttacaccacacctaatctatagaaagaaagaaaaaatgggggttgaggggtgggagacatatatatccagatattgatttttaagagaattgcctgataatgtaggtcattcctacctcttgcacat

SEQ ID NO: 586066 - DNA, 4001 bp, Homo sapiens
ctttctgataaattgctttgtagaatcttttacacactgatttttttcaaaatttaagatactgacagaaactgaatatttagttcctctagatattgatccaagcctcgtatagaaacaaaataagactttctataaatgctcattaatgaacagatttttgggccccagtgtggcattttccacccactctgtgtccttactacattctcagctgccgtgactcctgccacaatctcctgtgtatctcaccgctttcctgagggagctgggtatcctggcgggtccaaagcagctggcttggtggtcctgaactctcatccaacagcacaacctattgcaagacacagaatgaattcaggaaagttatgaaggtgagaaaaatacataggaagatgcaagcaaccatacaggtctatccacagaaactgtctcccagaaataccaaaagaagggagaaaataatggactcagttcctaataccttatgaaaactagaaatggcatctacaactacaaagctttaatgatcaccaggtcaagcagcaaaaacagtatctaggaggagacacctccaacagtatctagagtcagacacacctccactcacactgctttccttctttcttggactcacttctccttcttcctccttgtgatgtatcacagaccctcctcttcttacctcctgcatctttttactcaggtttctttaacagtcttccactgctgtcctggtttcttcctactggtcagatccagttctcaaacaagctgtgaagtggctccagttgatgccagcctcctttggagaacacatgttttggtggtgccagccaaagggcccttcttgacccacagtgccgctactgtttggcttaatgtgtcaaacactgccctggatttggggttcattagcaacactaaaccgctgtgatctcacatcttgtttccctgcatatttggtgaagggaaaagaggaatgtgaccacaggaaaaaatagggagtcactgagaacctgaggcacgaagtcaaactgaaaatgtgaacatatccagaatacaatctcaacggctaccacccttgtctgagccaccatcacctgctatctcccctcctttccattactgcggtagtcttctaactggtctcctttcttcaatccttgccttcctcctttctttttttttttttttttttttttttttgagacggagtctcgctctgtggcccaggcgggagtgcagtggcgcaatctcggctcactgcaagctccacctcctttcttaatagggcagtctgagtagtccgtttacaacttgagttggatcatttcatcgctctgctgaaaactctccagtggttcatacttaaaataaaacctgaagtccttaccgaggtatacaaggccctactgaatgtgcccgtgacttctaacttcctctcctgctcacccaaaataagagctgaagtcttaagagtggcatacaagtctacaggatgtgtcattctcaacaccttctactcttctcccactccctcaatcttcagccataccgaccttccttctctttcatcttagggcctttccattggctgctcccttcaccttaagcgatctccatggctaataatcttgcctccttcaagtgttttcttataggtcatcttcccaaggaggtctactctgagtgccttatttaaaattgcagcctatcccctccttccaatcctgatgggccttaccttgctttacatgaattcttcttttcctctatagcactttataattttccagtatggtgcataagttacttattaatatatacattgtttacggtggttctaccttcgctaaaatctaggctcttaggctccatgagggcaggaatttttgtcgtcttgttcacagttgtattctcaacgcctaaaacagcgcttgcaatagtatgtgctggattaaaaattagctgactgaatgaatatatgaatggatgctgtagagaagaataaaaagaatgggtcaggaggcgacaagagcaagactccggtctcaaaaaaaaaaaaaaaaaatgggtcacgagcccctgggaggaggtagggcaaatgggcgggaaatgctcattttggggaatggcttcgagggaggaaaccgcagccgactccctcctcaaatctggccccaaagacccgcccctgcctgcaaccccaggggcccgggtatttaggtgaggggggcgacggcggcaccggactcctctcctctcagctgcaaattccgacccacgacggcccaaggcacagaccttcccgccggtactctccccaagaaatgagaaacagaaatatacagaagctccacttcctagtccgccaattatcatttccggtgattttctaggaaaggcgtcaactctctggtctaggcgttcccttaaactctccgccctcctcctcgcggctcagccttctaggagtttgcgtgcgtttatggcctgtgcaaaggggttgcagaaatattacccttttgctccttttttcccatgtagaggaacctctagataggaatggacagaagttttgtgacaaatatatgaaaaagttacttttaaatattaactaagaacacaaataattgaatgtctttttcaaaagtaaagactattttaagcctatgcagaagtcgaaagaagagtataattaacccatatatacccatcatttacatttaaaaatacataaaattctgccacacttgtttcatccatctccattttttcttgctgaaacgttttaaagcaaaccccaaatatcttactttcaacttcattatgcatttattttaaaaaggatattttcctacagaatcacaataccattatcccatttaacaaaataattcctggttatcatctaataccaagtccatattatatttccctaaatatatacatatgcttcttacatttgttttctatttcattcaagatctaaagttccagtatttaatttgggcatgtgtcttaattcttttaaaattcacatctgaactagttcctccttccatcctcctcttcgtcttcccctcatatagtcaactaattgaacaaattgggacatttgtcctgaatgttctacatgctggctttgtctatttgtgtccccattttattagtttctctagcctcatatttcctgtaaaacttgatgttacctctaaaggtttgattagagttaggtttaactttgttagtaagaatccttaggtggtgctatgtactttttgccacacatcaggaagcatataatgtttttgatgctaagattgaccagtgggtttaatacttgatagctgaatccttccatgtaaactttcccactggcttttaatctgatagattcagccaccccatttcattagagtttgtaaaattgtaatttttctaattcaataattttttcacatttattagttagaactcctctataaagaaaaactttccttcatcaatttagcaatttagggctatttggttatcctgaaatgtagtttgtacaggaaagaaagactgtttaattttcaacataattgccaattttcagaaaaagcagttgtgccttaggtgccatcaatggtaaccaccttacaaaatgtgatagccatcctataaaatggctagctgggccctactgtccagcattcacatccttgtgtagcccccttccacattgtaccagggttggtttgtgtgactgaatgatctggtaaaagtgatgctatgttttgtttgtttgtttgtttgtttgttttgttttttgagacagagtcttgctctgttgcccaggctggagtgcagtggcgcgatcttggctcactgaaatcgccacctcccgggttcaagtgagtctcctgcctcggtttcccaagtagctgggactataggcatgcatcagcatgcccagctaatttttatattttagtagagatagagtttcgcca

SEQ ID NO: 586067 - DNA, 4001 bp, Homo sapiens
gagccaaatgcaacaatccatgcaagaggtaatagggcttagaccagagtgatggcaggaggatggcagttttggggatgtattctagaggtaaagctaacgggttagacagatgaggtaatctgacaaattagatgtgggaagaagggagataatggctgtttctgatgtaagcaacggatgatgctatttactcagacagaaaagactggagcaaatacattgcgcactggagaagaaaaggaggttgtgtaaacaagcattctgttcttccttcctctgtagtgactgccacccacactggcactgctcaactggaaatcttaacatagtgacaaatcaatttaaccatgaccaaagtactcacagtacttacatacatgttagagagccactcaaaaaagcagaactttgttactaagtttaaaaaaagaggccgggcatgatggcaggcgcctataatcccagctacttgggaggctgaggcgggaggattgattgaaccccggaggcggaggttacagtgagctgagatcatgccattgcactccagcctggggaacagagtgagactctttctcaaataataataataataaaaagattgatgaactaaaaataaaacaaattcccaaaaaccagactctacctagaggatctcttggggtggtggttatggttaaaggtcaacattatttctaaaactaaacttaaactcatgctccgttcctctagcagtgaaacatagaggttcaaatcatggatttggggaaccaggcggatctgagttgaagcacagctccaccacttagccgtgtcacctcagtcgagttacttgaacctctctgggttggttcctcggctgtacaacaaggaatagtattaactgcctcacttcaaagacttgtgagggttaaaataatgtgcaaagtgaaaggctaggcataattcctgacatagaactcgataagaggtagtggctatggcagtgactgtggtcctgcacacttcattccgaagcagcagctccaattcatttaagctaacagtttacactctagacgtaaagcctggtagggttcaagcgtccctaactcgccacaaaaacggacatttcggctttttcccctaagatccaggaaggcagctcaggtgtaaggggatgaaaagtacggaaccccgaggacacatcaactctacaaaaagtaccaagacacacggtttggacgaaatgcccctcgccttggcaaactttccacacctcacccggcatgagagaaacagcctattcctaaggaacggagcgcgcactcccgacgagacgcccgtgcgctcccgagtccgttattgtgtcaacgctcccgggtctgacagaagcctccaggctcggcatccccgagggagttggccggaggcttcgcgcttaggaccctggtctggaggccccgggcgtttctggaaacgggaattccgggggaggggactgggggatggagggagtcctggacgaggggtgggattacccggctgccgctgtcgcctggatggtctccgcggccgtcccgggcatagtcggcgcgggactccccccggctgctgcctctgaagccggccgggcccggcgggaagagtcgtcggccccgcggtggcgacggggagccgcgacgggcccgaggcggggacggggagacgcgacgaccccgtggcggggacggcgaggcccggcggccgcggtgccctgagggcgagcggggtcggcgagccggggtccgcgacgaggagccggagggcggaggcggcggtgagctgcggcgagccgggcctgaggaggagccagagctgcggccgctgcgcgggccgcccccgccgtcgtctttaggccggtgggaagagacggaggagcgagcgctgctgcggtacatggttcttgcagcggcggccacggcgacagctctgacccgggggcgccctagacgcaggctcggagcgcgccgccgcagctgcagccgccgccacctcggccgctgcgcgccgcctcagccgcgggagcagccccctcccctcggccccgcgtcgccccgggggcccggccgagcgcgcccccgcggctggcggttggagggcgcgagcacgcgtccgacacacccccccccgcctccggggttccccgctcctccactcagggagcggccgcaggaaccaagaaaagtggggaggagcacagacgccggcgcgaggctgggcgaggggaggggaagcgaagcgcgcgccctgagctctgcacgccccgcctccgaatcctcaagatggcggccgcagagccgcccacttccccctcccgcggccgccacgtgacccctgtggcctccgcgcggggtgggcggagcggaaggaagggcttctctggagagggatctggttttccggggatgctccaggcctctggacttaggggtttggagaccgtgcggaggtgtcttcgctctttcgtgccgcccctcaagcctcttaatttagggatggacacgaaatggttgaaaaccattcgtgataatataaacgggcctgtaaacgttagctgtgtgggaggttacggaccccggcaggagcgcccaccgaaatcctgtccccagctgaagcaacacgacccgcatcagtttactttccagtttgcctaatttctagaggttgaaattgaggataggaaagtacgaggtggaggtggtgggccagaatcaaacccaaaatagacgttgtcaggcctctgagcccaagctaagccatcatatcccctatgacctgcacgtatacatccagatggcctgaggcaactgaagagccacaaaagaagtgaaaatagccttaactgatgacattccaccattgtgatttgttcctgccccaccctaactgacaggatatattctcccccttgcccttaagtaggtgctttgtaatattctcccccgcccttaagaatgtactttgtacacctatcccaaacctataagaactaatgataattccaccaccctctgctgactcctttttcggactcaacccgcctgcacccaggtaagataaacagccttgttgctcacacgaagcctgtttggtggactctcttcacacgttttcgagctgttttctgactaaagtacttgtggtcatggtggaggtccttcattaccaggggcccacatcatgaccaactggaggcgtggcaagtttttgtaagagatccaggcatgccccctcccctggcctaagtccagaattttcctagatgccaatctcagggccctgcatcctaaatacaaaagtgggccaggcgcaaagggtcacgcctataatcccaccattttgggaggccggggcaggaggattgcttgagcctgagagttcgagaccagcctgggcaacgtagaaggacctccatttctaaaaaaaaaaaaaaaaaatttgccgagtgtggtggcacgttcctgtaccccagctactcgggaggttgaggctgcggtgagctgtgatcatgccactgcactccagcctgggtgacagagtgagaccctctctcaaaaaatacatccatatatatatatatccatttccatacgttcttataatggcatatactcagtaaaaatgtataaaatttttactagttgactacttttacccagcttcacattttatataatttatataaaataagaaaccaataacattttaatgaaaaaaataataaaaatatgccagaggtgtatgccctgtctttattagagtatatatggattttggttacccatacttttggtgggacttaataaatgtgaaaaaaatgtaaatcagtgtgtatagatacttggagtcaataaattttaaatcatgtttgttatattctgtatcaacttttactcctcaacccatttctaatactgaatatttttatcaaaggagctggggtgtttcaagacagggggagacacggtgtataatca

SEQ ID NO: 586068 - DNA, 4001 bp, Homo sapiens
ccagtagctgtataacagactagaccagtagccctggctggttcatctagcaagcccaaatacatctttcaagtcttagctccagggtaccctccttcaggatgcttctcttgccccatcctaggaagagactagtactctttcctgcctagggtcgaagtgaaaggaataaactggaacacgacaaaagtccaagcagacaggctaattcatacaacttgagagttcatggttatccttaaagggtatatgggaccaagagacaaagttagtaaagcattatttaaaaattagatggtgtttataggccttagacttggaaatttctcatttatttttcattgattacatggattatctcatttagtcctcccaaggaccctatgaaataggtattaataccagtgtttggatcttatagatggaaaacctgatgcttagggcagttagataatcacccaacaacttacaaatagtaagcagcagagccaggatttcaatacctatcttctgactccagagcctgcctaagcattaggcatactaccctctttgtgctacaaatcaatcaaaaagcaattactgcaagcctaatgtgaatatgcatgcatgttgaaaaggagtagaaaatagccttaagttggtaggatagggctcagttttatcactctgctatcttaggagctaagaaaggggcattctctttttccatatatcttctcccatactttcctgtctttcaccctgccccaccccacacccccatccacatttatacagaaacagagcctggtataccacttaccgtaacaagaaagactcaagaccatcttccttttggtttcaaaaggtctctagttcagaactattcacaacactcaattcttgcctctcctagaggaaaaatcaataatgtagacgatgaccttgtgaaatttataattcataatttttctagagctggcctagaaaactggtcccatttcctctccattctagtgagcatccttcaaccatagcttacctcttcccatctttgcttacactgtttctcctgcaggaagtacctgccactggtagccatcagttccgaccagctctagacaaaatgtcaagaatctttctattactaactgtaacttcataacaaagccctaagcctcgtttttcgtttgttttttctccttctgctaattgtttttgtttgtattatctcaactcctaagatcaaagacccattcgtctaccactacaaaccccaaagtgcatgtgataagtgtatataatataaagttatctgtaattccattttccaaaaagaaatggttataggaagattaaacaaaccagatttttctgcagatagattcaactgcaacataactaatttctgcactgaagatgaagcgaaaaatccattcaaggtcctttttttcctcgatatatatgaaagattatattgctttgaaaagtgccttgcagtgtttactatctctaggaactaccgtactaaggttctcttctttcaacttttcattgaccatctttcagtcctccgtccgccgtcagcggagaccagaccatgctcagtgtccaggaacaggggctgctcccactcgactgtggccgtgggtcttgggtcccaccgcgcacccatcccacccctgggccccgcaggccgcgcttaccctggcagccgccggcgccgcccctaggcctggggacagcacttccggttactctccggacactcgaatctgggcttcctggcggccgcagactctgcgatagtagatctaagggccaggcttcgggaaggaaagaaaagcgaacccggcacggacaagacctaggagcaactcccttcgtgcgcctagactagaggagttggggccaggccgcccacagagcgctttaacagagcgcttcaagggcccacaaggccggctacgcaaaccctttcaagctggctgggaagaggccggcgcagccccacccccgcaagtcacatgatcacccctctccggccactagggcgttccaaccccggcccctgggccaataggagccgagtcttcggaaaggggcggggcccggggcgcctgcgctctgggagccctcggcgttttggtgggagggggtcttgctggcgcagtggaaggccggctgcggggggaggcgatcgctgccaccctgtctaagaagaaacggcaccaacagcgttgcagtttatgttacagtttccccaaggctgttaaccgaggactcaaaccaggagtagagtcacaaagattagatgccactgaccctgagagaaacaccaggaaagatctgggagagatagaggattctgaagcacagtggcagcgctgtcatccacgaagatgtggccagcgagatggaagaaatgcttttaaaagtggtggacttgtgtgggtggagaaaacagcagcgagagaaagtactgtgggaggttccccagtccttgctgattatgtttctgatttggaatcagctaagagtaaatcacctagtggtggggctggaacagaactcagttctttaggttgaacactgggtattctcccagctcaattgttaaattaaaaaaaacaaaccaacaaaaaacagtttttaaatgtcctcagctatcaaagggaaaagatgagtagtaggaatatggaaaactaaaccctgggcagcctggccaaggacttggattgtgagccagttgctgaggtttagtaattggggagcgcagtctctgagacacgtattcagtattaactaatcatgttcctactagtggaattcttccgcagagggtctacagcttattctactttcatgtttatttttaatgaaactttcaaggtcaaaatattccactcagggttgtcttaatattttgaataataacattttgagtgtgtagcatgtatcaaacactgttctaataactttacactattgtctcattcagttgtaacaaaaatcgtgtgagatatgtattcttttaggaggaaactggtgcacagagagattaagtagcttgcccaggatcacatattactgatgaagctgtaatgtgaacagtctgatgccagattctgtgcttgcagtcactatacttatggctacctcaatagtggtgagtgtattgtgtaaaattattggaataaaaattaagcaagttggattctgatctctgcactgcatataacaaggtctgaatatgtgtagaattgaactgttcaaccttttctttcaggatacattggcccaaagtactctttattaattgttttattcagttaaacatttattgagcacctccaattaacaggacaccataggccgggcacggtggctcacgcctgtaatgccagcactttggaaggctgaggcgggtggatcacctgaggtcgcgagtttgagaccagcctgaccaacatggtgaaaccctgtctctactaaaaatacaaaattagccaggcgtggtggcgcatgcctgtaatcccagctacttgggaggctgagacaggagaatcgcttgaacctgggaggtgaaggttgcagtgagccaagggcactccagcccgggcaacaaaagtgaaactccatgtcaaaaagaaacaaaaaccaaaaaaacaggacactatgctgtgtgttaggaattaaaggccagtgagactcaataccactcctttaatggctcacagtctggtatggagacggcaggggttttaggtggtgtggtagaggtagaagttgtataaggtcatctgggggcatagaggtgaagcactttgtaagaactttgagaaagagtcagaaaagactctgtaggagatgagacataaggtgagactcgaaggaatagaagtaaggagttggctgaagatgagcctgaaatggaagatggaaaataagtacagagacatttgaatgtgatttcagttagtggaatttatcttatatgaaatgggaagcaattcttg

SEQ ID NO: 586069 - DNA, 4001 bp, Homo sapiens
aatgaatttgaaaactgtgatggtgtatgtttaaggaaagatgctgtcagaggatttatgagtctcccttcagcagctgctgctctagagcatggagagatgcattctttttcctggctttggaggatgtatgtaagatgggaaaaggaagtctagcggatgtgacaaaagtttcagggatagcccccaaacatatttcagagatgctaggaggttagggctatacctttatccagagtccatccaagggattcctccaccataatgtggaaagttgcctctccttttctcctttcttcctcatactttcattatttgagtcaccttactgctctctggatactgtatccctacaaaatcattattctcttaagtggtcacaacatgctgcagccctagccaacctggtggtttgctattcctttatgtgactcaaactttttagcactaacagcgctggccaccacagttaccctaattatctaaaattcttttgacattgcttgtctctcctataatcaattcctgatccagggataattctcctttattttctacccccttcagaaggaagaaggttttgaagggtcaggaatagggcttctctgggtgctttgttttgtggcactaggttgattgcttcctggagcctttgccaatccacaaagcaatcagcagaactgcctgggcagcctcagtttaatcacagaatagagaaaatcttgtcctaccaaaggtgatcttcaggtaacaatgttcccagatattggctcaaagcacaaactcacacataaagcacaaactcaatgatccacagtaactgtcaatacacccacaacaaataattaacaactactttattcaagtaccaaccttcatcatcagaaacataaactaaggactggcactcaagcaagtacttctcttttttgggggggaggggcgcggagtttcactcttgttgcctacgctggagtgcagtggcgtggtctctgctcgctccaacctctgcctcccgggtacaagtgattctcctgcctcagcctcccgagtagcagggattacaggcgcgcgccaccactcccacctaatttttgtatttttagtagagaacgggtttcaccgtattggccaggctggtctcgacctcaggtgatccgcccgccttggcctcccaaagtgctgggattacaggcgtgagccactgcgcccggccaagcaagtacttcatctctgtgtgcctcaatttccttatctgtaacatgggcataataatagtacattacttcatagggttgatgcaaggattaaatgagttaatgcaggtaaaaactcttggagcagtgcctgcactcagtaagcacctgggaaacaccccagtaccgaagacctccctcgcccagctagaggggaagcagggagcaaccctgctctttttcatctcccagggatacacccggggaaaaccactggctgtcactgccgcagagggactaggctggcccgccagtgagacgagcgctgggggcttcatgaccccacgccacgcggcgtcccaaccgtggaggtgcctcctgacccgacctgcagccaaaccacacgcgaccctttcgcccgtttccttcgaagaacccgtgtttccgctttccagaacctctaagagcacccaccttggtcccggggccctgtaagcctcactcaccggccgcctccggccgagtacccccgacacaccccgggcgggtcccgcacttggagcggaacctgagtgcgctgggcttggggaagtcggaaggattaaagagaaacccatgcgtcgaaccgctgctccaacgcccatcaggttccctaagatcacaggcactcttccactcagactgctgctgatcatgctctgctcggtatgcgggaccagtcattgtctgggcagtcgcctggacctaagtctcctgacgcggacgaccagttgcaaaacagagaccacactgagactgagcaacgtatcagcagcggtcgcagctctgcgcttgcgcctgagagccagctacagcagggctgtgctgggattcactttcgtggaaggttttgcaaagcccctcccctggtatgcgagaggctgagaggttggcgctagaggcaagaggaagggggtctgcgagaggtgccgaagaccaccttaatacactgcaaagtatagcctagaccggtggttcacagagttttaaatagcgtacacaaataaatcaccaagtgagcttgttaaaatacagcttcacaagatttacactccgagattgactcgttggcccggaacattgcattttcaaggggcaccccagatgattctgatgcaagtggtctctccagcctgtctggagaaactggctccgttgcacaatctagttgcttaaatactgttaaatgcaagacatgtctcaaatttcaccaaaagaaaaaaatgaataaaatcaggacactaccctaatctagtagattttttaaaattccagataattttaatataaggtaatgaagttgcacaatgtgccctgggagttcagagcaggggaaacttatggaacgagggacactggagtggtttgactaatggaagatttaatggaaaacataaaggagggcaaccttacaaatagttgaggaactagaagagtggaaagcatgtgcaaaactgcaggtctgatacatgacagctgtgcacaagtaccatagaaacatcaagtaagtataaagcatgagccatgaagtacaaaggagcaggatccaaattataaagctggaaagaattagataaagtctaattttatcatttcctatttttaaaaattaaaaacactttcaaactgtggtaaactatgcacaacattaaagttaccattttaaagtcatacagtaaagtttttagcgtattcacaacagcaccgtcactatctaattctagaacattttcgtcatccctaaagatgcccattgagcagtctctattccctgctccccacagtccctggtaacctttattttacactatgtttctatgaatttgcctgttctagatatgccatataagtaaaataatacaatatttgtctatttatgtctggattatttttaattagcataaagttttcaaggttcattcatactgcagcatgtatccttcatgccttttaatggctaaataatattccttcgtgtatatgtgtgtgtttatacacaaacagtgtataaatatacatacataatattttgtttatccattaatctcttgttgaacacttgggtggttcctgccttttggccattgtgaataatgctgctgtgaacattggtgtacaagtatctgagtcactgttttcaattctttgggtatacacctaggcattgaattgctatatcatatggtaactctgcaatcagctttctagaggaaccatcaaactgttttccataatggctgcatcgttttacattcccatcagcagtgcaggagggttctagttctccacatctttgctaacacttgttaacttctgttttgttgtagttgtagtattataaccatcataatgggtataagctttatctcattgtggctttaatttgcatttccctaatggctagtgatgttgagcatcttgtcatgtacttatttgtgtgtcttctttggagaaatgtctgttcaaatcctttgcctatttttgaattaggttttgttgtgttgcatgagtttttgtatattccagatattcttcttcagatatgatttgcaaatattttctcccagtctgtgaagtttttctctcttttgatagtgtcctttgatgcataaaactttttaattttgatgaagctccatttatttatttttatcacctgtgcaatacttgaaaattacattgtctaataaagatttttatgttttctgctaagagttttatagttttgcttcttaaatttaggtccttgatccattttgggttaat

SEQ ID NO: 586070 - DNA, 4001 bp, Homo sapiens
tacaattcacccccatcctctactccaaatccgtagaagatcaaaatgaaaaggagagagtacaacatacactggtaaagggaaagaaattcaataaaacaatcttgtgaaggactcctaaacaaatctattaaaataccatacaaaaatgaattaccaaaatggccctaatgctgggaaagaaactgtttaataaccaattttacaaggtttcccagcatccaccataaatgcacatctgacactcaacgaaaaattctacagcttgaataccaaactgcaactaactacggcattccaaaagacgagttggggacagaaccgttttctgcctggcgagctgagataccactttacgcaaagcctttctaaaactccaataattatggaagaaaatcaccccaaaatacatcataaaacactctcttctgctttggaaacccatgctgtacaaagtgtgctcagaaatccttatgtccctgcacttgtctgaaaatgaagattcctaggcccccgcctggaaattctgattcggtaggtctgcagtggggcccaggaatctgcctgtttatacttactaaggcttgaaaactactgtctcaaagggaacaaactcagaaaaatagagcatgttcccagtgatgtaggattcttcattatgagcatcaactgtactatgccgtaacatgatgatctcagaggttagagaaatcttcaagctatttgccttcatgttagaagcaccataacgctaagattctgggctctcacaacccttcctgttttctacgtccttgctcatcattagcagctccttcctccgtgtcgcctttagaagttactcttgctccatttcaaaacagcgttttagacaccagcgtttttatcttaagtttaaatgaaaggcagggggcgagattaagtgtacagcacgttctttaggacgtgctctttgtgatggctacgggggtggctcagatagctcttttggtaaatttcccaatcctgcgccatgctccagtgtctagtatgtattagacactcatgaacattaaatgaccaggtgaggtaacattacataatggcccaccatagtcttttactctgggaaaaccccaatcatcattgctacttacactgacaaactgaatgtcgtcttcattttcatccgttgttgactcagatgcctcagggccagctggagggacagattctattatctataaaaacaagccaaaacatgcttatctgttcagccacattcgtgtaggaagagagcgtttccgaaaggaacaattaaagacagagagctcttgaggaaaacgaactgagcacaatttcacggaaacccgactaggaacggaactcgagctctggctcttgccacagagtgtgcggagctgcagggacccaacgctgaaaacgcgttagttaccagcctctcacaattccccttatctactccaggaggaacgcaagctcaacaccgaagggcaatcctgccttaaaacgtcgctcccactggcccagccgcggccacaacgaacgccagggcccgtgcggggggccgggcggccattgttgctgcgggttcctcgctcagacacgcaccaggccccagagctgggctcggcccaagacactgaagaggtatcgccccgaggctgcgacggagcaccaggcctcagaccgcagaaaacacaaacccttcgcggttcgcctctgagaacgccaggaccctcactcgactactcacctccgaccccgggtctcccatgtctccgacggccgcgctgacagcaccactgctcctgctgtccctgccgccgccgtcgccacgaatccccttcccgccctgcaccgcctggcgctaccgggacccgcccctgcgtgagcgccgacgccaccggcggaaagagacgcaaaacctcttcaaaggaggagcggcccttactggcccgctatgcccccggagccgctttctctcactcccgggcttccttccccgcgccgcgcaggatgctgggaattgtagttcgggtccgccccgagaccgcccctcgccggagaggaaaagaaccatgcgcctaaaagacgccagctgcagtgggtggggcgaagccaggggccagctgggtcctgtgagatagcgaagcactgggaagatgtgggaggatgtgaaggagggtttgagttggtatttgtttggttttggtatggttgtgaagcgcagctcattgatttttctgttttagccctgaaggtgggtggtgggaacggatttctctttttttcctttcatttttaaatttatgtatttactcatttttgaggacaggggctatgtggaggtttagctgaatcctaggatcaggaaagaatctgaagtatccttacattacacacctcttccctagcgtcagtctcccaggccctgccagtattaatacacctgaggaagaaaatagggatgggaaatccagggcccaataggaaagggaaccgaggtctacctaactatcactaaaccctagccagtgattttgaaatgcactttttcaatattctcagatatactgagagaatatgagagatctatttatagactgctgtaaggttgaccttttaaccttttgtgtgttcacactcataaaccagtctataaaatagatcttttatattcaactatgcatttaatctgttctcaggtaataccttaccaaaaatttaaaaaggttttttaaaaaaacacaccaatcgttgtcaataaagtttatgaaaagaattaagtgataacattattttaggccaggcgggtcctcacactctgggaggccgaggcgggcggttcacttaaacccaggaattcgagaccagcctgagcaataagagggaacctcgtctctacaaaaaatacaaaaattagctaggcgtagtggtccttgcctgtagtcccagctactcaggaggtttaggtaggagaatcgcttgaggccgagagattgagatccaggctgcagggagccaaattcatgccactgcactgcagcctgggtgacagagcaagacactgtctcaaaaaaaaaaaaaaaaaaacacaaattatttaacatctcagattcctgtttttgtttgtatgcaaaactaccatctgattgcctaagcctgtagtaattattgtttaatatttgacatttcctgcatttccaccaagtgctttatgactttagttactttctacctagtaagtttgagacttgtggaagccaattgagaatgacagacgtgcatggggagttcttcaaaagctgtgtgtaaattaaatatttttaaaacgttaatgtgtaggcaaaacttgtatttaaaagctcttcctagtgggctggtgaaagtgtcctctaatatttaatcagttgaggcaggagttaatgggtaaaattcttggaaaacaagcagtatgtggctagacccaaaaacttctcacaccatacaactcagtaactgtagttgcagggattttcctgaagatacatcacaggtttttttataacagcaaaaactggaaaatatctaaatgtctaataattggggaatgtaatgtttaaattttggtatgtatgctataaagataacattacagtgttttatctccactgaaaatgtttacctaacatttctcaaagcatatttttcaaaaattcaagaaatatataggataattagaaccatgttgtattcgttcttgcactgctataaagaactacctgaaactgcgtaatttataaaagaaagaggtttaattggctcacagttccacaggctgtacaggaagcatggctggggaggccttgggaaacttaaaattgtggcagaaggtgaagaggaaggaggaacctctttacatgggcagaggaggaagaaagcaaagcagggaggtgctacacactttttaacaactagatctcgtgagaactcactcattattagagaacagcaagggg

SEQ ID NO: 586071 - DNA, 4001 bp, Homo sapiens
tactccaaatccgtagaagatcaaaatgaaaaggagagagtacaacatacactggtaaagggaaagaaattcaataaaacaatcttgtgaaggactcctaaacaaatctattaaaataccatacaaaaatgaattaccaaaatggccctaatgctgggaaagaaactgtttaataaccaattttacaaggtttcccagcatccaccataaatgcacatctgacactcaacgaaaaattctacagcttgaataccaaactgcaactaactacggcattccaaaagacgagttggggacagaaccgttttctgcctggcgagctgagataccactttacgcaaagcctttctaaaactccaataattatggaagaaaatcaccccaaaatacatcataaaacactctcttctgctttggaaacccatgctgtacaaagtgtgctcagaaatccttatgtccctgcacttgtctgaaaatgaagattcctaggcccccgcctggaaattctgattcggtaggtctgcagtggggcccaggaatctgcctgtttatacttactaaggcttgaaaactactgtctcaaagggaacaaactcagaaaaatagagcatgttcccagtgatgtaggattcttcattatgagcatcaactgtactatgccgtaacatgatgatctcagaggttagagaaatcttcaagctatttgccttcatgttagaagcaccataacgctaagattctgggctctcacaacccttcctgttttctacgtccttgctcatcattagcagctccttcctccgtgtcgcctttagaagttactcttgctccatttcaaaacagcgttttagacaccagcgtttttatcttaagtttaaatgaaaggcagggggcgagattaagtgtacagcacgttctttaggacgtgctctttgtgatggctacgggggtggctcagatagctcttttggtaaatttcccaatcctgcgccatgctccagtgtctagtatgtattagacactcatgaacattaaatgaccaggtgaggtaacattacataatggcccaccatagtcttttactctgggaaaaccccaatcatcattgctacttacactgacaaactgaatgtcgtcttcattttcatccgttgttgactcagatgcctcagggccagctggagggacagattctattatctataaaaacaagccaaaacatgcttatctgttcagccacattcgtgtaggaagagagcgtttccgaaaggaacaattaaagacagagagctcttgaggaaaacgaactgagcacaatttcacggaaacccgactaggaacggaactcgagctctggctcttgccacagagtgtgcggagctgcagggacccaacgctgaaaacgcgttagttaccagcctctcacaattccccttatctactccaggaggaacgcaagctcaacaccgaagggcaatcctgccttaaaacgtcgctcccactggcccagccgcggccacaacgaacgccagggcccgtgcggggggccgggcggccattgttgctgcgggttcctcgctcagacacgcaccaggccccagagctgggctcggcccaagacactgaagaggtatcgccccgaggctgcgacggagcaccaggcctcagaccgcagaaaacacaaacccttcgcggttcgcctctgagaacgccaggaccctcactcgactactcacctccgaccccgggtctcccatgtctccgacggccgcgctgacagcaccactgctcctgctgtccctgccgccgccgtcgccacgaatccccttcccgccctgcaccgcctggcgctaccgggacccgcccctgcgtgagcgccgacgccaccggcggaaagagacgcaaaacctcttcaaaggaggagcggcccttactggcccgctatgcccccggagccgctttctctcactcccgggcttccttccccgcgccgcgcaggatgctgggaattgtagttcgggtccgccccgagaccgcccctcgccggagaggaaaagaaccatgcgcctaaaagacgccagctgcagtgggtggggcgaagccaggggccagctgggtcctgtgagatagcgaagcactgggaagatgtgggaggatgtgaaggagggtttgagttggtatttgtttggttttggtatggttgtgaagcgcagctcattgatttttctgttttagccctgaaggtgggtggtgggaacggatttctctttttttcctttcatttttaaatttatgtatttactcatttttgaggacaggggctatgtggaggtttagctgaatcctaggatcaggaaagaatctgaagtatccttacattacacacctcttccctagcgtcagtctcccaggccctgccagtattaatacacctgaggaagaaaatagggatgggaaatccagggcccaataggaaagggaaccgaggtctacctaactatcactaaaccctagccagtgattttgaaatgcactttttcaatattctcagatatactgagagaatatgagagatctatttatagactgctgtaaggttgaccttttaaccttttgtgtgttcacactcataaaccagtctataaaatagatcttttatattcaactatgcatttaatctgttctcaggtaataccttaccaaaaatttaaaaaggttttttaaaaaaacacaccaatcgttgtcaataaagtttatgaaaagaattaagtgataacattattttaggccaggcgggtcctcacactctgggaggccgaggcgggcggttcacttaaacccaggaattcgagaccagcctgagcaataagagggaacctcgtctctacaaaaaatacaaaaattagctaggcgtagtggtccttgcctgtagtcccagctactcaggaggtttaggtaggagaatcgcttgaggccgagagattgagatccaggctgcagggagccaaattcatgccactgcactgcagcctgggtgacagagcaagacactgtctcaaaaaaaaaaaaaaaaaaacacaaattatttaacatctcagattcctgtttttgtttgtatgcaaaactaccatctgattgcctaagcctgtagtaattattgtttaatatttgacatttcctgcatttccaccaagtgctttatgactttagttactttctacctagtaagtttgagacttgtggaagccaattgagaatgacagacgtgcatggggagttcttcaaaagctgtgtgtaaattaaatatttttaaaacgttaatgtgtaggcaaaacttgtatttaaaagctcttcctagtgggctggtgaaagtgtcctctaatatttaatcagttgaggcaggagttaatgggtaaaattcttggaaaacaagcagtatgtggctagacccaaaaacttctcacaccatacaactcagtaactgtagttgcagggattttcctgaagatacatcacaggtttttttataacagcaaaaactggaaaatatctaaatgtctaataattggggaatgtaatgtttaaattttggtatgtatgctataaagataacattacagtgttttatctccactgaaaatgtttacctaacatttctcaaagcatatttttcaaaaattcaagaaatatataggataattagaaccatgttgtattcgttcttgcactgctataaagaactacctgaaactgcgtaatttataaaagaaagaggtttaattggctcacagttccacaggctgtacaggaagcatggctggggaggccttgggaaacttaaaattgtggcagaaggtgaagaggaaggaggaacctctttacatgggcagaggaggaagaaagcaaagcagggaggtgctacacactttttaacaactagatctcgtgagaactcactcattattagagaacagcaagggggaaatccgcccccatgatcc

SEQ ID NO: 586072 - DNA, 4001 bp, Homo sapiens
tcaaggaacgagctgatgttgtatttaggaattactagaaaataaggaataaggagctgaggttgagtaagtctgggggaaagacaggcaatggagtagggttttgttttgtttttttaaactgtgggttcaaatcttagctctgctacttagctgtgagagtttctggttcatttctctgaaaccaaccaaccaaccaaacaaaaatatgggaagggaaaatggtggatataataataattaactcttggggctgttgagacgtaaatttaacttatatatccagagcttggcacacagtaggtattcagcaagccaatcgttattgaggcaaaatcagggtaagaaccagagaagtgaggctacagcagagatgagaagatagggattccaagatgtcagtagtagcaacataatgcaaggtatgggccacatgttcagtctgttaaatccctagcactcaggacagagtaagatccatagcagcttctcatttctaacaacagcttatgctaagggttcccatgagccaggcatggtgcccggtgctttacatatgttatgtcaggcactactattttctcccttcgcagaggtggagactgaagttaagacaggctaaataatataccaaaagtcccatagctgaagggccagaatcagtctggaacctaggtttgttatgaactcaatgcccccaaatgaagcactctgctatactgctttgcaaacatgttaactgatggggcctgatcaagggaaatgggtatgcactatgaagagtgaagagggtgatccgggaatgagggagtaaggttcatgatgcaagcagatcctgggatgaggttacaagaggaaatttccagggtggggtacaaaaatgattgcaaaaaattattatcttgactgagaactgcataatttcacaatttcacagacggaaggaaactcaaagatcatctaacccaacctcatcacagtcatgatgagaaactgaggtccagactgaggaggggacttctcacaggtccctaaagcacagcagtgacagagctgggaccacacactggattgactggattctggattgatccagaattctctgatgcctccaattattactacttcatattaatctctatatcctccttagcaccagaaaggtgctggacgcttgtaagtcatgtgctgattgacactgaagggctgggatcgcagagagagatgccagtgggggtgattttaggataaaggcagacgtggaacgagggtcatacggctacaggataaagatactgagggttgtgtacaaggtgagtgcgtggaaaactattggagtagggcttaggagtcgccagcagagttttgaggggagtcaccgagtttgtggggaacacaaggtagaatcgggggggttactgggccaggagggttacccaggtttgggggtcactaaggaggagtgtggggatctcagggtcatgtgagtcaccggattaaaactgagggagtcactggttggtgggtctctgagaagtgctggggaaattcctgggttagcagccaatgaataataaccaacggttacctggtgaggtcttggggtcagtgggtggggtgtggggtcacaagggtggaggcgggcgccgtcacggggtgaggtttgggagtcacgggggaggagccgcaaggcggaaaagaggggcagggaccctgggtgggggagggggcccggccgcggtccagcggccaggccgccctgctagggccggagggaggtgggcacgccgggctcgggaccttcccggggtcctgcgcccgcccggcctcccgccctgggcatggttggcccactcctcccgcagccaccaacctgacagcccccgagggcgactccgccgacagaccgccatgcaccgggccccgccaccagcgccggccccacaacccgcctgcgccatagcccgcccgcccgcgcgcagcttgcctcgcgcgatatccaggttccagggccgccgcactttcctttcctcttggcgcgcctctaccgggccccggaacccgtatagaaaataccgggcacggtccaccccgccccccgcttcgccgcggcagccatccaacttatcctggttccggggctcctggagcccaggcggccgggatctgaaccgagctcttcggagccccgcccccaccaaggccggggtgacgcatggccagcgaggctgagcgcccagggaaggcgtgctgacgtcacgacgcccgggtcagggcctgggcgcggctcggagccgggtcgtcgctatagcaatcgggaaccgctacctgtccattccaaggattcggtccagcagaagcgtgaggaggtggcggaggccccgagggctttgcgtcatcacttctgcggcctgcgggcgagaaggtgcgcttcgggagtagcgcgggaggacaggaggcgcaggttgtgagggacgcaggccctggggcttcggtctctgtcctccgagctcagagcctccaggcttcttcccggccgcgcgctcagcactcactgtcttacggtcccgaagcgctttaaggtgcgcagtccgcaggccttgcctactgatcttccagccaccccttgaaggaagcagttgcaggtattaagagctccttattgaaaaggacgatgtagaggggcggtgagggactcgcctccgcagggagggcgccctggcggtcttctcaggttctctctcattcccgcgtcagctccaccgtcaggctcgaaaccgactactcccttttgtaggcttgctttgggttgaacataaaaaccaagcccctttactatttccctgctgggaggggctgcgattgggaaattttcagaaacctgagggaaaattaaaagggagcgagctttcggtaaaaaatcaaattaaaaaggaggggcgttagagaaggaactggtaaagattgccttttaggagaggaactgggtggctggaagaatgaggtgagaaactttcccctctctatcctttcagactttaactggtttcttttgtatcttccccgccccgaaaacaatttaacttaataagaataatttttaaaggacgtaaactagacacagttacaaagtacggggtttggggcttgtggtagctaaaggtgtctttggggatgcgggcatccttttcctctcctgcctgaagagcttaactagaaagcccccctttcggtcttagacatcccctcttcctgacttgttctggctgggaccagagttcagtttaggtaggccagtgagtgacatttgatggttagaattcctacggttagaattaatcccttctgtatctcctagtatggaaataaactgcctggccactatgctgccctctttccattcctttttggtggaagtttgacaagttatttcccatagaaaataacttataggccgggcgccgtggcttaaacgcctgtaatcccagcactttgggaggctgaggcgggcggatcacgaggtcaggagttcgagaccagcctggtcaacatagtgaaaccccccctctctactaaaaatacaaaaaaattagctgggcgtggtggcgggcgcctgtaatcccagctactccggaggttgaggcaggagaattgcttgaacccgggaggcggaggttgcagtgagccaagatcgcaccattgcagtccagcgcgggcaacagtgtgactccgtctcaaaaaaagaaaaaaaaaaagaaaaagaaaaagtaccttatagatacagagagaagattaagtagctcctcttataatatgaattgagggttagaaataccgcagggaatagaactcaggctgtacctgagtttgtccctctccaaccaccctttttccatagctctctctgtatatatatatctgtcttttctcacattccttacggatcgtaatctgatggccagtcacctctgcaattatacatttaacaagagctctgggaa

SEQ ID NO: 586073 - DNA, 4001 bp, Homo sapiens
ggtccagaatgtgaggactgagaacatgggggaaagagaatattaaaagagatgatggctgataattttccaaggttgatgaaaaaaaagtccactctcagtttcagaaagtccaacaaatcccaaacagaataaaagaaaatcgtattttgatatactatagtgactgcagaacaccaaagacaaaaatgaggtcttaaaagcattcagaaagcccatgttctctaagtcatgtgtgactaattctctccaaagaaagctaccttgactgcggttgaagactgcagtataagatgctgaccactaaacaatacctgcttcttatgttgttttttttttcttcatttccttttaaatatcctaaaagtaggtcaggcggggtggctcatgcctgtaatcccagcactttgggatgctgaggtgggtggatcacttgagctcagaagttcaagaccagcctgggaaacatagagaaaccccatctctactaaaaatacaaaaaaaaaaaaaaaaaaaaaaaaaaaaagccaggcgtggtggcatgtgtctgtggtcccagctactttggaggctgaggtgggaggattacctgagcccaggaggcggaggttgcagtgagccaagattgcctcgctgcactccaggctaggtgacagagcgacaccctgtcaaaaaaaaaaaaaaaaaaaaaaaaaaatcctaaaaggtttatttcactggttataaaaaggtttaaaaaagtgtaacttaaaaaaataaaaaacaactacaaatctccctattaccagaactgcacagaaataagggatgggaccaagggaaacggccatttcgtacaaaaaaataaatcactggatttgtttagttagcaaacagactgagcagagggaggggaaagaatactcacttgcagttggtacaggtgtagaagacagtttgcccttcatcggctgaacgcatctgtctggtgtggtatgccattccttcatgaccacatcgagggcagcgcctgtcaacctgggaagaaactggtgggttagggaggcctggtcatatccccttacttcccacaggaatcaggcgatcacgcctctcaaacgtcgatggtttacatctcttttccctcttggaattgggcacaaaactctccagagctttgcaatcactcctccatttctttcctacccaccttatggagccagttcttgatctcattagcttaccacaggtccctggcactcaggcccttcctccaccgacataggcatggctgtccccagttggtggaacacaaccgaagtcttcacaaccttcccctcaaagtctgcacaggcaagtaagaactggttatggagacaaccagagagagctgacaccggaaacctcccctttcccctggctggttaggccaggaggccctacatcctttccctcagttttcatcgctagaccaaatgtacaaccgcctgatgtcctgctctaggatcccctcctcaacccaaccgatcttgagttccccaagcttccgaccctgcgccctccgccaggacccctgcgtacaagcctctcaccccgaacgttgatgttgaagccacagcgaatacaggtgaccgtatcctgagccccgggcagaggcaggaccgagccgcaatctgaacagaaatccaggtccgactgaaagctggagcaagtattggcgaggtccatgacagacatgcggtcgggtctgaggagggagttggaagtttattaacaaaagagagaagagttcctgtcccagaggtcgtaactattctgtcccaggacctaggagtatataacccgaaccctcctgccacgcacgcctcctgcctctgcgaccaaggagccgaaacgcccggaattcccagacagcgtcgggtactaaaggacttggaaccctttccaggggccggtgagaggagttaaccaactccgtgggctagagcgccagctctgcgcccgcggcggggcagcgagatagagccggctagagcgtcaggctttcgcgttgacgattggctgtgacgtcataattaattgcgaaccgtgtctcgggagcgttagagatggagactaacgtcttccaagggagattgcgtctccactttcaccctggtactgagaggttgagcacaaaattggtaaccaatgctgcgcttccagcaaattttcccaccagcacccaatcctgggatatttattctctttgtctcacatcctacaggaacgcagtcgcggggtatatccccctgaaaaccgtacgttgccaaataatgatttctttggattagagaactacaactcccctgggtcctgagccggtatttcccttttgcggctgcaccgtagttaaaaacaaagctaagtgttctgggacgtatagttctagcgttccttgggtcccgctggcgagcgtgggctttctgcagctcgcaaccggcctcgtgctttgcggacggttcactgcgcttggaaaggggtgagtcggctttttgagggacagcaagtggtgagagtgaaggcccgaggaatgcttagtcccacgggacgaaaggaagcagggatgaagtggtacacttgagaaggggttcaggactttggaggtggtggaacagaggagcttggggcttcctctccttcgactcctgccagataagtgaggctagcagtagtcaagaaagctcattaagtaggatttcataagacttaggtcgagtttggcttttagttgtgcctgccgcctatcgaactcttaattcattatgtcatccgttaagtggacagctgacatttccctgatcttttataaaacatgagaataagtatctttgggaaatctttctattttcattaatctgtaacttatattccaagtagaaactttccctgaaggggcagcttgtagttgtttactagtttcctgctagccctcccaccaccatccactctgatagctgtgctaagttcattcatataaaagttctggagccatcactgttttctcctatgaaggacacaagctgtagtcttttcgctgggagaggctcccatctgcctttctctgtaataatggagagaacgccatagtgaaagggttaaaactcagcaaactgctgaagagtgacaagccctatcatttaactgtgaaattgcttgttattctgtcttacaaagggagacgtgttgttgagctgattgtcgtagacagtttttattctcacttatctgtgtgtctcctttgaaaatggaacttgaaattctaccctcctcagttttctgtttttaatttgaaaaacagccaacatcccctgtgaattgcagtaaaggaacaaagcattaaaaggcatatccttttcccaacaaaagctcacagtctaatcagtaaagatttattgagcaactatgccaggttttgagctgaggctgagcctgcaaagttgaaatctgtgttctctgacctcaaggaacatgaatgaataattagaatataataaaactgtgctagtaggtacaaaatgtgagagcccagaacatgcatataaaggaaacatatctgtaaacttcaaggaagactgggaaatggcttaataaaaatagatacaatgttatggcagatatttaaaaaagatgctcagatattatgtgtcaaggatcatcagcaatcagcaaatcattaattttgagaacttgggatcacagactctaatgttaagtattgtgctagaagccatgtacagagaagtaaaagtaagatgatcatacgtttacaatctcaaaataagcttacgtagacaaataagaatgttcctaagaggtcagtgagaccaaatatttgatatcagatcctttccaacaatatagaggcatcatatttgtagatataaattacagttttcattccttatgagcctaaatttcagcatcaaaatgttaaaagtgatatgtgaatacagatatcacagtgtaaaccacgattaatt

SEQ ID NO: 586074 - DNA, 4001 bp, Homo sapiens
agcagcatgtttatcaaacagaattttgtagcttaatagagaaatataaaatccttccacagaaaagttataaataagttgggaccacattagccaactttccgtgaaactcatgcccctttctgatgcaccaaactgtcaaaaacatgctttgtgaaaaaatggctgttcttcactctggcctagaaatccacaatttatgttttctcaagcagaagtcacatcttttttctcacctgctctcctggttcatccagttctctctctaaatcctccagcacagtcaccacctcctccccactctctggatgctgctcctgcacccaggcctggagctcctcaggtaggatggtcaggaactgctccagcaccagcagctccagaatctgttctttggtgtgggtctctggcctcagccactgatggcaaagttctcggagtcggctcaaagcctcacggggaccagatgtctcctggtagcagaactgtctgaagtactgacggaagacctctctgctatgggtgttgtttttacgcaggtcccaatcctgtctggtggtatatttctcttcctctatctttacttccaaaggttcatcctggtccatgtgggcctggatagcccaagtagatgccattttagctgtgctagaactaccggtgtttcaagtaagatctcacctggaaactgtattcctggacagtcctgaagaataagccatcattattaatacaaactccaccataaagtaaaactgcaaattctgagaacttaactatgacctttgaaatctgacctccggattaatgtacaatacttactcagaaaaatactctgatagaaaagacttaagattagaccgatttaggccgggcacagtggctcacgcctgtaatcccagcactttgggaggccgagtcgggcggatcacgaggtcaggagatcgagaccatcctggctaacatggtgaaaccccgtctctactaaaaatacaaaaaaaaaaaaaaaaaaaaaattagccgggcgtgacggcgggcgcctgtagtcccagctactcaggaggctgaggcaggggaatggcgtgaacccgggaggcggagcttgcagtgagccgagatcgcgccactgcactccagcctgggcgacagagcgagactccgtctcaaaaaaaaaaaaaaagattagactaatttaaagagaaagactgaggaaaggtgccaagttgtttcaggacttaagagtaagacttgttggtaaacttattctcatttggtcctaaatgaaagacaaatggaataaaactaacatttagatcaagtaaataataataacaaaaggttaggacatccttgattagttacttttatcttttgaatgtccagatgtctggtggaaaccatgaaatcacaaaagctacagtcatgtaaatttatttcttcagggacttaatctttctgctcctcattcttcatttataaagtgagaaggctgaagaggttactctttaaggcttccctctaacctcgtggtctgtgattataatctgaagtgaggaaggcccaggaaagggtccctaggacgccggcgagcgtctgtgacccaccactgtccagaaatgtcggtaagcgctgaacccaaggatacacagcccgaagcaaacgcggaaggtatgggccttacagcctggaattgctgcagagactgggagccaaaccctcatcctaatgtcccaacgcactttggggagggagagcttcccgcggatccgcctgggtttgggaggaccggggtccactctgcaccggccagggcctgaggggcccagcagctggaatacagcaatctcccgcccacctgctcgcagcgtacagagcacaacatcgctcacctgcggcccccagggccagaagagaactccctcctacggagcgaaggcaagaggcctcgaacccttttgggacccggaacccatcaaaagtgacccacaaaggccggaagcggccacggggggtctaagaaccagcccgcgcggggcgcacttccgcggccgctctaggaagggagcgaaaggggctttcaactcggtagtgtttccgcgcgtctacgtgagaggaaggttgatggctttcaggcccgctggtaaatggaacgggtttatcttctcctcttctttacccagccattgtccacacttcccccgacccgatgggtggtcgaggcttgtagaactgatcttaagacagggaaatcccttgcgtctccattcactttgggattctgtgtctctgaggttagagatgcctcaaagggatgttctccgggggaccttcccaaatccgcgcttagcggtggcgaagggacttcttccacacagacttctcaagggccagccggctggtttctgccggctctttcgccatccacgattcttttgatgttctcttttatgtgctgatgtatgattatatgtcagaaaacccggttcaatggaaaaactataaaaaaaggataatttagtaaaatagcaagatataaagttaacacactaaaatcaacgaccttcatatatgtgaataatcaatgataacgagttacgagatataatggaagagaagaccatatttacaagagcagcaaaaaagtgaaactaggaataaacttaacaagaaatgaacaaaacttctatggggaaagctttaaaacattcctaaaaggccaagtatacatttaaacaaacagaaagcgatatgaggttcttggaaagactcaaagaggtcagtcctccctaaatacgtatgcaactgtagtattccaacaaaaatatcaacaaatattgttctggaattagataaactgattataaaattcatgtggggaaataagaatagccaggaaacccatgaaaaagaaaaatggtgagggtcaaccttatcagatactggaacatacccatataattttagtgtattaacagagagaaagaatagaccagaaatggatccaggtatgtaaggatattgagtaaatgatgaaggtgacaccacatatcaacagggaaatgaagaacttagaagttgtgctgggatgataaccgtttggcaaaggtaaaactggatttgtatttcccaccacacatcacaatagagataaattctaaatggatctgagatctaaatataaaaaatccacctatacatgtattagaagaaaacatgaataataattctaacacgtgggaatagggaaacattatctaaccatatgactcaaaatctaaaacccataaaaataataaatctggctacatgaaaataaaatgtattgcttgtcaaaaaaaaataaggaaagaaaaaggcttgcaacatatcacaggcaagggctagttttccaaatacctaaagagctcctaaaagttgagaataaccaataacccaatagagaaaatggccaaaagaaataaatagttgacagaataagaaatgctagcagccctcaaacatctgtaaatatgttcaacttcactcaaaatatgaacatacaaattaaaaactatgctgactgaggcaccgttagtcatcagattggcaatggtacaaaagtttgacagcatgctctactcatgaggaaggagaaactcttaacattctagtgggaatgcaaaatggtacaacccataggtatgaaagataatactatacagcaaaattatatatgtaagtttaccctttgttcctgcaataccacttctagaaatccatctcaaagatactttgacaaaaatatgaagtgacacacacacaagattaaatgagatcaggagaggcctgatttttaaaatgccaaatatgaggggatgaaattgagaaattctcaggaggaaaaatggatcagggcttcatcattgattatgtgggggataagagaaccaaaaaaaaaaaaaaaaaaagcctggtatcgtcagaggatggtggtccctccaccaagacaggggacactaaat

SEQ ID NO: 586075 - DNA, 4001 bp, Homo sapiens
acactagagagtaaaattcaacgtctcttctttcattgatctgcagaagtccaggatcagagcactgggatttggaaggtagcttaaaaatcatctagcccaacttccagcaaatgggagcatttcttctataaccatgctatccgatatggtagtcactagcaaaatgtggttactgagtacttaaaatatggctagtacaaatgagataagctaaatgtaagatacataccaaattttgaaaatttaaagcacagatatctaaaatacctcattaaaaatattgattacatgattaaatattgtgggctaaataaaatatatatttcacctttttttttaatgtggctactagaaaatttaaatacatatacagcttgcattatatttctgttggacagtcctattctgcaatatccttgacatctacttgaatctccgcttgaatacctatatggaaagggagtttcttatggggtagcctattttatttatgggtatctatgaatggcagaaaattatttcttttcctctgatacctgattgccttttggtaacttcccactgatcctagccttccaaacaggcatagaatcagtctagtgactctcctctctttacccagccacactttaattatttgacataggtagtcaggtcccttcctatgccttgttctttagaggataaatattttcagatgttctttcatatgccttttgctttggctccatccatatcccctgatcactcacagccagatgactgccccttcacacctgctttccaggttcatcaagctctctctccagatcctccagtaccgtcactgcctcctctccagtctctggatggtgtgcacgcacccatgcttgcaggtctttaggaagaatgctcaggaactgttctagcaccagcaggtctaaaatctgctccttggtgtggcattctggcctcagccactgacggcagagctcccacagctgggtaagagcttcacggggtccaggtgcatcctgatagcagagcttcctgaagtgttgtctatagagttccctcctgtgaggactgcacttttgtgagctggaatcctgtccccagtaatggtcctctgccttaattatcagaagtcctttttggtcctcaggttccagggctgtggtcattctgggctttgccaggagatttatcctctatctgggattgagtcaaagagaatctcttagaatcctgcctcagagacactcctaaggcataaaaagttgttaccatagagaaattacaaaaatttctgtgaacataaacacatcataatgaagccaagccaccagaagtcaatcagagaaaacagtcttataggaagctgaaacaaaacaaaacaaaacaaaacaaaaaacagtgacgcagggatatgatttgaatctgtgctctattgtgtaacttagaggaagttatttatctggactagaactacagatcctcaggtacaattctcatgtgtgttacagggttgatatacagattacatgagaacgtatgcaacgtccctggcatggcagcgggcactagtaagcactaaataaacgccaagtattattaacggctttgttaaaaggctcttcattctgttaccatgagatgcacgggccagcttgtgcccccaggattcactggttataggatatgtgtgccaaccctggaaggggatcagacagatgcctctgcagaggaacccgcaaccagtgtcccccttccacccatcctctcccggaaggctgggccaaatcctctcctgtagatctgttggggggcggagggagggacaggagtgttacactctgcccgcgacagggaggtgtggggagggtgttgctgctgaccacagctgcgtcttgtccccttttctccacctgggagccgggagacactcaccttacgcgcagggaggaacaggtgcaacagctagcgtcctttggacagccccgaacaaagactagactcaaagacaccaatcggcgcccggccgcttcagccgggcacttccgggccgctctaggaagcttcgcctctgtggcagcttgagtgcttgcctcctcggccctagccagtggaggacccggcttttacgcctcgtattgatgggattgcgggatctgcgagcaagtcttatttgtacttctttaaaacgtttttcggtttaattattgagtaatatggataagtaatgcattcacatacatttattaaaaagagtaaatgtcccccagcgtctagtttgacaatatttttcgtgacttgtatatccttccgtagatatattacaccgttatagattgtccgcgctttttcccctctgcacaaatagtagcacttctgtacctttcttatttttctttttaccaggtggtcttggtaaaggctgtacataagtgtttccttgatcttgctcttttttaaacaactgcacggtattcaactgtgtattatgttctataatttgttaataagtaccccattggtggtcatgaggttgtttccaattcttctttttcaaacattgctgcaataacttactgtgaactcacatcatttttcatgtgtaaggatatatccatagtctgtatgtctagaaagggaattactacagcatagaatagggaaatttgtacttttgttaatgccaaatcaccaatcataggatctactagcagtattcttatttacctatacttgtcaacacagtgttataaaatattttgatctttgccaaattgatgggtgaaaaatgctcttagttttttactccctcttctcctttcttacacaaatattgatttatctactatgccaggcactattgtggaagctggaactaattttgagcaaaacaatgcccttcctttcatggaatttataatcttgtgtgtgtgtgtatgtgtgtgtgtgtgtgtgtgtgtgctggggaggcaggcaataaaccaaaaaatatacatagtgtatagagagtggatatcagttctaaggagaaaataaaggaaatagggaatttggggtgagaatgaagtgatgcaatttaaataggatattcatggaggacctgactaggaaattgacatttgagcaaagattgagggagctgagggaatgggccatcagggataaagatgtttcagggagagggataacaaatgcaaaagcctggagtggagtgtgttttaagtattttgggcaaaggaagggtgcttgtttttctggagctgagtgagcaaaagagcgttgggtggagagatagtgagagccttgggtgagtgcaagggtatttttactctaaaatgataaaatgataagctactcagtttattttcttttctcttttctttccttttcctttgttttaggagatgggtctcactctgtcacccagactggagtgcagtgagtggtgcgatcatagcttactgcagcctgaaactcctgggctcaagtgatcttctcgcctcagcctcctgagtagctggagctacaggtgtgagctacccagcatggctcatttgagatttctgagtagagaagtaacatgattaaacttgggtattgagattattattttggctgctatgttaacagtagacttgaatgtgaaggggttgggcaagggcagaagcagggagacaggttggaaagttggagtgggaagggcctttttaagaataacacaaacccctaaagacataaaactgaaaaggccatggaggaaaagataaatgaaactggccttgtaaaattgaaatatttgaatgaaaaaagtaaaaataaaatataaactaaaagtaaaatatgccacacatctaaaagacacagctgattttcctgatatacaaagaccttttatcttaccaaaaaataaaaatatgaacaagccaatagaaaaatagacaaagtacttaacctgcatgcatttattgtcaggcctctgacaatatgatactaagccatcatag

SEQ ID NO: 586076 - DNA, 4001 bp, Homo sapiens
catcctctctgaagtcttctttacccatttcagctcaccctcttccaactgcccactcatatgtcatgtactgtatgagtcccacctttcaccctcagtcacaatttatcttgtaccattacttctcttcagaaccttttttaaatccaaaaagtagagaggaatatagaattctttcaccaagttctattaccctgaaataaacagtcttaaatactggaatgtgtccttttctatgcatttgcaatcgtatatacacatgtatacacatgtgcacacatagagttgatataagcccatatattttatttaccttagacaagcagaaggtagtatgagatagcagagaacacaggcagatctggttgttaatttttttttttttttttttgagacagagtcttgcttttgttgcccaggcgggagtgcagtggtgcgatctcggctcacttgcaacctctgcctcccaggttcaagcaatcctcctgcctcagcttccggagtagctgggattacagggacccaccaccactcctggctcatttttgcatttttagtaggatggagtttcaccatatgggtcaggctggtctcgaactcccgacctcacgtgatctgcccacctcggcctcccaaagtgctgggattacaggcatgaaccatagtgccaggccatctgtgaattttaacgcagtgatcttgggcaagttagttgatttttctaagcctcaagctcatatatgaaatgaggtcaacaactgccttgccaacttgttgagaatattaaatgagataatgcatacaaagtgtttttgcacaaaacctggcatataaacatgcaaattaatcttttaataagataatgtacaattttggtacaatggtagtttaattaatagttgctactttcccttagggccaagactgtaatctttttctattgctcaaagaacaagatgagtgggtgaaaacatgcacacaaaccaataaaacggctgtttcatcaggtttgcagaaacactgaaagatatacgtcttcagatatattctctccaatcaaatcctaactagaagcccaggactactgaggtacaaaagaaggacgggattcaaatgagcgaagtaacttcccgggttatagctgtaaagctaatataggaacagagtggagttagcatagcaaaggttttaagaaaatggagtctggagccaaattgcctgtatttgaatcctgcctacaccccttactcgctctacgaccttgggcaagttactaacttcattttcttcttgtatgttaattttaaaaaggggcgggacagagaggtggggtgtagtctacataataatagtgtctatctcatagagttatgagaagcagataatatttgtaaagtgcttagaacagtgctgggctggcacatagtagatgctatttattcttttaaaaaattcgatagcagcaagagcctttatactatgtgagttagactaagaaaggctgtggcatagtttaaaactatccctgctcattctttaaaataagtccacagtagagaataagacatcggaaaatacaaacatttcttcatatccgaatctatttgaatcctaagatgcagatacggagagttcagagtgccatcagtacagggcagagaggttgaagagctcaggaacagacatagggtgggggaaaggggtaggggcaacgacgctgacttttggttaacaaagcccttccaggctgcggagcaacctcctctgcccttcacctgcccggcccatctctggccaagaagaccctgccgccaaatccccacacccagtccaggtcgcagtgcacagactggcccttccgaagcccctcagcggtagcccgactccgaagctcaccgaggcatccgtgagaggagatgccacctagcgcagatcacatctgctctgaatccttgacaaccgcagcccaaagaatgataaactacaaaggccggaaatgcgtcaccgcggcccgctctccgcgaaacagcggttccggctgtgttccttctaggaaggccggaggtttccacacctctgtggtcgtcactctgaatcccgtctgtagtcttaagtgagatactaggtgacacattgtcttccacgcggcaatataataacggccaacatagtgttttaacacgtattaattcattaccccgcataacaaccctgtgagttaggtacaattatctccatttaacaggtgaggaaactgaagcacatttctacatttattagttgccatttcctgcaaagaataccctttcttttccctgccgtctcattttatcacgatgaactcatggattcctttacaaataattactgttattattatgttgatgctcaaattatttaaaatttggtcagttggagccctttcacactgctccctctcttttctttttttgacaaagtctccaggctggagtgcagtggatgcgatctcagctcactgcaacctccgcattccgggttcaagtgatcctcctgtctcggcctcctgagtatctgggattacaagaacacaccactatgccttagtgaggctggtcttgaactcctgtccctcaagtgatccgctccctcggcctccgaaagggctgggattacagaagtgagccaccgcacccggccacaaacaggtttctatgtcctttgataagttcccaacagtttttgtgcacttcactttctcacaaaagatatttcagtcccattttatactattcctaccctaaacctagaatcaccattgcttcatgaagctacagtacatcagtgaaaaatggtatatagaaaccaagatctggatttcgggcaatgaataacctcattgctactgtgtctggcattggttcctgccagtctactgtgtccagaattggctccttccagtgggttcctgctctgacttcaagaatgaagccgcggatactcacggtgagcattacagttcttaaagatggtgtgtctggactttgttccttctgctgttcagatgcgtccagagtttcttccttccggtgggttcgtggtctcacttgacttcaggagtgaggtcgtaaacctttgcagtgagtgttacaactcctaagggtggcgtgcctgcagttgcttcttccttctggtgggttcgtggtctcgctgacttaaggactgaagctgcagaccatcgtagtgagcattacaatgcttaaaagtagtgcagacccaaaaactgaaaagtggtaaggttttattgtgaaaagggaaagaacaaagatcccacagcacaaaaatcaatgctagcaggttgtcactgctgactggggcgggggtggtagccagcttttattcccttattcagccccgcccacatcctgctgattggcccattttacagagtgctgattggtccatctttacagagtgccgcttggtgtgtttacaaacctttagctagacacagagtgctgattggtgcatttttacagagtgctgattggtgcatttacaaatcttcagctagacacagagtgctgattggtgcatttacaaatcttcagctagacacagtgctgattggtgtgtttacaatcctttagctagacagaaaagttctccatgtccccaccctaaccggaagcccagccagcttcacctctcactactaggacatattattgcctctaggctccttcagtgtacaagagctagaatatatgaatatgttatatatataatatattatatataatacgtattatatattatcctatatatcatatattatatattatatataatacatattacatattatcctatatattatatattatatacggaggattttatattatatatatgtgtattatatataacatatataatatattatatactatatattatgtacataatatatattatatacagatataaaatcctccatatacatatataatatatatatg

SEQ ID NO: 586077 - DNA, 4001 bp, Homo sapiens
ctcccgaatagctgggattacaaatgcctgccatgacacccagctaatttttgtaattttagcagagacagtgtttcaccatgttggccaagctggtctcgaattcctgacctcaagtgatccaccgtcctcagcctcccgaagtgctgggattacaggcatgagccaccgtgcctggctgggtatgaggctgaattagtggtgagttcatttctataatgtgattaaatatatcaaacacaatatataataaataatttgataaactgttttgggaggagctccatctacccagctatttgagccagaaaactgaccattccttcctcctttcatatctcatgtatctgatcaatcaagttctattgattctattgcttaaatatctctcaaatcaatccacttctcatcccctttgccattgtcttctcctacctagaccactgtgacaaacagactggtctgagacaccaatctattttccacacgcaaacagtgatcattctaaggaggatatgaaatattattatgtccctgctatgcctgttacatataatggctgattattacccttaggatcaagttcaaaacatttaatatggtttacattgttttttgatctaataaagtactttatttcatcaaatttgcaatactccttcttgctccttggcccttccacagcttattccttctgcttggaccaccctccaaccctccaattttcttcttgttaatgcccactcacacttcatgtctcagcataataaaacaatgagccaggacaactatactacatgtttcacatatattaattatttaaccctcacacaaccctataaagaagacactattcctaatttcttcgtgcagagaaggaaattgagacggggagagttgaagaacttacacgaggtaccaaagctaaacctcagatcttttctccagtatctcttgcacccacaggcccaaaaccttggatttatatttgccttcttactgtcacaccctacatctgacccagtagcaaatattattgtctctattttcaaagcagatcataatctgatcactggctcaagatatccttatctcccacctgaattacttggaattttaaaaaattactcttaacttttaagttttcttgattccattcttgcccacttacaatctattatcatcatgagtctccaagtaaagaagctttaaaacataagtcagatcatgttttcttctgctcaaaatcctccaaaaacacacaccaaaaaaagacaaaattccttacacgatacagttctcatttcctctacactcttcctctccataccccaatctctctgacatcattccctacaaaggtcgcctttgttcactgctccaaccgctctggtctccccgttattcctcaaatatgccaagcaagctcctgctttaagacctttgcacttgctattccctctacctagaaagttcctgaccgcaaaagccacttaggtctttccacccacctccttcagatttctgctcaaatattaccttctcggtggcgcctacctttaatatctacttaaaattgcgctgaatggatgaaaaatatgcagcagaaggttgtactctgtttaccagatccacagcttcatcactctcataggccccagggccgacacctccgctacggaccccgccccctcggtcgagggaagattctctgcacccgccgggaagcagctgctccctaggcccctaggccgcagttccgccccagcccggggcccagctccagggtccgctcacctggtcaaggggcctcagaggacccaaacgctctgaaacagcgtcttagctcatcgccgagtgtcagctctagctcttcggagcgctttcttctccgctctaggaacgctggaggaccttggctcgatggtgctgccgcttaggcatcgcagaaggagactaacatgggtgctgcctgctgaggacggctgggagggtcatttcgttgtgagctaagattgttggggttttttttttgtttctgtttttgtttttgttttctcattttaaagtggatgtttattttattcatgtaaaaacaggccagctccgttgagtgttatcacaaacagccaacattttcactttgctcacataaataaaacacacatacttcgccatttttcgcaatttagaaattcatcaaacacaatggcaaaaataattgtcaaagtatttcgaaaattaaactaaacaatggacatacgtttggattgaaaggtttaaggtaagaagaaattagggctattactgtgagagaaaataaatcaacaacactttgcaatcaatgtaagtttcagggggaataaaagcaacagatatcactttatcaaaataaattctacaacagagaacagaaatagtctctcttgcccacagtatcacaaactgggtttttatagtttttgaataagataaactctttgaatgcttatacattgctagtgggaatgtaaattagttctgccactgtggaaagcaatttggaaatttcttaaggaacttaaaacagagctctcatttgacccagcaattccattattgggtatatacccagaggaatatactgttctaccataaagaccatgcatgtgtatgttcatcacagcacttttcacaatagcagaaacatggaatcaacctagatgcccatcagtggtggactggaaaaagaaaatgtggtacataacaccatggaatatcatgcagctaaaagaatgagatcatgtcctttgcagcaacatggatgcagctggaggccatttatcctaagccaattaacacaggaacagaaaaccaaatactgcatgttcttacttataagtgggtgctaaacattcagtaaacatgaacacaaatgggaacaacagacacaaggacttcttgagggtggagggtgagaggaaggtgaagattgaaaagttacctataaggtactatgctaccactttggtgacaaaatcatttgtacaccaaaccccagcagtatgcactttattcatgtaacatacctgcacatgtacccactgaacctaaaacaaaagttggaagaaagaaaaaaaaacctttaaaaaatctgaacaaacttttgtgtttaactgatcagttgacagaagctttgaaatatcattaaatatacaaaacattgtactgacgtgtaatttattcagtgtttcaagcattgaaattatcataacagaaaaaaaacaaccagtttcattatcacaagcagttatcttttcttcttaagtgtctgaatgtatctttgaaagcatatttttaaagtaaaaattaaatatgtttactttaaaacttttcataaggccaacaaatctagtcaatatgtgttactaattagaagtcaatattctttcttgagaggaaaactcatatatcttattttttaatatctagaaaaggaccttttcaaaaattatataagggataaacataaagaaaatttaatttaaatagaaagtaaatactatatcctatttactccccctctaaaattccctactatgactagtttcttaaatctgtcacttttattgtcaaggctgagattattgccattgcactggatatcccatgaaaatcaaaacctttaaagtagctagacaaagaagagtttttttaaattttcaaggtgtgcatttttcatttaaacagtctgtttgtaccttttgggaggggtaggggtagataaggtgagaataactcaaaacactgttatcaccaggagagacaaaatactaaaatacaaatcaattttcaaacttgaggttttcattttccaggattatccttatttttgtaaactatagtgatcatgtttctgccaggtccattcatacgatattcaagataagaactttcttttccatattatcagtagagatgctatcgcattatgagtcatgtcaccatgctccagcataaga

SEQ ID NO: 586078 - DNA, 4001 bp, Homo sapiens
caggcatatgtatatatatacataattcgtattattgtttaggtatatatacctgtattcgtattttttatatatacctgtattcatattattatatctatagagatatctatacccatatcagtatatatctatgccacatacatatatatatactggtatctatatcagtattggtatataaataaacatgtggtatgatgttgatatgtatatatagggtatgatgtgttttttttttttctttgaaatggagtctgcctctgttgcccaggctggagtacagcagcgcaatcttggcttactgcaacctccgcctcccgggttcaagtgattctcctccctcagcctcccgaatagctgggattacaaatgcctgccatgacacccagctaatttttgtaattttagcagagacagtgtttcaccatgttggccaagctggtctcgaattcctgacctcaagtgatccaccgtcctcagcctcccgaagtgctgggattacaggcatgagccaccgtgcctggctgggtatgaggctgaattagtggtgagttcatttctataatgtgattaaatatatcaaacacaatatataataaataatttgataaactgttttgggaggagctccatctacccagctatttgagccagaaaactgaccattccttcctcctttcatatctcatgtatctgatcaatcaagttctattgattctattgcttaaatatctctcaaatcaatccacttctcatcccctttgccattgtcttctcctacctagaccactgtgacaaacagactggtctgagacaccaatctattttccacacgcaaacagtgatcattctaaggaggatatgaaatattattatgtccctgctatgcctgttacatataatggctgattattacccttaggatcaagttcaaaacatttaatatggtttacattgttttttgatctaataaagtactttatttcatcaaatttgcaatactccttcttgctccttggcccttccacagcttattccttctgcttggaccaccctccaaccctccaattttcttcttgttaatgcccactcacacttcatgtctcagcataataaaacaatgagccaggacaactatactacatgtttcacatatattaattatttaaccctcacacaaccctataaagaagacactattcctaatttcttcgtgcagagaaggaaattgagacggggagagttgaagaacttacacgaggtaccaaagctaaacctcagatcttttctccagtatctcttgcacccacaggcccaaaaccttggatttatatttgccttcttactgtcacaccctacatctgacccagtagcaaatattattgtctctattttcaaagcagatcataatctgatcactggctcaagatatccttatctcccacctgaattacttggaattttaaaaaattactcttaacttttaagttttcttgattccattcttgcccacttacaatctattatcatcatgagtctccaagtaaagaagctttaaaacataagtcagatcatgttttcttctgctcaaaatcctccaaaaacacacaccaaaaaaagacaaaattccttacacgatacagttctcatttcctctacactcttcctctccataccccaatctctctgacatcattccctacaaaggtcgcctttgttcactgctccaaccgctctggtctccccgttattcctcaaatatgccaagcaagctcctgctttaagacctttgcacttgctattccctctacctagaaagttcctgaccgcaaaagccacttaggtctttccacccacctccttcagatttctgctcaaatattaccttctcggtggcgcctacctttaatatctacttaaaattgcgctgaatggatgaaaaatatgcagcagaaggttgtactctgtttaccagatccacagcttcatcactctcataggccccagggccgacacctccgctacggaccccgccccctcggtcgagggaagattctctgcacccgccgggaagcagctgctccctaggcccctaggccgcagttccgccccagcccggggcccagctccagggtccgctcacctggtcaaggggcctcagaggacccaaacgctctgaaacagcgtcttagctcatcgccgagtgtcagctctagctcttcggagcgctttcttctccgctctaggaacgctggaggaccttggctcgatggtgctgccgcttaggcatcgcagaaggagactaacatgggtgctgcctgctgaggacggctgggagggtcatttcgttgtgagctaagattgttggggttttttttttgtttctgtttttgtttttgttttctcattttaaagtggatgtttattttattcatgtaaaaacaggccagctccgttgagtgttatcacaaacagccaacattttcactttgctcacataaataaaacacacatacttcgccatttttcgcaatttagaaattcatcaaacacaatggcaaaaataattgtcaaagtatttcgaaaattaaactaaacaatggacatacgtttggattgaaaggtttaaggtaagaagaaattagggctattactgtgagagaaaataaatcaacaacactttgcaatcaatgtaagtttcagggggaataaaagcaacagatatcactttatcaaaataaattctacaacagagaacagaaatagtctctcttgcccacagtatcacaaactgggtttttatagtttttgaataagataaactctttgaatgcttatacattgctagtgggaatgtaaattagttctgccactgtggaaagcaatttggaaatttcttaaggaacttaaaacagagctctcatttgacccagcaattccattattgggtatatacccagaggaatatactgttctaccataaagaccatgcatgtgtatgttcatcacagcacttttcacaatagcagaaacatggaatcaacctagatgcccatcagtggtggactggaaaaagaaaatgtggtacataacaccatggaatatcatgcagctaaaagaatgagatcatgtcctttgcagcaacatggatgcagctggaggccatttatcctaagccaattaacacaggaacagaaaaccaaatactgcatgttcttacttataagtgggtgctaaacattcagtaaacatgaacacaaatgggaacaacagacacaaggacttcttgagggtggagggtgagaggaaggtgaagattgaaaagttacctataaggtactatgctaccactttggtgacaaaatcatttgtacaccaaaccccagcagtatgcactttattcatgtaacatacctgcacatgtacccactgaacctaaaacaaaagttggaagaaagaaaaaaaaacctttaaaaaatctgaacaaacttttgtgtttaactgatcagttgacagaagctttgaaatatcattaaatatacaaaacattgtactgacgtgtaatttattcagtgtttcaagcattgaaattatcataacagaaaaaaaacaaccagtttcattatcacaagcagttatcttttcttcttaagtgtctgaatgtatctttgaaagcatatttttaaagtaaaaattaaatatgtttactttaaaacttttcataaggccaacaaatctagtcaatatgtgttactaattagaagtcaatattctttcttgagaggaaaactcatatatcttattttttaatatctagaaaaggaccttttcaaaaattatataagggataaacataaagaaaatttaatttaaatagaaagtaaatactatatcctatttactccccctctaaaattccctactatgactagtttcttaaatctgtcacttttattgtcaaggctgagattattgccattgcactggatatcccatga

SEQ ID NO: 586079 - DNA, 4001 bp, Homo sapiens
agagcttggaatatagaggtgtttatagctcatgaggatatagttacaatacaataaaataaaagccataatttaaaaaatgtatacaaggtatacccctggaggaagtggaagagctcatcctaaatacaagattaagtttttatgcattgcctgtaatccacaaaggaattcatttcacatatatttactaagtgtttacgaggtgtcagacagcaaagagtgaaacaatgcagaatttgatgtgtccccactgtccttcaccgaaataaaaacatggcagaaagagcataaaagagaatgttttcattcatgagaatgttttcattcacgtcagcataattaacaacagcaacaaagagatcatgtaaatcacaaatcatgtgtgttgtaaaataaatcccaaaggataccaattacgatgacaagaaaacagaagaagaccttaaataccatgaggaaacagtcaaatccagaaatggggatgcactacaggaagactggaagagcctccttttaaacaaggcaatgggatgggaggaagggaggcaaagagtaaaattgccctaggttaagactcaactacatgcagtgagtggtctatgattggatcctagttggtacaaacaggtataaaagacatctgtgggacaacagggggtggaaggatttaaacatgaactaggtgttaggtgaagcgcctacacttagttgggtgtgctaataatcttgtggttatgtagggaaatgtccccaatttttagagatgcattagaaactagaggtgacaagttatgaggttggtggtttttacaatatttaaagaaaacatatgcgacaaacattgcataatgttgacttattaaataaaaattacgtgtatataggaaataaggcttttgacagggagagacccttctctacctctggacctcggtttcgccgcaaagctccgacctctctaggggtctctcccaccaccctgtgaaagggctacctagcttgccttaggtggatagcaagggaagggtccctggagagcctgcccccgcccatgatttagtgtcttatccccacataacataaaactaagcctggggaaaaaatcaggttgcaggcaccgataagggaactagcacagggtgttgtgcctagagatatgcccacggctgcatagatagaaaaacctcgggcccatttggataaaaacttgcacagaacctccagctcactcagataagggaacaaggcctgacacataatgcctttgtcctttgtatagtcagcaggttcccaggaaaagtttcttctccttttgtgggtatggacacggtgggttctggtaggttccggcaggcgctctactttcctttattaggactataagcccagcttctgtgaatcatcacctcagcccctgattggtccggggccaaactttcacttcggcttctgataggtcctgggccaagctaagcagcagctatgaatcatcatttcagctcctgattggtcccggaccaagctgagtcaagcgttcgccaggacagcccgcagactaagcgcattccctctcctttccagtccataaaaaccccagaacgggccccataatgggtactcccggtcgggaccccttctctgctggcagagagctttttcctttcgcttattaaactttcgctctaacctcacctttgtgtctgcgctcctttatcgtcttggaggcaggacaaagaactccgggcgttatctcagacaaagaaaggctgtttaatcttcaggataaggggcgggacctccacctactccacgggggcttcaggccagtgaatgtgtaggggcgggggtcacgcctgcgcagacgttccctccccgcctactccaaggcacagacctgaaatcttctgggaacctggcgggtcgcgacaaggggccaagactcaccttcggggcaccggcaagctacggaacaggtggcggggctgcagcaccccaatgaccgatcaaccgcaaaggccggaaatgcgtcagccgttctgagcccactggctgaagccaggcaactctttcctttctaggaattccagaggtggctgctgcttggtgactcccttattgcaaaccccggggccaaaaatcccagtcccactgggtgcgaggcggagaaatccggcgaggcatttctatggggagcggcccccagcatttaggagttagatggtcatcgagacccaaaacattagagccggaaggtgttaggaagatataaacgtagagagcgagtaacaggaggcaattccacggccaaacaggtttatttacaggaaaagcctgcgaagagttccagttaggaatctggctgagatcctgatcgcttacaagctgaggcttttataataaagtttctgttggggaggggttggggaagtgctggctagttggaactgtttggacactttccaactggggacagatgtggttagggccgttaggctctgttgcggttagagctgttatgctctgttgaagctatggacggggttgacatttgctttgtttcttgagaacacagtcatcaaggttgtaaaatggcatcactattgttagtcctcacagaagggacttcatactttttctgtctctaatacttacctattcttccccgagtctgtccacttcctctggtctctttgacatcacaaaggagagatggtaatggtggggacgagaatacagagttgtttttgttgtggttttgttattttgtgttttacactcaaacctctgtcttctggaatcccaaagtctagaagaagagcgtgtaaacaagtaactgcgtaaaacagacgtgcatgtgaaatgaagtaaaataaaataagtgcttgtaaatcgatgagaatagcctctggaacatgctaagtacgtatgtaggaaataaatgtatgtattagtttgaattcgtggcgtggaagagagaggaaaactaatggggcaaaacaagactcagcaggaatctgccagtgtacactggaaaaggagcaaaggaaataaatttctgggagagggaatcaaatgtacaaaagcagaactggggtgaaatcctttggtacatccaaagaactgggctgatcagcatgactggagagtggtatatgtggcaggggcaccagctcttactttttttggatccctaaccaaggaatttgagcagtctgatcaaatttacatctagaaatgttatcttggcagccatgtggggatggactgtaaggaaatgagactacaggcagggagaccagctaggagactactacaagaatccagggtagagagagtgagggcctgaatcaaggcagtagcaatagaaatagagaagacagataatacatgttaagaggttgaattgattttttacaactcattcattaattatatagattcccattgaatgcgatctttgtgccaagggcttgctggatataataataatgaaggacacaaggtcctcatcctcatggggtttataatgtaacaaggaatacagacagaaagagacccagcttatacaattcaagagaccttatttgagaaaaggaatacaaaattacaagtacaaacatagatatgaaaatggagacttaagtcaggtgtaatagctcacgcctgtaatcccaacactttgagaggccgagatgggaggatctcttgagtccaggagttcaagacaagcctgggcgacatagtgagactctgtctctgcaaaaaataaaaaatattatccaggcacagttactcatgctattagtctcagctactggggaggctgagcagggataatcaccagctgcagtagccatgatcgtgccactgcactctagcttgagtgacagactgagaccctgtctccaaaattaaataaataaataaataaagaaggaaaaagaaaaaaaacaaaaatggagatttagaatggaaaataggccaggcgtggtggttca

SEQ ID NO: 586080 - DNA, 4001 bp, Homo sapiens
gatgtgtccccactgtccttcaccgaaataaaaacatggcagaaagagcataaaagagaatgttttcattcatgagaatgttttcattcacgtcagcataattaacaacagcaacaaagagatcatgtaaatcacaaatcatgtgtgttgtaaaataaatcccaaaggataccaattacgatgacaagaaaacagaagaagaccttaaataccatgaggaaacagtcaaatccagaaatggggatgcactacaggaagactggaagagcctccttttaaacaaggcaatgggatgggaggaagggaggcaaagagtaaaattgccctaggttaagactcaactacatgcagtgagtggtctatgattggatcctagttggtacaaacaggtataaaagacatctgtgggacaacagggggtggaaggatttaaacatgaactaggtgttaggtgaagcgcctacacttagttgggtgtgctaataatcttgtggttatgtagggaaatgtccccaatttttagagatgcattagaaactagaggtgacaagttatgaggttggtggtttttacaatatttaaagaaaacatatgcgacaaacattgcataatgttgacttattaaataaaaattacgtgtatataggaaataaggcttttgacagggagagacccttctctacctctggacctcggtttcgccgcaaagctccgacctctctaggggtctctcccaccaccctgtgaaagggctacctagcttgccttaggtggatagcaagggaagggtccctggagagcctgcccccgcccatgatttagtgtcttatccccacataacataaaactaagcctggggaaaaaatcaggttgcaggcaccgataagggaactagcacagggtgttgtgcctagagatatgcccacggctgcatagatagaaaaacctcgggcccatttggataaaaacttgcacagaacctccagctcactcagataagggaacaaggcctgacacataatgcctttgtcctttgtatagtcagcaggttcccaggaaaagtttcttctccttttgtgggtatggacacggtgggttctggtaggttccggcaggcgctctactttcctttattaggactataagcccagcttctgtgaatcatcacctcagcccctgattggtccggggccaaactttcacttcggcttctgataggtcctgggccaagctaagcagcagctatgaatcatcatttcagctcctgattggtcccggaccaagctgagtcaagcgttcgccaggacagcccgcagactaagcgcattccctctcctttccagtccataaaaaccccagaacgggccccataatgggtactcccggtcgggaccccttctctgctggcagagagctttttcctttcgcttattaaactttcgctctaacctcacctttgtgtctgcgctcctttatcgtcttggaggcaggacaaagaactccgggcgttatctcagacaaagaaaggctgtttaatcttcaggataaggggcgggacctccacctactccacgggggcttcaggccagtgaatgtgtaggggcgggggtcacgcctgcgcagacgttccctccccgcctactccaaggcacagacctgaaatcttctgggaacctggcgggtcgcgacaaggggccaagactcaccttcggggcaccggcaagctacggaacaggtggcggggctgcagcaccccaatgaccgatcaaccgcaaaggccggaaatgcgtcagccgttctgagcccactggctgaagccaggcaactctttcctttctaggaattccagaggtggctgctgcttggtgactcccttattgcaaaccccggggccaaaaatcccagtcccactgggtgcgaggcggagaaatccggcgaggcatttctatggggagcggcccccagcatttaggagttagatggtcatcgagacccaaaacattagagccggaaggtgttaggaagatataaacgtagagagcgagtaacaggaggcaattccacggccaaacaggtttatttacaggaaaagcctgcgaagagttccagttaggaatctggctgagatcctgatcgcttacaagctgaggcttttataataaagtttctgttggggaggggttggggaagtgctggctagttggaactgtttggacactttccaactggggacagatgtggttagggccgttaggctctgttgcggttagagctgttatgctctgttgaagctatggacggggttgacatttgctttgtttcttgagaacacagtcatcaaggttgtaaaatggcatcactattgttagtcctcacagaagggacttcatactttttctgtctctaatacttacctattcttccccgagtctgtccacttcctctggtctctttgacatcacaaaggagagatggtaatggtggggacgagaatacagagttgtttttgttgtggttttgttattttgtgttttacactcaaacctctgtcttctggaatcccaaagtctagaagaagagcgtgtaaacaagtaactgcgtaaaacagacgtgcatgtgaaatgaagtaaaataaaataagtgcttgtaaatcgatgagaatagcctctggaacatgctaagtacgtatgtaggaaataaatgtatgtattagtttgaattcgtggcgtggaagagagaggaaaactaatggggcaaaacaagactcagcaggaatctgccagtgtacactggaaaaggagcaaaggaaataaatttctgggagagggaatcaaatgtacaaaagcagaactggggtgaaatcctttggtacatccaaagaactgggctgatcagcatgactggagagtggtatatgtggcaggggcaccagctcttactttttttggatccctaaccaaggaatttgagcagtctgatcaaatttacatctagaaatgttatcttggcagccatgtggggatggactgtaaggaaatgagactacaggcagggagaccagctaggagactactacaagaatccagggtagagagagtgagggcctgaatcaaggcagtagcaatagaaatagagaagacagataatacatgttaagaggttgaattgattttttacaactcattcattaattatatagattcccattgaatgcgatctttgtgccaagggcttgctggatataataataatgaaggacacaaggtcctcatcctcatggggtttataatgtaacaaggaatacagacagaaagagacccagcttatacaattcaagagaccttatttgagaaaaggaatacaaaattacaagtacaaacatagatatgaaaatggagacttaagtcaggtgtaatagctcacgcctgtaatcccaacactttgagaggccgagatgggaggatctcttgagtccaggagttcaagacaagcctgggcgacatagtgagactctgtctctgcaaaaaataaaaaatattatccaggcacagttactcatgctattagtctcagctactggggaggctgagcagggataatcaccagctgcagtagccatgatcgtgccactgcactctagcttgagtgacagactgagaccctgtctccaaaattaaataaataaataaataaagaaggaaaaagaaaaaaaacaaaaatggagatttagaatggaaaataggccaggcgtggtggttcacgcctataatcctagcacattgggaggctgaggcaggcagattgcatgagctcaggagttcaagaccagcctgggcaacgtggtgaaaccccatctctacccaaaatacaaaaattagccaggcattgtggcacatgcctgtgggtctgaggtgggaggattgcttgagcctggaaggtggggttttcagtgagctgagattgtgccactgcactccagcgtggctgacagagtgagatcc

SEQ ID NO: 586081 - DNA, 4001 bp, Homo sapiens
cgaaagtgccttcggaagatttcccttgccagtggattactgcgtttcagtctggattcctgccattgaaggtgactttttgcttccactttcattgtcagaagttcttcccatgcctcgggaacttgaacacccagggataaaacctcctttgagtttgtattcatcttgaccttgaacagcttaaaaggtaccctccagctggagctatgcttcaagacaaaccttggaggcgcttgcctaagcagtaaaaataaattatttatatagaaaaatgataatagctgatgacagaaactgataatacaagcaattatcataggccctaaagctcttctctgaaaagtgatttggtgaccaaaggatggaaataatggaaatatatatattcataatgtgctaagagcataagcttttaagttacccagatatgggttttctttctttcttttttttttaaatggggaatttcactctgtttcccaggctggagtgcagtggcataatcacagctcactgcaacctcaaactcctgggtttaagtgatcctcccaccttggcttcccaaagtgctgggattacgtcagccaccacagctgacccagacctaggttttattctgatcctaatatttactagttgtgtgaccttgtgccaagtttttaaatcttctttcaatcttgatttctttatgtgaagaagaaatagcaataatgcttcacagagttcatggaggaaaacagcccatgaattagggactgcaccgatcactcagaaagtctgaataaaaagtttgaactcactgtataaacatcaacttagagaaagaataaatggaaatattgttactgtcgactaaatgaacgaaccaacatttactttactatttacttcagttttcttaatcttcaaaacaaccatttaaggttagtattattttcactaaatttacagaaagaaaggcttaggtggattccaagtcctggagctttccacaccgccctgctgctactgaagaataacagtcaacactgcacaagtctacaatatgctttcagatacaagactatatttcatcctcacaattacccactgaggttttattataataattatttcactagataagaaatggaagccagggaaagttaagtagattgcccaaggtcaacttctttttgaggacaatcctaagaagccaaagaagcccaagggaaaagttttctccacagacgcaggaagcacctgaaacccatgggggtgttcccaaaatgtgtgtctccaaaatgccaggaagcacagcgcagcagctgaattccagcttgaaaggccctatggcagacatctggggaatctgaattgggaggtggagagaagtacagggagacccagaatatgccctttaacgggctcctcagtgatttgtatgtattataaggtttgagaatcaatgaactaaggaaaagggaatcgggaactgctacattctgcgcttgaaaaccagtccattcaacgccccttaatttgctttcagaatctagaggtaagagggtatacaggttctccatcgtgaaggctgccaaagtcttaattgtccttaacttcctctcccgggtgtttctttccctgagtcctaagcctgttgtcgttattcaccgaggtgacccttcagcctcgcagtcctcctacaaccctttcttgtacaatgtccccacagctggggatgaccactctggtctaggggacgcccgaagccgcccggcactgaccgccgccccctcctccggctcccacttcccagcggctgaggttcactttccacaccccttttccagccccaccctccctgacccgcctccattcccggtccccacagccaactcacgagacccggaacgcgcaaggagggagagggggttaccggcccggcgttgctagaagcgcggcacgaacaatggccgggcagggaacaaagatgccgacctctcctcgaaggcggacggagcagaggcacttccgggccggtctaggattccatgtctcgatgtccggcgttcaccttgcttcggactcaacccccaatttcctggcgtccagttctttttcagcagtgaatcacataatcagaatgtcatacgtgtgtgggccgcacacaggttttaaacggaaaacgttgatgaagcatagaccgttaactattgaaaatgatgatttttaaaagcatttttaaaattaatacattatttatggtttaaaaaccctcagacaataccaaaattaataaagtaaaatgtcaaaccccacctacccctccttagtcccactccccgaggcagccactgtcaccgttagcctggaatttgtatatcattgtgatcctctctcacacacacaatggcattattttatatttagccttttctcccccgcttattttaacgttttcacttcatgtatcctaaaaagctttactcatcatgtaagtctaacttattgtatgggtgcataacagtccataaagcaatttatttgtccaggcccctatgtattctttatttaggcatctgcctgcgtgcttgccttctttcctccctcccttcctcttttcctaccttcctccctcccttcctgcctttctcccatcctcctttccttttctttctttcttgtttttgttttttgttgttttttttttttgctgtaaaagttttctggagttttagtaataataatacaaaatcaaaccaaaaccaattaaataaatttgtcacccaggctggagtgcagtggcaccatcatagctcactgcagactgcaactcctggctcaagcaatcctgcctcagcctcctgagtagctgggactacagtcacataccaccatgcccagcattttttttgggggaggggggtagagaccagggtctcgctttgttggccaggctggtctctaactcctgacctcaagtgatcctcccacctccgcctggcaaagtgctggtacaggcatgagccaccatgcccagccttaaataaattttattggtacaaaagagcgtaattgtaggtactgttagtcattcatcagttttactatgccaaccagaatgatggtgtcacgtagattaaactatattctgtttgttttaacagaatcttatcatttattttattaaagcagtaagaaagtatcttgtgtgttaatggaggctccatgatctgttttaactccaaaacggtagtagctcggaaaatttctttattattttcctcaacctagccttctgagggcattaaataaacccaagctttatgctttacttctttttctttcaaatatccaataagtatataatcaataagagcactaacatgcagaaaatttgctcaaaaatcctcatcactttttccaccataccatgttcacttgcaaatccctcattacaaactttcctaacaaactatgaaatgagagtaaatgctcaatttctcttggacttgaatagactgtttaaatatgttattcttttccattttgtatgaccatctgtgacaagtaaatgcaatttaatatttgtatgaaacttcttaaatgtctcactggcagttggttagggtctctcactggtttatatgtgcttgctaagtgggtcaactatagggctcaggcaggctccagcccagagtcaagtgggcagcacgttggacttcacaatggttagccctgagagagactggctttcatttgtctgtttccgggaagattccactatagcagtactttgatgagtatcctgggacagaagggattatttttaacatataactgggaatccgtactgaatattgaaaatgccacaccaactcaaagacaagaaatactgactgcaaaatcaaccaaaaaggttaaggattacctgaatctagaagcaggcatattgggatactaactcggctgtgggttatgccataagctaaaaaaattaagatgaaataaaacaa

SEQ ID NO: 586082 - DNA, 4001 bp, Homo sapiens
ttctagattcagttaagttctctgaatagaagccttcatgttttaaagtactatctttagtcaggttttgagctgaattttttggatgattagatgcacaacctgaaagaatacttgaattaacttccattccacactgtagggtgttgtctttcttgttatctgaagttccatattgtactgtatttatcctctcaaagtttctttcaagtgtattctgctcaaaatgagctgtttcgatatgaaaacacatttcatcataattcacacctgacaacttgcaaaatggacatataatttcactttccatgtgaacaattaggtgagctttcatgtctggttctgaggttactgtttcaccacaaatattacaggaaagcatggtattgacaagtagctagaaaagaacataacattaggtttcaaagatttgaagaaaaaatgtgtttcataaaatgatttgagacaattacttggtctttaacgctggattattttgatgaagaagttttcaatgtacttactgttcctcaaatacaaaaacttatttataaatatcaaccaaaatttcatttatttttttttaaaaaaaggcaataataatgaatacaagtaattttaaaaataaaatatttcaaaaaatgtctctggcccaaggtggagaaaaaataacgtttaaaaaattgtccaggtaagataaatcaggtaagaaaaaaatgaagagaagaaacctatttatcaactgatatatctaaatactgaatactgaagctgattatattgaggaggtaaataaacacatcttacaagtagagtttaacactgtaaacttagagtcttacatgtatcaagtgctatttaagtgctattattgtaatttaagtactattattatcgctctacacataaagaaattctggctcagacaggtcaccacaagcagaaaaaggtggaagccaaaatgccaaccccgtcgtgctccacagcctgtactctcagccccaagaataaaagcagaagtggtatagtagaaaaaagcacttattccagagtcaagagaactgggtaataatttcagattcatcattttgggtaaggaatctcatctctctgaggttcagtcaaagactactgtaaaatccaaaggtagttatttttggattttatggacaaataaagtactgactactgacataaaagtgttaaaaaaataattttaaaaaaagcaatcacttcgccaccaccttcctactacaggtcatcgttcagctaaagactatttaaaatcaaacaggaaaagtaatgacactatcacttcatttaaataaatttacctttaaaatacctccctacattgtccttatttttttcatttctctccagacaaatggatacagtctctgattttagaaggcagttctcccgagcccccagtgggattaatgtcacacccggagtttcttctcttccggtggctgggacacggtcagacacagaatgatgaacttggacatggactcagattaagcgggtaagagacaagagagtacccaggtgcctcagaggaagcgagtgagaggcatgaaggacccagtgccaagctaggtacgtggtgggtgaggtcagaagaccgcaaggccgagtctcccaaacgttccgcgccaaaggcacaagccaggcacacgaaactagcaggcactaactgggtcaaagctttgggcctggggaataagggaggggaccatcaattcttaccggcccagaggccagcagctgccacactgagctccgctaggcttcccctttgggcctcgctggcagacgagtgcgtgcgcggcgtccagtacctctcctggcctgatgactgaggccaggccttcccaatacgcagagtttcacagttaaccgaggaaagaattaggaacttccaacaccttggccctcagtacctcattcaaaagcacttccttactcccacggaaaagaagtaatcccagaatgcgccgctccacgccggtctctatgcagtgcattctgggagatgtagtcttttttttttttttttttttttgagacggagtctcgctctgctgcccaggctggagggcagtgcgcgatctcggctcactgcaagctccgcctcccgggttcacgccattctcctgcctcagcctcccgagtagctgggactacaggcgcccgccaccatgcctggctaattttttgtatttttagtagagacggggtttcaccgtgttagccaggatggtctcgatctcctgagagatgtagtcatttttgcattcctcccatttccgagtttttccttctcccatcgagtttcctgccactcaattgctaggagagaaaaccgggctctgaggtcattcatacttaatctgaatgagttcacagggcaggtcctggggcaaatagcagtctacactagggcctgctgagtagcactctattttagtatcaataaagggtttataatgctgctaggtatcaagctcccagctatgcaccgaaggtaaaggataccaggttctttcctcaaggttacaagataacaaatatcttggtttgtatgtatgtatgtatgtatatatatatattttttgagacggagtcttgctctgtcgcccaggctggagtgcagtggtgccatctctgctcactgcaagctccgcctcccgggttcacgccattctcctgcctcagcctcccaagtagctgggactacaggcgcccgccaccacgtctgactaattttttgtatttttagtagagatggggtttcaccgtgttatcccggatggtctcgatctcctgacctcgtgatccgcccccctcggcctcccaaagtgctgggattacaagcgtgagccaccgtgcccggccgtatgtatgtatttttagagaggaggactctttctgtcacccaggccagagcacagtggctaaaatagctcaccgcagcctcgaactcctggcctcaaatgatcctcccatctcggcctcccaaagtgtgagccaccatgttagcccaaaatcacaaatatcttgtcattcaggctttatttcattcaacaaatatttaaagagtgtctattagaaaggcgttttgcttgcaacaggagctgcagcagtaatcaaaatacacaaaattcaggatttttgaggcttacatgctggtgaggtagaggaaataaaaagtaaattaactgatcatgataagtgctatgaagaaaataaaactggattggccaggctcagtggctcacatatgtaatcccagcactttgggaggccgaggcgggcagatcatttgaggtcaggagttcaagaccagcctggccaacatggtgaaagcccgtctctactagaaatacaaaaattagctgggcgtggtggcaggtgcctgtaatcccagctactcgggaggctgaggcaggagaattgcttgaacccgggaggcgtaggttgcagcgagctgagatcgtgccactacactccagcctgagtgacagagcaatagatttttgagactgagtctcaaaaaaaaaaaaaaaaaaagaaagaaagaaagaaaagaaaactggattatagagatacgaatgtttagaaaaggtcttgatgaagggttgagtgtgctgatgaacaaaccttacaccaacaggggaaatagcatttcagacagataaaataacaagaacgaaggcctaaggctggagcaaaaagaacactttttgaccagagcataatgtggtaaggagaaaaatgattacaagatgaggttagggttgtagacaggggccaaatcatgtaggacctggtagaaaactagtgaggtatttaaataggagggtgatgttatctgatgataaatagtatgtttttaaaaattggctaggcgcggtggctcacgcctgtaatcccaacactttgggaggcagaggcgggcagatcgcatgagcccaggaattccagaccagcct

SEQ ID NO: 586083 - DNA, 4001 bp, Homo sapiens
taagaaaagaaaaagcctccaggcttgcctactcctcaaaagcgagcacaaccacgccgctaacagtagactcacatttctttcctctgtcacactgtagtaagaccttcacgatggctccatattaatcccccacccttacattattttggaaaaaaaataattagagcccaataagccctctcttcaacttcaaacttcaggcatgcatgttcaagataaataaattaccattttaatgttgtatttcatcaaatttaagacaatttttttacacattttagcatcagtgaaatagggatgcatcttacaatagatgacaccttagatcagatgaatgtggtaataatgttttggggttattttccattccaaatgtttgtttccatgatttcatgaattgcatagaatcttttgtagccttcccaagaaaacttaccactgtttgtaatgttatttctatgagaaaattaataaaagaatatatgaaaaaaatgaaaatgttttgttaaatggtggcttcttaaacaccaaagatcatttccaaaattccgaaccaaggtctgttaaacgactagtgagaaaaaaaattcaatgacaaataaaccaaagttctgatcacgccatcatcaataacaagtgaaactgataacaaatatgattatctgaagagtgggaaaatgattcaggtaaattggcttcaatttttgtccacctaactcattttgcagaatggccaccaggttacacagtcaagtcatgtagccctagattcactcatcttcatgggaaaaaaagaagaggggagtgcaggggacaaaacagacaaacccagaaacaccaaagtgccatcagtgttttgggattttttttaatacagtattggaaagccgcagcttcagtcaaggaccattccgtcctgtgtataactacatctcacagctgcaccttccccactgataacccacaacatcaaaaaatgttaatccttgttcaagttactgaactaattcattctctctcgcgctcgagcgctctttctctctctctcttccgctccccccacccccattcccctgaaatcaatgtctgaaaagcacatttcttcttctgaagctgtcaggatagacagacattcagccccattcaaccgaggagggtgggtaaactgcttctccccgcgccccgtcccgcgcgagcgctcacaatgggctgcatagtcccgcaggggctgaagagttcaggaaacccagacttgcaaggcgcccaacttccacccatctccgatccttgctggagaatgggtctgtgtctcggagagtgggcagcccaagatggacaaggagagaagtttgtgatcagtttggctaagctgggcgtggggagggaagggggaaagaaccaccccgaaatctccatccaccgccccctcagccagccgtcccctctaagcacgccgtccacaaattaacaagccgttgtttcctcagcttcatcagttctttattccccagccacagcaccaccactgtccgccaaaaaagaaagaaaagaaatccgaattgcaatccctcgcctttctacttagaaatgctggagctgcgctgaccgctctccctcccttcctcgcagtgaaactctctgcgtttccgctctccctccattcctcgcagggaggcccgaatgctcgccgccttctccctctctcggcccggccggggtcgcctcgcggcgccgggacccgaaggccaggctcgcgggcccctcccagcgacagcccgagcccggcccgctatctccaccgcatctcacaggctgagcccacccgcgcgtctgctcagctctccgcggggacctctcctctcctcacctcgtccgctctggggcgccgacttgtcccccgccgcctcgaatcttccgagtcgctgcaggggaggctccgaattcctagaagaaactgggatggaaggccgggaagtaggaggtgtttgctcaacttctgaggacgtcacgcctctgcctcccgtagccaatcagcagccgccctgagggaacaaccttctcatctgccaatcggcggcgctgccagttgctacgtcatgcccggcccctgctcctccccaagatccttctgtctctgatctctgatctctgacctgcgttcttagctgggacgtcgagttctcccaggataattatcgaccaggtttgtaactgtccgtggcagaaggcgggcggggacggaaagcaacgaaaatagtctgggcattacgctctaaatagaggtgcacatctcctggggaaaagttgcgagcgccggtacctcacgtttgtttagctatagacacttttcaaagcatttcaccgccttgtcacaaccctgtgaagccagataacagttcttacaacagttttagaagccagcaagcggagaatctgagaaattaaaactgagtgtgttcatgtgcatatggcaatgtccaatgttattgaaaagtcctaactacctaggaggcctggagggagggggaaaacgtatttcatagacactagccccagcactaggaactgaagaatcgtctgaagcccagctgtgattccccaaggcgtcaacggtcagaagttaatcttccctcctgtttttacaactttctccaccacttactcttcttatacctgccatagatgtatttagctactgaactcctatgtcaacaatctatagccagaacgttcttgagactccactcatatctccaattgcagagaaaattatttatttatttatttgtggtagacatggggtctcgctgtgttgaccaggacactggtctggaactcctagcctcaagctatcctcccacctcgtcctcccaaagcactgggattacaggtgttagccactgtgcccaaccccaaattagaattttatctgtaagtagagttggaattttcttctgtatcttcagcttcacatttccaaaatcggatcccttatcattcttggaaagtcttccaaaggctgtgtagtggttcacacctgtaatctcagcactttgggagactgaggctggagaatcacttgagcccaggagtttaagactaacctgggcaacgtagcaagacctgtgtctactaaaaataaaaataataaaaataaataaaattttaaaaagccaggtgtagtggcacatacctgtggtcccaactacttaggaggctaaggtggaaggatcacttgagccgcaggatgttgaggctgcagtgagccatgatcatgccactgcactgtagtctgggtgacagagtaagaccctgtctcaaaaaataaaataaaataaagccttcccttttgtgctcaccagctctgttactaatatcactgccttcctactcaccacctatccagacttaaaaagccacggtcacttcagttcttcctctggcccctcagccttacccttggtgttgacactgtcctttaaaaaccccactactatcaccctacttcaaacccctttttatatataacgtagaccatatttttttaagcatacaactccaattgtctcattggcctaagcaaaaagcctcagagactacccagtacttgtggaacattagcccaacgttcttcacataatgttagttgcttcagatgtggccaaaatcaatgaccttggctttatttctgcagcagaaccagcctgaaaccaccactgaaacacaatttatgccttgctatcttcctaaggattaagcatctgggtaagaatgtaagaatccttactcttctcctttgagttgtaaatcatgggcaagttacttagttttcaaaaaaagcctgtgctccattatctgttaatgggttaataatagccactacttcgtggagtcatgagaacaaaatgagataatggccaaagtgccctgttaattgtctcactgaagaaactggaaatcattatttattttcctccaaatacctcatgttgtagact

SEQ ID NO: 586084 - DNA, 4001 bp, Homo sapiens
cataacagagatgcataaatgctttattccttccttcttttacttattcaacaaatatttactgaacatccattgtgtgccaggcactgttctgggtgctggagaatacattgatgaaccaattggggaaaatgtcctgctctcatgcatgtaacatactaatgtaggatccagaggcaatcggcaaataagaaaatctgtggtgtgttacaagatgataaatactaaagaaaaataagtcaaagaaaagtgggatgcaggagttaccactttaaataaacagttatcaaacaaataaaaccttctgatgaggatgtttgccttagcagcaaaagtaattgtgaaaattttttaaaactcaagtatccattaaggaggagtaggcagtctggctacctcggtcactgaactgttttgaggtagatatgcataaagcagaaagagcagtgcctgggaaccaacttccacccataacactctttcatgggaaaataggctaattccctaaaacaaacttacatgtcaatgaaatacactgtttataaatgtaaaactacctacacagacacgaacacactaacaatcaatgaagactgtctcactcctttattcctgaacttaaaacttttttttttttttttttttttttttttttttttttttgagacggagtctcgctctgtcgcccaggctggagtgcagtggcgcgatctcggctcactgcaagctccgcctcccgggttcacgccattctcctgcctcagcctcccgcgtagctgggactacagacgtccgccaccacacccggctaatttttttgtgtttttttagtagagacggggtttcactgtgttagccaggatggtctcgatctcctgacctcgtgatccgcccgcctcggcctcccaaagtgctgggattacaggcgtgagccaccgcgcccggccaacttaaaacttttgtacaaactttcaactgaaattattttgatcctaaagatcacataaaaaagaaaacatctcctttaacttgtattttatttcaagacagagagatagaatattctggctcggaggattcagcaaaatgtaattcaatgtcaattactgaatctcttcaaaccaaagcatttgtcagcagaaaattcccataggttaactgtagaccttaaaatcagaaacgatgcaggtaaattactgcacatctacttctcctgaaaatgacatttataggtattaatgtttatatagtggcatcaggaataaagttagtcataataacaagcaattgatttctatttcacaaaaacgtacacttacaggatatttgcataagtattcacacaagtttcatttgaacaattccaatctccttaggaaaaccttgctaatgtaatttgaatacagttctaaatagatgtgaattaacactaaagatggtgaccctacagaataacagagtggatgtgtcataccctgctctggtgaggcacactgtgcagtcttgtgcttcggagtcagtacctgtagcattctgcttatgcattaaatgcagcaaatgctttgttccttaaacctgagaattcactgttcagtttttacaacgaatgcttagaacacaaattatagttcaattccacctgcttttttgtttgtttgtttttagaatttttctaaatttgcccttttctgataaattcttcagccttgatttcatcctggtcattaaagtgttcagctactttggcccttgggacgggttttgatttaaaataatccaacctccccaaattccctgcagcatgagtgtttttacctgccaggaggcagaggcaggcaggaaagaatagaccctgatcttgctccagacctcactggaaccctatggaaaaccaaggcaagcactcaccgggttcctgagtctgcagagccaattcttccacagcagggctttgaactggcacccggcatgccccatgcctgctgctccctgctctcagtcaggaagccagcctgtaaggatggtgcttatatctgctgggctcaagtgaaggcatgttgcctattagtcaattctaacaaaagtgagtgatgcaagagagattactggtgactgaataaaacaggcatcagatgtcccctcttgttcggcatctgctgagaaatcttttcactagctgttcagtgtttcaggagggttgaattacagaaagctgccttcagggactttctcgggcatacacacatacacagagagggtgccctccctttccgagaacccacagaactgatctgtgcgacaagaagtaatgcccacatttaccatttacctccctttttttctggatattaattagatggaattttccttttttcttctgaagcattggttattacacaaatttgccaaaatatttcaattttggtggtcccatggcagagagtttgaagggaaggagatggaagcagtgttggtgtctgggggagtttggggaatgggtgactcaagttccactctgctactgcacctgcacttcatacttctccttcacccatttcctccaaagggatcaggatctacgtttcaaatggtatcgggtgcagatgtggcaggactcagcaagtggcctgtggattacctctgagtcctgtttgattcctgaacacttgcactttctaagtggcatgatggattcagcttgccagctggtggctccatcgtcttggaagccaggccctcttgagttcctgttgcccccagttgtggtcagaaggatttcaggcaacccagtcttgtggtcttctatttcataaagcaattttcacaagctgtgaatgcttgataaatggcttttgcaataggaaacagggaacacaggcttcagcaaagaaactgactcaattattttgtaaacttatttgtttagagcatgcctattttattttattttttgttacatggctggcagcactagagtgaaggccattacttagcaggatggcgcccagcaaccataagtggatttgcctgatccccatatgatgttcccccttgacctgtgacttctcaaaggtctttggggttgcctaagtattgctactctggttctctttgcagataacatctagaacaccttacaagtaattgtcataatttttaaaaatctagtataagaaaaagcctccaaccataaggtttttctcatgttatgttcatagcagccagtttttatgctgctatgccagaattatgtcagagacacaaaaattatctcatccattgctttcatggaacaatgctgtgttaggattttcagataaacagaaccaatgggtgattcattgatcgattgattgattgattataaggaataggctcacacagtcatggaggtgggcaagtcctaagatctgcaaggtgaattagcaagtcagagacccaaggaagccaatgatatagttccagtccgagtccaaagacctgagaacaggagagccaatggtgtagttgccatccaaagactgggaaacttgagacccaggacaagctggtatttccataaagtctgaaggcagaaaacaaaaaaaagccaatgtcccagtatgaaggccatcagacagaaataattatctaacttaggggaaagtcagactttttgttctgtttaggtcttcaactaattggatgagacccactcacactagggagggccatctgctgaattcagtctacctacttaaatattaatgtcatttataaacacccttgcagaaactcccagaataatgctatcttttgttccgtgtttcagccaagaaaacaaacaagcaattagagcccttcctaactccatgagctgccatattaaatgcagaataactgcttagtgaccccatattagcaaatttggcctgatacaattttatgttccttccatcattatcccatacccttatatccatttccacacatattccccagatttctgcttgtatacatta

SEQ ID NO: 586085 - DNA, 4001 bp, Homo sapiens
ctcaaaaaatatatatatataaaattaataatttacttatttaattcatatgtataattagttattgcttatctttttagaacaatctaaaccattgtttttcttggattgtataaagatgacatcctgtgccatgtgaaaaataggactttgttgattttttatgatggtagaaaagggtacatattaggacaacagtcattcctaattagcactcatctgctgatctttatttgtaaagccacttttcttcaaatcaaaagtatttgtaaatgaaaagatttaataattttaataacttagacataaactgtttaatgtagccactaacacatgccatgtataaatttaaattaattaatattacataaaattgcaaatttagtttctcaagtgctgtatcacatttcagatgtcccattgccacatgtagctaatggtaacccaattggacagatttagagtgttttcctcatcacagaaggttctattggtcggagctgcctgagatatttctaaactaccgttcttttttctacctcattaatcatatttctgaaagaaaagaaaataattacaactataaactagttttgatagaaaaaaataagcacaaagaaatcatatctctgagatcttaacttccatatcctaatacagggtttgacattctggattttgagaaaatctgggcatttattatgacacattctttcaactaactagctggtactaattaagtatctttatttagttgcctctatctttattggtaatataatagtaaacttttaattttgagatacaaagaaaataattgtcatgattgtaagtttgaccaggatagaaagacttttggctgaaagaaatatttgcataaagtaaatctgatatatacttatttaacttcttttcaagcaacatgacactcgagatatttctaaagataaacagtgagatgatgataaaaccttagacatttgaaatgaactttataaaatgaaacatttatcattactaagtttcattatgaaacttgataagcattgaggatactaaggctttgaaaatgaaaacaaagaatcgtatcagaatcgagtagctcaaatctaaaaatcctacattaattaaatcaaaatcaagtttgcatagtaatcatttcctatgcaagtagaatattgaatcaaagttatgatagtcttttccaaatagaaattaaataattaataatctctctaaattgttagtcttgtttcttagtttaaatgattgggtggggtagaaataattcttcaatagattatttttagaacaagtagtttaaatatttaaaggaaatgctttctgccttgttcttaagtgttaaccatgctttttcatagaaaggaaatgattcagctctaaaaaagtacatgaagtaaaaatattcctgtaaccatacataaacatacagtcttcaaacagaaacatggcttggcgtacaatgtcatatatatgtatctgatacatagatatatgcacacatacatataatatttacacatacacatttatcgaataataggatttaaatgtgaatataatggctttggaactcttaagaaaggaagtaagtagggagttatttcaaagtttttatcttagaagttaactaaaaaatgcggcaaaaaaatcttatttttctccccctatttacactaattttttttactgagatgaaaccaaagaaattcttaattctaattaaatttgattgcaaacttctagtcaagacaaatatattcataagattagatttgtaaaatacaaacaattagaaagagtatttgtaccttaccttttatctggttgcttcctgaagtgagtactcctaggagaatgagaaatgatctctaatctttaggaatctggagaatatctgaataaagtagatttcttcatgttctactcttcacaggtaaagagtaatgatagcctttaaaatggtaatacaagtgtttatcccagtaccagaggaggagctacatgaactaaggcaggcaggcttgaaagcactaatcagtgaaaacccaaggataagtttgggtggaggaagggtgggagtagagataaaataaattttgagtacatgactatggctccaaagcattgaagaaatatgtgtgatctttttgctaaggtgtaggacgtcttaatgagcagttgaaaaaacaaacaaaaacctcgaagagttacatggcttagggattggggtataattgaaaaatagccagagttgagaagtttagccagaataggcagaatgaagattagaatctaagctaaaaaaaaaaaaaaaaaagagagagacttcttttggtaggttactgggaagaccttcaaatgagaagtgaagtaaaaattgaattaatttgttcaaatttttaatttctctttatccactggctaaaaaataattagtaaatttcaatttaaaataccatatgatatttcaaacaaaattgaaaatgtaacaagaatttgaagtaataagtatggaaaatataaagataaattagctttatggaaattcatttgtttactttgcaattatatcagtatttaatttataatgaaaaagttgtgttccaaagaaatgttaattttcacaatgttttagcacaaattgaaggaaggagtaaagtataaaataaaactttgtaaatgactgagctgtcacagagagaaaaaatgagttgacaaatacttttctcaattacagaaaagtagacagaatagtgataagtaaccaaaatcttttaagagttaagaatgcattttggaatctgtgtatgtattgtgggatctggccagcagcctgcaatgcaacggggctctctctttgttcttaggcggatcggcaggttgagaaataatagacacacacaagatagtgaaagctgggtccaggggggtcactaccttctggtcccacggtgccaacaatgcactggatataccagcatttattattaagtttagtgagggcaggggtaggttagtgagggatttagggtcatttgattatgaggtgagatggtcacatggggatgaagtaattctttaacataacatttgtatatagaagtacagtacatttgtatggagaagtacagtatacagagataagaatttacaatatagtgtgtgtgttagtaatttctaacagagccttaaaacagaaacacaatctttccataacctatgattagcaagatattaatcagcagtaacagttgcaacaaaagctggttacaaacaatccatggaaataggacgtgaagatagacaactggttagacgagaaattctcagaaaggagtatgccttaaccctaaagaggtgtagaagagccatggcaagatgaggacgtttatagccctatcttatccatatggacaggcacccccccgccccatgcatccgtttataggctctccacaagggtcgcattccattcctagagctatgaacatctgcttttctgggataggaatcttggtgatgtgaaacctccctgaccgcacgtccattcataggctctctgcagggggaagcacgtcacgcgctgttggctcattctggcagtccaacctggcattgtctttacacaatactgcatgcaattttgtatttacaataattaggagcatttcatcttttattctgtagcaatagtttcagggggtctccctacatctttctctattcctttcactgtgagcaaaaagtttgacttaagtaaaaggcagcaaattcaatgcaataactccagtgaagccacaggtagtgtgaaatgctataaaggatgagggaaatataaatattatatatataatattataaatatataatatttaatatataaggactttatatatataattatattatatataattaatttataataattatatataattaatttataataattatatataattaatttataataa

SEQ ID NO: 586086 - DNA, 4001 bp, Homo sapiens
tataatataaactctatgagggagtgtgtgtgtgtgtgtgtgtatgatgatttatatatatatgatgatttttacataaatatgatgcatttatccaggtaaatgataaagttttactcataagatgattccaaattatgtaaagtattgactaaaatcactggacaaacatctgccactaaatatgttcaaaagaatgtgccatgggcaatagcaacataattagaacaagaatataactaatttgattgaagcaggcttaacttcctttaaatatattatctttggtctgcttttataaaaattagtttcactacatttgatttcataatcatgtggtcttaacttattgttaactttctgtatttctcttttgagctgctttcttctttccagcagaagctgtgggcttcccctctgaggactttcctgggttctgaagtgttactacaccttttgtaggaatagctcctttgcacacgcatcaaatgttaagccagtgcaatacataaatagacttcttcatgaaaatgccatctattaatagactcacagtcaatccctgcctaaacagccagctgatgaaaaccatatttttctattgcgtgtgtaagtacttccattggaagtaacaccatctatcactttttcaattctacatggcaaaactaaattttctatgaaaaaatacaatggtgcttagaagaaatacagcaaggttactgcacaaccacattaacaggctaaaataatgcttcagtttaagcatcaggtaggcatgttttcagttagctaatcaagcccctagcagcttgaggacaaactacagagactgataaatttgtccctctgggtgatcacttgacacaggtcaattttttctgggtagcctggtatgaactcagagaccgtaatagcctcataaactatttcaggctaaaggcgaaaatgattcactattcccacagtgaaagaggaaacaaagacacacgccattgactgggaacttctgccccgctcataaagcctgtgaagtgagtttaacaagggccaggggaaccgagaaagacatgaaggcaaaggaagcgctgcttccccctaccacttgaacaaaactgattcggatgtacagaagttccccctccccacctatcctcccagaaaggagaaatacaaataagcctggcgatgagaggagggggaggggtaagacaaggaggaagagacataacaggggatgggcaggaggggagggagtttttgcttcactgcccttgttcaaaaagcacagccatcaacagcagatgtctgacaccctttaagtctgaacaatcagatgatgtatatgaaagtcatttgtaaaagtttcaagagttacgtaatacaatgaatgttatacaatgcagatattcattgaatcccccctgcacaaagggaagggagcacttttcaagacagccttttcttcctgaatctgttccaaaaggagcctcagtgacattctttgaggccacacaacacgtttgctccaaggtcagaaccggatgcaagacccttcaaagaagcctccaaaacaaaggtcttcaaaggcatcaaccgatttttacaacttctttccaagggtgaacttagtcctgctgattggcgtgtaacggaaaagccagtggctgctggggatgtacctgctgatgcccagttcaaagtcgccctccgcgctcgtggggcgccaggctgttccgttctttgccgcctcaagatccatctcagcctgaggagaaaccacagcctcagaaccaagtacaccctctccggcggcccggcgcacgagtcgcggggcccgggggcactgggtggaggtccggccactcccgccccgcgccccacgtcccgggtctcccttcgaggccagacgcgcccggacctctctcacctcgaacctcgcgcgtgtctggcagggcctctggacgcgcgggcgctgcagcagaggggcctggactttgctcgccgcggcctcgcccccgcccccgcccccgccccccacgcgcgtccggcccgggaaacgcctaccgttgcagccagggcgagggccgcggcccgcgagagcagctcccgccgcccgcccagctctctccccaggctaggcgcgggccaggggcgcagcctgccgctcttgccgccggggcgcccggctggggccgccgcccaccctggcgacccgccagaaccagcccggtcgcaggataagaccgagatcaggctggagcctcgggtgccgagaaagcctcgcctgatgggccacccaagcccctgcagatgactgtcacaccccatgggcgctcagttttgtttttaaacccataggggagacagtttccggacgcccaacaatcacagggcggcccaggaccgagagagagcaatagactcgcctcttgcttccgcatccccagttctggtccaggtggcactgaacccaattatctccaaggacggcgagagtcagccagggccggcaggaaccatcacattatgctccttggggaggaggaacgctgttggtgccctcttagcacttaagagacacagagttttagggctagaggggtcttcagcgatcatctaattaaaaccccgtatgtttaacatatgaagaaacggatgcccagagaggtgaagtcctgcctgaggctgcatcggtggaaccagagtctaggggaagcctcctgagtcccagtccagtgccctggctcactgctctcatctaagacttctgtctgtattgaattgtctctgctcctaccacctatttgagtatgactttcttctttctgattaattcctccacactcttcccaaaaggaagtgtctaaaacggggagccataagtttcatggctttgaaaccggagactttcaaactcagagcttcacatcttattaactatgtgactttggacactgtgctcatttctctaggcctgtttccttatatgtaaaatgaggataaaaacatctcccttatcaggttattgcgaggaataaatgagttgaggataagggaattaagtactaggtaaaagcacctagtactatgcctaaaacatagtaggtgagcaacaaatacaactttccttccttctgatcaggtagcaggatgaccagtgggtccttgcacctgctatgtcctgttaacacaattgttagcccaaggcttgtctgagttctcagagaaccttaaagcagagcatggtataagtagagatgctgggtggaccctggtgtgaatctcacctttcccatgtaccagctgtctggccaggttatgtaattcttgactcagtcattggatctataaaataagggtgttattaggattagggatactgtgtgtaaagtgtcctgcacgtaggagacacctaataaatggtgactattattatagtaaaagttcaggcgaggccaaggaagaaagactggaacaggagccagcagcttcggcactcaccccttacttgtgctgtgcctctgcatcctgctctgcctgccacctggagctaaggtggaacttgacttgaaactgcatgctggagtagaaatgaatttagttgagtatttttcctcaaaatgttttctctccatatcagtctaccatgaccatgaggattctcttcttaaatcaacccaaattccttcccttcactggtctaacaggcggtcagatcattatttcaagatactctgagacggaagcagttggaattgtgtagtttgaaagaaggcttgtggtgactggaggacattattaaactcattagcacataaggagatgacagtttcttcagtctctaataaaagagaatttgataaagtaaatgcagatacttgaaggagtaggaaggttcagaacaaaaactaaagcaaataacatgtatgaggcaatgaggtgtatttgcctgtctgtctgtctgagccgattcacaaagttgtccctgcaagaagcca

SEQ ID NO: 586087 - DNA, 4001 bp, Homo sapiens
ttaacaagattgtcgaagtggtttgtaatgcatatcaaattttgagaaacatgactatatagtatctagcacaaagccttgagaaacagaaggcactacttatctagaggaaattttatcttcctaaatccaagattataaaaataaagtttaaaatacaccttagtgctgacaacatattgtttttatctgctgttaatagcacagttttaaagtattgtcaaaggacctctggcatcagaatcacctggagtgcatgttaaagatatcagacacctacctaggccttgccccacatgtactgaatgataatctaaagaaatgcactggaaaaaaatctacattttaaacaagctcattagatgattttttaaaaaaatttactcattctatagatatatactgtgccaggtactgttttaagcactgaacagcctagacatctttgctgtcatagagcttagactccattacagggagagtcacaattttaaaaaaaggcatacataaataaggaaaattagagagtggtcagtttttggtatataattaaaacagggtaattttatgaagagtaatgtggtatttatatacatctggtcagagaaagccccttgtagaagataatgtttaagctgcaatctgaattataaaaggaggttgctatataaagatcaaaaagactatcccaggcagaaggaatactatttagatagtagagaaaagtgcactgagacaaagcgacacaaggtcaaagcaatttgtgagccagttggcaggtcctcactgtatggaaagctacaggttgactatgatggctgcccccatgttcctctctgttacccaatgtttcaaaaggaagataaatttaacttgaaacttgtcaagtttgagatatttgtgagataatcaggtagtaatatccagcactaagtagataacatgagagaagaactctgaacatcttaattgctctacacaaaatctatcagtcagccaattcttacttattgacagctgtgtggatgctatcatggcaagtactatggaacatacaagaaaatgtaaaaatagacagaatattttatttataaggacttttgccttaaaaaatatttctaggttcatgtaccaagatggaaatcataggacaaaatacccatgtgagaagaaatcatgagatgcacttaacgttcaagcatccttggtaagaataatctgacaaatagctaagatatactggttggatggaaaacatgggatctttggttagatgaaagaagatatggctgggcgcagtggctcatgcctgtaatcccagcactttgggaggccaaggcggctggatcatctgaggtcaggagttcgagaccagcctgtccaacaaggtgaaaccccatctctactaaaaataaaaaaattagctgggcatggtgctgggcacctgcaatcccagctactcagaaggctgagccaggaaaatctcttgaaccctggaggcggaggttgcagtgagccaacatcgtgccactgcactccagcctgggtgacagagtgagaccctgtcacagggaaagaaagaaagaagatatgaattgtatggatgctttaaaatgaccaaaataatagtaggatgatcatttctgactatgaaaaagtttcatacacacacatttttgtttccatctttaccacaaactattctttctaagatggagaagtgttttatattcttcacaagcttcaattgttttcataatctctaatacttttgctttgacttactttaattccttagatgctgttttgagtgggccccatccagtcagttgaagtccttaagagaaaagactgaagtcttctgaagaggataggataaagctttcagatacaaggtatcaattttttgccagaatttccagccttctagtctggcttgtggattttggaagtgccagtcaccacaattacatgagcgtgttttctctttctctctctacatacacacacacacacacacacacacacacacacacacacggcctattgattctatttctctaggggaacctaatatacctggcaagacagacgttatgtgatgaatagtacaaagagtgactattctagtatctaagaagactgaggaagaacattgtgatctaaaatggtttcgcccacagatgaggatggccctgaggttagtttctggaggaaggctaaggtttcagtaagtagaaaaatgtggaggaggaacaagggcatagttttaggaatgcaaggtgaattatctcatggtagagaaatgagaacggtttggataggatggactgttcatgcagaaatggagagagagataaggtacatacgattgtaaaaggcactgaaccaatttttaggacaacttttataattttctggaatgaaagagacaaagccattggtatttggtacaattaacctgattatttgacattacagccatggatatactggaaggacttggggaaacacaagatttaagtagactcattaaaatctagtttgatagcagtaagtaagactatttgagaggtatttttaaggcggtaggtaggtaaagaggacaaggaagaagaaataaaaaaaatataagttcagcgatcaaacttttaaaagttgtaacaaaagagtagtaaagatggtaatagagaagttatgagacagaattggttttggggaaatggtaacattcagtttaaatatgcaaatttgggttgatattggtgtccaagtgaaaatatctggcaaacagatgtaaatgtggcactaataattaggaaaattgccaacctagagataaacttgcaattgtcatatgcacagaaggaataattaattttgctttaaaaatctcatgatgtcatctaaatgcacagaagtggtgtaatgtagctaaaagtgttacttctagagcagagccatccaacagaactttctgcaataattgagatattctccacacatccaatatcctagccgctacacatatgtggctattgagcgcttttaatgtgcctagtgagggagctgaattttgagttttatataattttaattaatttattttatttattcagctttaatatgtataattgacaaatactattgtctatatttaaggtttacaacatgatgatgtgatatacatatacattgtgaaatgattactgcaatgagcacatccatcacttcacatatttacgtgtttgtgtgtgtgcgtgtctggtgagaacgcttaagatctactctcttagcaaatttcaaatatacaatacagaattattaactgtagtcaccatcctgtacccatcttataactggaagtttgtaccctttgaccaacatctccccatttcctccacctcctagtctctggtaaccaccatgctactgtctgcttctaggagtttgactttttttggatttcacacatatctctggcttatttcacacaacataatgtcttccagttccatccacgttgtcacaaatgacaaagttcccttcttttttatgactgaataatattgcttttctttatcgattcatgtgtcaatggacactttggttgtttccatatattggctggtgagaataatgccgcaatggacaggggagtgcagatacctctttgaaatactgatttcatttccttggggtatatacctagaagtgagattgctggatcagatggcaattctgtttttaatttttttaggaaacttgatgctcttttccataatggcagtaccaattgacattcccaccaaaagtgcacaaggttccctttttccatacccctgttacctcttatcttttttataatagccattctaaagctagaaggtgatatcccattgtgttttttatttgtatttctctgatgattactgatgttgagcaccttttcatgtacctgttggctgtttgtatgtcttatttgggaaaaaatatctatt

SEQ ID NO: 586088 - DNA, 4001 bp, Homo sapiens
acaggggaatctccctttgaattctcttgctttgatctcaccatttgtaaagcaatggaccctttgcataagccaaacataaaaccttcagagggccaagccgagaaaagttctctgaaggaggtgagaaatcggggaccaccagtaggagtacctcttctcacacctgcacttttactctagatttggtttctggtcattccttgaaagaatttatttatttaaaataggtggacccccccaaaatttcattctttagtttaacaaaaagggttatgtttcaaaagttcattttaaaaatagttgtttaaaacccaaagaacactttcccatgcaatataatggcacaattggtgctgaagtccctaggaagccaatccaaatacagttgcaaaatgtagtttgaaatactgtacagttaagaaaaatggtggaagtcaatactataccaataatggtaatcggtaattaagtaacaactttcaaaactaaagagctttgaaaagagaatttcgatcaaagttttaatcagaaaaaaaataaggaagtaggagtaggtaggtctttatacaaattctgtagcagacattagaaattgatcacactagtaattttatctatttcacttaaaatcatgtctttttctatgaagccagtgttttattagtaatcgccttgtgcaatctttaacaacaactacttttttggtaaatacactaatgaagtgaaagggggaagacaataaaaaagacacacattttcacaagaacttgtcaaagactgaatgatggagtacgataaactgcgtgtgtgtgtgcgtgtgtgtaaaggcgataaagtactagccgcaattgctgctgcagtaaaagccccaggaaaggaagaagggaaaggcacatgtgcataattctcctaggttagagaggagggggttaaaatgagtatgttgagtggggtagcatctaggaaccaccaacaggtggcagcgtcaacccaagacatttaggtgtgttcccaaacccagagtagaagaatttcacggagctgaaaatgctttagtcagttgaatatagaaagaatgctgcaaaatataactagttgatccagagttatttgtccattatttatctacctcctcaagtctctaagcaaagtagccaaaatcttggaaaaaagtgatcctaagtaatcatgtcagagaagatcttggccagtagaagataatatcagaaaactgcacaattgcgtaatttgttttaacctaccttgatagatggtcttgatggataattgaaagaaacatttttaaattccacagttccttctatggattcaggtttatatccagctgtggaaaagttatctatactgggtttcttggaaaaacaaaggaaatgttataaatcttcaaaggagtaaactgacagtctctacattttaaaaatagtataaggatggttttcttccatgacagtttcctttctgctttagaagtgcattgagttagacatgaaggtttcaatacaacacaatctcctcttagaaaagaattaaaggcagtctctctttcccataaacaactggccaacattaaatttgtccatcctattgttttagtgaaaatgagggtgtatgtttttttgtctccttcttgcagtaatgatagttattcttcaaagcaataagaggtcttaccttatcaataacctggaaaatatgaaaggcagctcctcgggctattgcgaaggtttcaaagtgagggactgctgctccaatgcaataactgctatggattacactaaagaaaacctacaggaacaaacaaagtgatatttatctttctgcagttatataagaaagacaatagaatgtaatatataattattggtttaggctcacagagagatattagaggaattaggtaagaaagaatggaagatatgaccaaataaaaaagaacacagattacacttgatcttagccaaaaggccgagaagcaatagaaacacagattaatccaagtatccttggccttttcctaataaggaacaacttttgattatctcatagtcttgtggttatcacatgctgggatgtgtgaccagaaaaatctgctaactgaagtgtgctgaccatgtataaaccccatggtgagttgcactcccctccttgttgggtgaccccttgaactttaaaaagaaaaattcagtagattttattggctcagagacattgtactgttttcactcaaaccgtttttgaatttttgtattaggggacagctgtccattttaagacagactcatctctgcaaaaagtcaaataagaaaagaatccctcaagctaggagctcttactcctatcatatagatgaggatgcttaggcttagtaagccagatacccagccacacataaattgaggagcaaggatgagtgaaaaatcgttcatgctcacatttcactttatatgaaataaatgaatagctaaaagtcttaattatgaatgcctcaaattcaaaagatgaatttaatggaaagaagagaaatctgtaagaatggaaaggccaaacaaggatcaaagtataaagagcagatcattttggttcctcaagacaaatgtttcttaatcctgaactgatctgtttattgtaacttaagaggataactgaataaattattatttaacacataacccataagaatttaaaagtctccaaactgtgatactggacagagctatatgtagtctgttttttaaattactacatgctgaaaggacagaggaagaggaggtgagtgtaaactctacagaccatttccagagagaagacatttagcaaggtgaatgcagaactccgtctgatctcagcccagatgaaaggaaaagtctcacaagagaatggcctttttcactgctagattaacaaaactcagtgtatttcccagtggggaattcaattatgattcttccaaaagcggaatgcagatgcttgacacagcgaggacactaaaacatgctggatgaataaatgctgtcaattcataactataatttaaaggtgtatacagataatttgagggaaacaaatatttgtttaataaaaacatccatctttgaatatttatcttcaaagaggaattttggctaaactaggtaaggaaagattatccaggcctgacaccttgttctcaaacaagacttacagcaagaacagtcccgatggtatatccaggttctccattaagaatcaaggaggttccataccaaaaagcaagtccataggttccattcataaagaagtacacagcaccaagagacacttttgaagctatagtcctttttatgccaaaatcctttgcatctttgagattctgtgtataccttacaaaaacagaacacaacttagtagccactggggaaaataaaaccaagcatatcttgttatatttaaaaggaaagacctttgaagttctttctcctgggccctaaaggctatgactgttcggattgatgacaagacttcttctgccacagccccagctttggaataggcacttaattccttactggtcaatgagatgaccatctgtaataaaccacaaccacagttaaaaaatgactctgtgtagtaataatgttctgaacatttaagtcaggcagaatttgaattctaagtagactaatggtatttttttagactttatctctgtatttttaaaaatttgtcttcaaatactaagaggtaagatttcagagagaaaagggaaaatatcactattggtgactagacaggtttacctgatttcacatgcccttttctccattatatgtcccatttaataatccttttacaattttgtaattaacacaacagttccacaaaagggaacagcggggatactgccttcagagctgtgaattcataactattgcctattcgcatagcaagtctatccacctaaaaaatatattccacataataggagctgattttatata

SEQ ID NO: 586089 - DNA, 4001 bp, Homo sapiens
ctgcctcagcctcccgagtagctgggactacaggtgcgtgcaaccacgcctggctaatttttgtatttttagcagagacggggtttcaccacgttggccaggctggtcttaaacttctgacctcaggtgatcgcctgccttggcctcccaaagtgctgggattacaggcgtgagccaccgtgcccagcctatatttacttttaaatggtcctgaccaactaaatgcatttcataatctattgaaaaatactgactaatgaacacatatatacttgaatattattttatgtctttccttgggtttctctctggtttaaataacatcaacacccttactctttcctaagaactgtttttaaacctttcaataatttagcatggtctttttccagcttcttgcattgtctccaaactaagactctaagaaagtcttggtcgttgccaagagcatgtggattacttcccagtaccaagacttccagctccagctcgatccagctcttgccctccatcagtcagatgggctttccaaatgacacaactccacatccacctgcccttgggaatcttctatctgtttggcccccaagtaattcactctaggattagaaaggatggccaggtgaggtggctcatgcctgtaatcccagcactttgggaggccgaggcaggcagatcacccgaggtcaggagttgaagaccagtctgcccaccaatatgatgaaaccccgtctctactaaaaatacaaacattagccgggtgtggtgcacatctgtaatcccagctacttgggtggctgaagcatgagaattgcttgaacccaggaggcagaggttgcagtcagtcgagaccatgccactgcactccagcctgggtgacagagcgagactctgtctcaaaaaaaaaaaaaaaagaaaagaaaagaaaagaaaagaaaagaaaaaaaaaggaatcagtcccttctcataaagcatttacattcgagttgtagtttcagggtccttgtttgtttcccatctgtctgtctgtctgtctctctctctcgaccaacctgtgtagagtgttttgcgaaaaacacacatgtacaagttactagattgactcttttttttttttttctgaggcagagtctcactctatcacccgggctggagtgcagtggccatgatctcagctcactgcaacctccgcctcccgggttgaagcgattctcctgccccagccttccaagtagttggaattacaggcgcgtgccaccaatcacggcaaatttttgtattttttagtagagacgaggttttgccatgttggccaggctggtctcgaactcctggccttccaaagtgctgggattacaggagcgagccaccgcgcccggcctattagattggctctttatccctgctgaacatctctagttcttcttcgactcactttgaatcctggaagcaccactacattaaatgtctcttcatactaataagaattttcgtccaaatcgcgcaatcacctccagggccaggaaaggggacccccggtcgggagtgcggactgggcgtggtcactgaccccgagcgtcccctccttctggctgacacgcggctgcagacgcaggagcctcctgctggcgactggagtgtcactataaataattgaggccaacacccgcggagtgacattccaccccggtaggcctggcctacagctcccagcaagcctcgcgcaagctcgtggactccatctcccggcgggccggcactgccctgccgggcggtcaatggcccgctctgagtaggtttttccgtttttacctgacagctgagaatgtctggaagcggaggggcggtagcagcctgcctgggaatgggccaccccgaatcccgacccgaaataaatgcaccagcatgctgacgcggtaaaacaggagccgccggcaatagcagtttcaccctcatcccactgagggctctatgttggctcccgcccccatcccgacaaccccctcgcgccttggcggtgattggtgaaaagacacatcaatctcacttcaagctgtgattggaggatatgttgtcagccccctccttttggaactgtgattggagggaatcgcctatccgcccgccccctgctctgggcggagccgagcaggaagtgggcctggcttttgccaggtgctcctgtgggctccgggtgacgtccaaagggtgtggcccgactggccctccaagctatggagtatccatagtaacgcgtcagccgccgacctcgggccattttcccaaggctccaggatctctagatgtcccgtcgtctcaagggcgtgtagaacgcgggttttgggggaggaatgaacaaaaatcgactgggagttttttcaaaacacgtacatatgccctgccacccaccccgctctcctaggtgcgtcagaactgctgggacatctgtcacgtgaaggggtgggttgcccctccacacctgtgggcgtttctcattaggtggaaggagagacttggaaaagaaagagacagagagacaaagtatagagaaagaaaaatgggcccaggagaccggagttcagtttacggaagatccacgccggcaccagcctctgagttcccttagtatttattgatcattatcgggtatggcaggataataggataatagtggagagaaggtcagaaggtaaacacgtgaacaaacgtctctgcatcgtaaacaaggtaaaaaaaaaaatgctgtgcttttgatgtgcatacacataaacatcacaatgccttaagaagcagtattgctgccagcctgtcccacctccagccctaaggcggttttcccctatctcagtagagataggctttacaccgagacatttccattgcccagggacgagcaggagacagaagcctttcttttatctcaactgcaaagaggcattccttcctcttttactaatcctcctcagtacagaccctttatgggtgtcgggctgggggacggtcaggtctttcccttcccacgaggccatatttcatcacatggggagaaaccttggacaatacctagctttcctaggcagaggtccctgcagccttcctcagtgttttgtgtctgggtacttgagattagggagtggtttgagattagggagtggtgatgactcttaagaagcatgctgccttcaagaatttgtttaacaaagcacaccgtgcacagcccttaatccatttaaccctgagttgacacagcacatgtttcagggagcacagggttgggggtagggttacagatcaacagcatctcaaggcagaagaatttttcttagtacagaacaaaatggagtctcctatgtctacttctttctacacagacacaggaacaatctgatctctctttcttttccccacagtcacgtgtacttggggaagaactcccccggtgattctgacactcttgccctacgcctcagccattgagaactattggtatggagggcctgtaatttatcaaggcgcggcctcagatctgtctgcctcgcagataccttcctcacccgggtcagaatgacttgcctcaggctcctgccaaagagtttgcaccactcgtttcttccctgtaattacttgtttgcgtatttgtctccccactgggctgcagcttcttgggtagtggctctgttttattcatctgtcctcttcccttccaaatgcttggcaaggaaaagtgccctttaaaataaatcgacttgaattgggagtggtggtagggaggctgtcaatgagaatgaattcagggtgaaactaggtaggacaatgtcccaggattagtttggggttgagctggggagctcttggtgtatgggggggtcctattgtgactatggtggaatagccacgatactgagtgacattgggcgagtgaggtgggggagagactagacaacaccccacataacccatcttgacagatgtctcagaaagattatgggaatttcctggcc

SEQ ID NO: 586090 - DNA, 4001 bp, Homo sapiens
ataaaaaaaacccaagacagggtccttgcactcaaagatgaaacaatttagacaaagaaacaggagatacaacataaaaaggtaagtaacactaaaagacagcaaaagggtatagagaatggaaatactgtggtcaggtttgactgagagacgcttcattatcttgagctgggccttgacagaaatgtcaaatgtagctagcaaaaacatgatggtattataattcagtgtgtgaaaggacagagatgtggtgactatccaagagataataaatagtctggatggagcagaaggctgtttagggagttttcagggggcagggaagagggctgggattggactgccaagggcctggaatagtctttaccgcatatggccatgtttcccagtctagacggtaagtttttggagggaagacggtagtgcctcagtgtatagcaccatgtctagcacttgagaaataataaatatttcccaaaatataaataacagaaagggagctctctcccaggaaaaaccccataaatcaactcataagttactctcttgtaggtagagccactacaccagtgagaggacaagcttattgtataatgtagcaaagaacctggcacattggtcaccatgcatagaaatggaaactgagaaaggggcagggaactgatcccctcctcacaatctaatagagcagcaaggcagctcagcaactctcacatccgcttgccactgagtatgtgagaacctcgtcttcggcttccttgcgcaatgacagggtggcacgaattccaactctactgatttgattcatcatgaaaagttgcatgacaccagatacattctccactacccccagcatcaagattccaactctggctggggcatgcattaagtcttagcaaccatccccaactcacccctccctcaattcacctgtggtctctctgccattggcctcattcttctctgccacctgtggttctgtgacaacatctccattttcttcatgtccttttctgggccgctgtcgagctttggcagcctccttctttttggctgccttcttcttggccaggtcggagggcatgatgatgacccacaggggtaggttactgttgtttcagggagcctgaaggaaggcaaacagatacccccaaaccctaaacttactagtaagaatgcctgggccctgctccatccctctcaggaatcttcgtatcaacatcaagcctctgatgccctggcctgcccccgcctcgtctgttccaacttggtcagggtatcccaaaccaatgccgattctcagcggctcttctaatcttaacatctcttcccacaggcaccagtcccccacggactgcctcactttggaaacgctccttctttcagggcctccggctggggaccaggttctgcccctcagcggaggtctccgtctccggtttccctacaacttggcgctccgcactcagctagccgcctcactttccgggcttcctcctcccgtccgtctcgggcctcttctcgatcgtccctctccacatcacccggccgtcgagcccagcctcttgccgggacgcactcgtcctcgcccgcgtgagtcccctccgagtctccacgctcgtcacccccgggtcctcccccaccccgcccgtcagcttctctcccttagccctatcttccccctcgcagagccctccatccaaaccccgtccctgcttcctcttctaattctctttccccctcaccggcggggaccctctccctacagctccccttcccctaactcactgggcctcgctgctcggcctatgtcgcaacagagctgctccttaggatcctccgcgtgcggccggctcaccagccaatcacggcctcgggtggttctcggcgcgccgcgctgcctccttggaagtgtagtcctcaagttgcagcggccaagagtgagacccgccttgaggactactatgtatcccacagacctcgcggggccgcgtgacgccatcaggatgcgcgaggctcggggagggggcgggattagagtccaagagctctctgctagcgggcgcacttcgggcgctggaaactgcaaatcccagattgctcgttggataaaccggctgagccttcaggctttaccccacctctcgaaaatccattgagctgttgtggagttacgagtttttagagctacctaaccgactcaggcagcagggcgtgcaactacacttcccagcttgcctcagcgggagtagatcgaaacaatgggagaggagaggtgggagcgtgaggggaggactaaaatgaagggggcgctgggcagggaggggttccagaaagcggggcatcgctgcaaagatgttgccaacggaattccttcacgaaagaaagcgccttggtttcattaaaccttaattttagaggctggttcattgttaaacttttagaaggtgccagacgttgttttggaacctcggccgcttagcctccccgctgccgcattgttaggtttccactgaagccatgcaagtttggtggaaagggccccgagataaaaaggccccttggctgagatttgttttattattagttagccatgctaccgggcccgttactttccctttgagtctcactgtttaaaatctctcacatgacattttgggctggatggtttaaaaataaatacaatctctcaaggacttcacattacctacattgtaaactccaaatgtttagcctcaagtacaaggcaggccctttgtgatctttgttacttctccaggctcctgtgcagcagaagcctcaccatcagtgacgtttggggcagcaaaggaagctattgctccctttgagcatattctccaaatgtggcaccttttcgcccacagtccgtgactcaaacaatgagaattagtttttcttctcaaactcatacttcagtagaacttacctacttaaatagttcggagattaagcgtgctattttacacctgcatgcctttgaacatacattttcctagaatatcctccaccaacgaagtgcctactatctgtcaggctcagatatatgtgctggagttgcaatggtgcaaagtcactccctgacctcagggagctcataataaagaaggaacatgtgaaaagtaaacaagccgggtgtggtggctcacacctgtaatccaagcactttggaaggccgtagtgggaggatcatttcagcccaggagttcaaggctgcagtgagctataatcaaaccactgcactccagactgggtgacaaaactagaccctgtctctaaaaaaacaaaaaacaaaaaaaacagaccttgacaccatgaaattaagtgccctaaacgaagtgactttcgtgtgttgctggggtacctaggtggagacctcacttggcatagcataattaagagcataaccccagttctatgcttcattgtgtggccttgggcaaagtacatgttctcctctgtaaaatgggaatatagttacaaaaagaatacagttaaatgactgtaaaacccttctgtatgaagcaaaagagttatttatgggccgggcacggtggctcacgcctgtaatcccagcactttgggaggccgaggccagcggatcacgaggtcaggagatcgagaccatcctggctaacacggtaaaaccccgtctctactaaaaatacaaaaaattagccaggcatggtggcgggcacctgtagtcccagctactcgggaggctgaggcaggagaatgtcgtgaacctgggaagtggaacttggagtgagccgagatcacgccactgcactccagcctgggcaacagagcgagactccatctcaaaaaaaaaaaaaagttatttatgattgtggatcacataaaaagcactcatttggctgagtgtggtggctcatgactgtattcccagcactttgggaggtggaggcaggtggatcttttgagctcaggagttcaagaccagccttggcaacatggcgaag

SEQ ID NO: 586091 - DNA, 4001 bp, Homo sapiens
ctcccctggtagggtccccaggctggggcctgggcgagtaaagcatgcccctcctactacccaggctagcttactgcacgaactgggagtttccaccaaggagaaagagtgttggcccgaggtaggactcctgcctctgtgggaaagccaagatcttgtctaggtgctgggtcagggcatccaagttcaccctccacacgaagcgcccgtctacctctaccaggttagtgagcaggtgctgccgcacggccatgtcctgtgggggtgcagcagttgggggaggttccttgtgcggtctgggggtgccactcttcccttgacaggtcctggtctacaataccatccggggcaccttgggtgtatcacctggatgacagaactgagctgttcatccgccagttttcgggcacgggagcggggcagctcatctgcgatgttgatggccctcatggctgccacataggttgcaaagtgggagacacctgtgctttccactgggctgatatctacagcaatgagacgttccaccagctctggctgtgggagagaaccgaactgggaccagtcttaggcagacatagggagtctcaggcatggctcctggagcctgaacttggtcatccaacgatcatgtgagtcccaggttgcctgcagggccctcagggtatatactgaatgggaggaggccccagacatgggcggctcaccctctgtagtgccagcagcatggctgtctttcctcccatgctgtggccaacgacgacgcagggcaccaggcccagctggggcagaaggtcctgcaggtcctggctcatgatctcgtagctcatgtctgggctgtgggggctgtcaccgtggttacgagcatccaccgtcagcacctggggagtggggtgagacggggctgcgttgatatccccattctgggggtagacagccaaaggcttgtagggacagcaggtcaaaggtgtggagagcctggggatacaccctgtggaggggaagggcccagtttccagacctaggaggcccagatgaagaacctggggccactctgccagagaagagcaggccccagggttgtgaccacgtctctgaagggctggcctggctgggtggcaatctcggagaatgccaggaaggagactccaggaatttccaacagtaggagcacagaagaatgggctgccataagaggtggtgagctcccggtcatccctagtgaacaagcaggccccttcatggaaagggtgcaggcgcctaggcatgggccagccccgatggagatctacaacatgaattaatgaagatggcaacgtgagggaataaatggggttgccgttcagggtccatactcagagtgagggatctggaagtgagcgtgagaagcgggaccccccctgccccgcctcctctcaggccccgcccactcccgcccagccccaaaggagccccgcccactcgaaagctcaccctacggcctgtctgctgggccaagatcttggcgatggagttgaagttagttttgctgccgaagagcccgtgcaaaaagacgacggccgggagggctgcctccccgtccagaagcctgtaggaaagcggaagcggcctggcaggggaaggatcgaggtcagagtctgagccggcggagacggggaaaggggtagggggaaagagctttgggggagaggcctgggaggtgacaggcccaaagggaggagatggggccgtcggggcccggcaggaaaaggaggacagaggatggcctcccgcccggtgcccttgactgacctcggctcggcgccccctcggccgccgctgctgctgctgggtgcgacaggcaccctcgcgaagctagggccgtgggggccgagtccctcacgcgggagcctccaggctcgggtccagcggagcatgcttgcaagctgttggccggctcgcatctcacaaggtacgtcctccccgcgctccttctcccgccctagctcgcagccccgcccatttccgtcttcagccgccccgcccagttccgacttgagccccgccctctccccgcccccatcgcgggattctccgcccttggtcccgtttccttacgtatccccgagaacagtccggccccgcctccatccccgccccttacgccattacgtaatccccgcaggctttgcgcgggtcgccctgagcgccgcacctggcctcgccctaggctgggcaacccgcggtgcttgcccctcccctcgcgaagcgccgcggtgcgtagaatctgggaattcggtctgcgccgctctgtgcgtgctcggttctggttgcagcttagggctcggttcccgccccgcacctgccatcgctcactgacctgggtggctgccatcgtttctgtgccgccggcgggggcgagcggcgccagggtggctctgggcggcggagtgccagtgtggtggcgccgtgctccactgccgggggcccgggcaggttgggcggagcacggacacccacccatcctggagtcgtcgatctagaaggagctcgggggcactctagagctcttccccaagccccttcgtcccttttacgtttggggaaggctcccccagtctgatcccacctgcttttctgcccatactccccattctcatactcccctatcaggcaccctgcctttcaaggtcttctccacaccccacctcctgctggggtgctgtctgtcttccagatagccagttgcccgagtcctatacttttttttggtgggggtcttaccctcgcccaggccggagtgcagtgacgcgaccgtagctcactgcagcctcgacctcctgggctcaagcgatcctcccgcctttgcctcccgagaatctgggactacaggcgcagactaattttaacatttttttttttttttttttttttactgaatcatggttacaatttttttttttaggccgggtgcggtggctcacgcctgtaatcccggcactttgggaggctgaggtgggcagatcacctgaggccaggagttggagaccaccctggccaatatggtggaaccccgtctttactaaaaatacaaaaattagctgggcgtggtggcgggtgcctgtaatcccagctactcgggaggctaaggcaggagagtcgcttgaactcaggaggcggaggttgcaatgggcggaaatcatgccactgcacaccagcctaccggacggagacagactccgtttaaaaaaaaaaaaaattgccgtgggtggtggcacggccctgtaatcccagctactggggaggctgaggcaggagaatcgtgtgaacttgggagatggaggttgcagtgagccgagatcttgccactgcattccagcctcagtgacagagcgagactccatctcaaaaaaaaaattttttttttaaaaaatagaagcgggggcttgctatgttgcccaggctggtctcgaactcctgggctcaaagtgctgagattacaggcatgagccaccacacctggcccaacaaaattttttttagagaaggggtcttgctaccttgcccaagctggtctccagctcctggcctcaagcgaccttcctgtctcaggtatatggcttttattttattttttctgagacagggtttcactgcgtcacccaggctggactgcagtggcacaatcacggctcactgcaacctcttccccctgggcccaggcaatcttcctgcctcaccctcccgagtagctgggaccacagatgtgcaccaccatgtctggctaatttttttctgttttgtagagatagagtcttactatgttctaggcatagcaaggggacagtttcaggctggtctggaactcccagactcaactgatcctcctgcctcagccccctgagtagctggaattacaggtgtgctccaccatgcctggcctcagctataggccttttaaggcattgtataactgctgcctcctcctcaagccttcgcagactttctgagttaaaactaat

SEQ ID NO: 586092 - DNA, 4001 bp, Homo sapiens
gtccccaggctggggcctgggcgagtaaagcatgcccctcctactacccaggctagcttactgcacgaactgggagtttccaccaaggagaaagagtgttggcccgaggtaggactcctgcctctgtgggaaagccaagatcttgtctaggtgctgggtcagggcatccaagttcaccctccacacgaagcgcccgtctacctctaccaggttagtgagcaggtgctgccgcacggccatgtcctgtgggggtgcagcagttgggggaggttccttgtgcggtctgggggtgccactcttcccttgacaggtcctggtctacaataccatccggggcaccttgggtgtatcacctggatgacagaactgagctgttcatccgccagttttcgggcacgggagcggggcagctcatctgcgatgttgatggccctcatggctgccacataggttgcaaagtgggagacacctgtgctttccactgggctgatatctacagcaatgagacgttccaccagctctggctgtgggagagaaccgaactgggaccagtcttaggcagacatagggagtctcaggcatggctcctggagcctgaacttggtcatccaacgatcatgtgagtcccaggttgcctgcagggccctcagggtatatactgaatgggaggaggccccagacatgggcggctcaccctctgtagtgccagcagcatggctgtctttcctcccatgctgtggccaacgacgacgcagggcaccaggcccagctggggcagaaggtcctgcaggtcctggctcatgatctcgtagctcatgtctgggctgtgggggctgtcaccgtggttacgagcatccaccgtcagcacctggggagtggggtgagacggggctgcgttgatatccccattctgggggtagacagccaaaggcttgtagggacagcaggtcaaaggtgtggagagcctggggatacaccctgtggaggggaagggcccagtttccagacctaggaggcccagatgaagaacctggggccactctgccagagaagagcaggccccagggttgtgaccacgtctctgaagggctggcctggctgggtggcaatctcggagaatgccaggaaggagactccaggaatttccaacagtaggagcacagaagaatgggctgccataagaggtggtgagctcccggtcatccctagtgaacaagcaggccccttcatggaaagggtgcaggcgcctaggcatgggccagccccgatggagatctacaacatgaattaatgaagatggcaacgtgagggaataaatggggttgccgttcagggtccatactcagagtgagggatctggaagtgagcgtgagaagcgggaccccccctgccccgcctcctctcaggccccgcccactcccgcccagccccaaaggagccccgcccactcgaaagctcaccctacggcctgtctgctgggccaagatcttggcgatggagttgaagttagttttgctgccgaagagcccgtgcaaaaagacgacggccgggagggctgcctccccgtccagaagcctgtaggaaagcggaagcggcctggcaggggaaggatcgaggtcagagtctgagccggcggagacggggaaaggggtagggggaaagagctttgggggagaggcctgggaggtgacaggcccaaagggaggagatggggccgtcggggcccggcaggaaaaggaggacagaggatggcctcccgcccggtgcccttgactgacctcggctcggcgccccctcggccgccgctgctgctgctgggtgcgacaggcaccctcgcgaagctagggccgtgggggccgagtccctcacgcgggagcctccaggctcgggtccagcggagcatgcttgcaagctgttggccggctcgcatctcacaaggtacgtcctccccgcgctccttctcccgccctagctcgcagccccgcccatttccgtcttcagccgccccgcccagttccgacttgagccccgccctctccccgcccccatcgcgggattctccgcccttggtcccgtttccttacgtatccccgagaacagtccggccccgcctccatccccgccccttacgccattacgtaatccccgcaggctttgcgcgggtcgccctgagcgccgcacctggcctcgccctaggctgggcaacccgcggtgcttgcccctcccctcgcgaagcgccgcggtgcgtagaatctgggaattcggtctgcgccgctctgtgcgtgctcggttctggttgcagcttagggctcggttcccgccccgcacctgccatcgctcactgacctgggtggctgccatcgtttctgtgccgccggcgggggcgagcggcgccagggtggctctgggcggcggagtgccagtgtggtggcgccgtgctccactgccgggggcccgggcaggttgggcggagcacggacacccacccatcctggagtcgtcgatctagaaggagctcgggggcactctagagctcttccccaagccccttcgtcccttttacgtttggggaaggctcccccagtctgatcccacctgcttttctgcccatactccccattctcatactcccctatcaggcaccctgcctttcaaggtcttctccacaccccacctcctgctggggtgctgtctgtcttccagatagccagttgcccgagtcctatacttttttttggtgggggtcttaccctcgcccaggccggagtgcagtgacgcgaccgtagctcactgcagcctcgacctcctgggctcaagcgatcctcccgcctttgcctcccgagaatctgggactacaggcgcagactaattttaacatttttttttttttttttttttttactgaatcatggttacaatttttttttttaggccgggtgcggtggctcacgcctgtaatcccggcactttgggaggctgaggtgggcagatcacctgaggccaggagttggagaccaccctggccaatatggtggaaccccgtctttactaaaaatacaaaaattagctgggcgtggtggcgggtgcctgtaatcccagctactcgggaggctaaggcaggagagtcgcttgaactcaggaggcggaggttgcaatgggcggaaatcatgccactgcacaccagcctaccggacggagacagactccgtttaaaaaaaaaaaaaattgccgtgggtggtggcacggccctgtaatcccagctactggggaggctgaggcaggagaatcgtgtgaacttgggagatggaggttgcagtgagccgagatcttgccactgcattccagcctcagtgacagagcgagactccatctcaaaaaaaaaattttttttttaaaaaatagaagcgggggcttgctatgttgcccaggctggtctcgaactcctgggctcaaagtgctgagattacaggcatgagccaccacacctggcccaacaaaattttttttagagaaggggtcttgctaccttgcccaagctggtctccagctcctggcctcaagcgaccttcctgtctcaggtatatggcttttattttattttttctgagacagggtttcactgcgtcacccaggctggactgcagtggcacaatcacggctcactgcaacctcttccccctgggcccaggcaatcttcctgcctcaccctcccgagtagctgggaccacagatgtgcaccaccatgtctggctaatttttttctgttttgtagagatagagtcttactatgttctaggcatagcaaggggacagtttcaggctggtctggaactcccagactcaactgatcctcctgcctcagccccctgagtagctggaattacaggtgtgctccaccatgcctggcctcagctataggccttttaaggcattgtataactgctgcctcctcctcaagccttcgcagactttctgagttaaaactaatctctttcatggaa

SEQ ID NO: 586093 - DNA, 4001 bp, Homo sapiens
ccaaggctgcttgggctccggtggcagaaagcgacggggtcccatgggtggctccgcaaaggggatgcccaggaaagcagagacagggcccccgggggtcttcaggcgaatgccccgcagccggcccccacgcaccgtcaccagcagctctgcatcctcccggccctcagcccccactcctccacccaggagccagaggaggaggagaaggagtggggaagccagggaaggcgtgtgcagcagacactgcgggggcctcatggctgcagggcaggcggcgtctgctgggagaaagaaagggaaagggtgaagggtcggtcgagaagccaggagggaggagattagggcactgtcggcccaagggttatcgctcagctgcagaggaggtggggcaggttggcaaagatgaggggagagagggagggagggaaggagacaggcagagacaaggacacaggccagcgggcaggaggggaaagagatcaggcagacacccatatccagacaaatgcagggaacagagaggagcaccctctctgctccgcaggggtccactgccctcacctcttcccggaactgggccgggcccagctcgtgcagtgagggcaccagaagcctcagtccacgaacaggccacccgacagggcgcggcctcacggacgggcagcgccgctgggggagcttgcggcggcctgaagcgcagccccgctctcctgggtcggccagacccggggccctggggggcggtgggctgggcattcagggtgtggaagcctcaggtcccggggtcccccaaatcctgcctagtccactccccacccaaccctgccccttctcatccaatgtctggcaccgagcgctgatgcccgcgggttcccatcagctgcgcacgctcccagcccagccccagcaaacaggctcgccagcccgcgtcccccaggactcgagagccccccatccgtctgaagctgccgtgcacgccgccgccggcggagggcagtagagaccgagaaaaggtcggcgctccccgccccgagccaggagccgggaacttggggagggggcctgggggctcgagggccttgcagagccgcctgaagggcgagccgggacgcctgcgttcccgggactccggagatccccggctgcaggggcgggggcgctattttgggggcagcagctgctacggttccggcatctccagccaaaggatcaaaattccccgggtgggaactcccccctctcccgccggtcactcctagcccagcccccgccgccctgagcggggggtggtggtgctgctggagattaactaggaaacccgagtggcgctaattataactcggggcttccgccgagcctccccttcccaaaaaatagagatggagtctccgcgggagggggcgtcctgggcctcggagggggcctctgcggggcgctgcgcaggggcgctggcttgtggccctggggatgggggtgcccagcccggcgccgggaacctgcgcagctcgggtaccgccccaattagggggtgtcttccagtggccccggactagggagcgatcggggaaggggtgctcgggggtccccgcgggaatcggagcgcagaggcggcggccgttcccgcgggctcgggctcctgcgtgggcgtcggtgagtgtgaggcggccggggaagagttccggacgagtgcggggcagcggagggcggcgcggggcaggcccggggaagcgggagccgtcccgttaggggggcctggacccctcggggagcgcacggtgccccggacccgggccttaaggagagtcccgggcggggagggagactcacctgaggcggccgagccgggccgggccgggccgcgccgggagctggaggcggccgatgttccccggcgcaggctgagccgactctgacagccgccgcctccggccccccgcacacaccccctccgggcctcacagcgcccccgcccgcccccgcccactgtctccgcccccgcccctccccgctctcccgggtggccacctcccctctctctccctcccttggagccgagacccggagaccccggggcccagacgcactccagtgccagacgccgaccgacgacagagcgcagtgacagacgcgacccaaagacctgcagcggcggagtagacacccacgtgacagacagacggacagaagcccgtggagacagacacgcgcagacggacgacctcatgcagtgacaggcacagacaaacgcagggacgactttcacagacggacggacacacttggacaccctgtcggtctcgctcgaggctggtgaagttagcgcaaggccaaggggtcatgcatccccggccacgacacagacgggtggcatgggaggagaggcatgtgggagtgtggcagagtaccgtccccttaggggtccaggtggcacgggtgcagaaaaggtgacgtgggacactcctggggatgaaaggacacctgtgggaatggagatgtaaaatgggatcgctagtggaaatgaggtgggagggcatggagacaggagacccctgggggaggaaggggtgacttgggacacctgagaaggcaggacagcgtggtagcacgcgcaaggctgctgggcgaggccgcactccgcggcggcagtggaaacttctggaacccccgcgggtgggtctgtgctggttccctgacgggtgacttcggactttcgtcaccagggtccggtcggggcatgacatcaccaggcctagcattcattggccacgcggctggcaggtgggagcggcctggctcgggcgcccccagcctgctccgaggggcctgacccgcgcagattgccccccgccccgccctccaggagttcacccgtgtggacagggctgctgcagcggggtccccacgaccgaggtgcatgcggcaataccgcgcggcgcctgcttcctggaggcggccggctcaggagcccccgagaccccgcgtgggagagcggccggcgcaggccagcgtcgggcgtgcgtgcgcgcgcgcggcggtgcggggcgcggcgtggggtgggcgcgtgcgcacacgctcgctctaaccgccgcgcgccccgcagcgccccgcagcgcctcgggcacgcgggcgccgccgccagggaccgcgggcaccgggttgcggggcctcgcaggggttgaatccggagtcttgccagtccctgggccgcgcggttcccggctctccaagctgggcgggccccacgcccgctcgccccacgggaaccgggtcccgcaggcacggtcacccgcgctccgctcgctggagacggccgccaggtggcgcaaaaagcagccactcgggcctcggagactgggctgggttgggggtgttggggaggtgaacccctcgccatctgtgcccactgtctccggctttccccgccccaatctcaggcaaccccaaatcccctgcctggacaccgaggctccttgtatccggccttcagcgttctggccgcactagttgaaggctcctcactggccagaccatgtgccctagttgagatccctgaagagcagatgtaagggctgtgcatgggggaggggacaggagggtggatggtgggtgttgctgcggggggaatgaatctgaggcaggtttctaagcgtggtaattatgaattattaaaatgatggggccgcgtgtggcccctagtgcggtgcctgtaatcccagcactctgggaggccgagacaggaggatcgcttcagtccaggagttggagactagcctgggcaacatagcgagactcccttctccgcaaaaaaataaaatgatggaaacaaactgtgaacgagtgctctgaggcctgccccagtcctgaggctttagggatttttggccctgctagtgatgaaggcttgcccctgtcaccctccagacgaactgtgccacgcaggtgtcacctaacctctgtcgtcacgagtttctaggcctgtacaatgaagatagggaggg

SEQ ID NO: 586094 - DNA, 4001 bp, Homo sapiens
gccctcagcccccactcctccacccaggagccagaggaggaggagaaggagtggggaagccagggaaggcgtgtgcagcagacactgcgggggcctcatggctgcagggcaggcggcgtctgctgggagaaagaaagggaaagggtgaagggtcggtcgagaagccaggagggaggagattagggcactgtcggcccaagggttatcgctcagctgcagaggaggtggggcaggttggcaaagatgaggggagagagggagggagggaaggagacaggcagagacaaggacacaggccagcgggcaggaggggaaagagatcaggcagacacccatatccagacaaatgcagggaacagagaggagcaccctctctgctccgcaggggtccactgccctcacctcttcccggaactgggccgggcccagctcgtgcagtgagggcaccagaagcctcagtccacgaacaggccacccgacagggcgcggcctcacggacgggcagcgccgctgggggagcttgcggcggcctgaagcgcagccccgctctcctgggtcggccagacccggggccctggggggcggtgggctgggcattcagggtgtggaagcctcaggtcccggggtcccccaaatcctgcctagtccactccccacccaaccctgccccttctcatccaatgtctggcaccgagcgctgatgcccgcgggttcccatcagctgcgcacgctcccagcccagccccagcaaacaggctcgccagcccgcgtcccccaggactcgagagccccccatccgtctgaagctgccgtgcacgccgccgccggcggagggcagtagagaccgagaaaaggtcggcgctccccgccccgagccaggagccgggaacttggggagggggcctgggggctcgagggccttgcagagccgcctgaagggcgagccgggacgcctgcgttcccgggactccggagatccccggctgcaggggcgggggcgctattttgggggcagcagctgctacggttccggcatctccagccaaaggatcaaaattccccgggtgggaactcccccctctcccgccggtcactcctagcccagcccccgccgccctgagcggggggtggtggtgctgctggagattaactaggaaacccgagtggcgctaattataactcggggcttccgccgagcctccccttcccaaaaaatagagatggagtctccgcgggagggggcgtcctgggcctcggagggggcctctgcggggcgctgcgcaggggcgctggcttgtggccctggggatgggggtgcccagcccggcgccgggaacctgcgcagctcgggtaccgccccaattagggggtgtcttccagtggccccggactagggagcgatcggggaaggggtgctcgggggtccccgcgggaatcggagcgcagaggcggcggccgttcccgcgggctcgggctcctgcgtgggcgtcggtgagtgtgaggcggccggggaagagttccggacgagtgcggggcagcggagggcggcgcggggcaggcccggggaagcgggagccgtcccgttaggggggcctggacccctcggggagcgcacggtgccccggacccgggccttaaggagagtcccgggcggggagggagactcacctgaggcggccgagccgggccgggccgggccgcgccgggagctggaggcggccgatgttccccggcgcaggctgagccgactctgacagccgccgcctccggccccccgcacacaccccctccgggcctcacagcgcccccgcccgcccccgcccactgtctccgcccccgcccctccccgctctcccgggtggccacctcccctctctctccctcccttggagccgagacccggagaccccggggcccagacgcactccagtgccagacgccgaccgacgacagagcgcagtgacagacgcgacccaaagacctgcagcggcggagtagacacccacgtgacagacagacggacagaagcccgtggagacagacacgcgcagacggacgacctcatgcagtgacaggcacagacaaacgcagggacgactttcacagacggacggacacacttggacaccctgtcggtctcgctcgaggctggtgaagttagcgcaaggccaaggggtcatgcatccccggccacgacacagacgggtggcatgggaggagaggcatgtgggagtgtggcagagtaccgtccccttaggggtccaggtggcacgggtgcagaaaaggtgacgtgggacactcctggggatgaaaggacacctgtgggaatggagatgtaaaatgggatcgctagtggaaatgaggtgggagggcatggagacaggagacccctgggggaggaaggggtgacttgggacacctgagaaggcaggacagcgtggtagcacgcgcaaggctgctgggcgaggccgcactccgcggcggcagtggaaacttctggaacccccgcgggtgggtctgtgctggttccctgacgggtgacttcggactttcgtcaccagggtccggtcggggcatgacatcaccaggcctagcattcattggccacgcggctggcaggtgggagcggcctggctcgggcgcccccagcctgctccgaggggcctgacccgcgcagattgccccccgccccgccctccaggagttcacccgtgtggacagggctgctgcagcggggtccccacgaccgaggtgcatgcggcaataccgcgcggcgcctgcttcctggaggcggccggctcaggagcccccgagaccccgcgtgggagagcggccggcgcaggccagcgtcgggcgtgcgtgcgcgcgcgcggcggtgcggggcgcggcgtggggtgggcgcgtgcgcacacgctcgctctaaccgccgcgcgccccgcagcgccccgcagcgcctcgggcacgcgggcgccgccgccagggaccgcgggcaccgggttgcggggcctcgcaggggttgaatccggagtcttgccagtccctgggccgcgcggttcccggctctccaagctgggcgggccccacgcccgctcgccccacgggaaccgggtcccgcaggcacggtcacccgcgctccgctcgctggagacggccgccaggtggcgcaaaaagcagccactcgggcctcggagactgggctgggttgggggtgttggggaggtgaacccctcgccatctgtgcccactgtctccggctttccccgccccaatctcaggcaaccccaaatcccctgcctggacaccgaggctccttgtatccggccttcagcgttctggccgcactagttgaaggctcctcactggccagaccatgtgccctagttgagatccctgaagagcagatgtaagggctgtgcatgggggaggggacaggagggtggatggtgggtgttgctgcggggggaatgaatctgaggcaggtttctaagcgtggtaattatgaattattaaaatgatggggccgcgtgtggcccctagtgcggtgcctgtaatcccagcactctgggaggccgagacaggaggatcgcttcagtccaggagttggagactagcctgggcaacatagcgagactcccttctccgcaaaaaaataaaatgatggaaacaaactgtgaacgagtgctctgaggcctgccccagtcctgaggctttagggatttttggccctgctagtgatgaaggcttgcccctgtcaccctccagacgaactgtgccacgcaggtgtcacctaacctctgtcgtcacgagtttctaggcctgtacaatgaagatagggagggcagggatagtttatcaccagggttatcatttcctggaactatccctcttttcaccttgagctctcagcaaccgttgtcaacacaggcacctaacctgtcaagccaggaggcgtttccctacatagtctagcatagtaaactccccaccctccacagctgtca

SEQ ID NO: 586095 - DNA, 4001 bp, Homo sapiens
cacatattggtagcagacactctggaaggttgtagcgtctaccacccctgaccaaggctgcttgggctccggtggcagaaagcgacggggtcccatgggtggctccgcaaaggggatgcccaggaaagcagagacagggcccccgggggtcttcaggcgaatgccccgcagccggcccccacgcaccgtcaccagcagctctgcatcctcccggccctcagcccccactcctccacccaggagccagaggaggaggagaaggagtggggaagccagggaaggcgtgtgcagcagacactgcgggggcctcatggctgcagggcaggcggcgtctgctgggagaaagaaagggaaagggtgaagggtcggtcgagaagccaggagggaggagattagggcactgtcggcccaagggttatcgctcagctgcagaggaggtggggcaggttggcaaagatgaggggagagagggagggagggaaggagacaggcagagacaaggacacaggccagcgggcaggaggggaaagagatcaggcagacacccatatccagacaaatgcagggaacagagaggagcaccctctctgctccgcaggggtccactgccctcacctcttcccggaactgggccgggcccagctcgtgcagtgagggcaccagaagcctcagtccacgaacaggccacccgacagggcgcggcctcacggacgggcagcgccgctgggggagcttgcggcggcctgaagcgcagccccgctctcctgggtcggccagacccggggccctggggggcggtgggctgggcattcagggtgtggaagcctcaggtcccggggtcccccaaatcctgcctagtccactccccacccaaccctgccccttctcatccaatgtctggcaccgagcgctgatgcccgcgggttcccatcagctgcgcacgctcccagcccagccccagcaaacaggctcgccagcccgcgtcccccaggactcgagagccccccatccgtctgaagctgccgtgcacgccgccgccggcggagggcagtagagaccgagaaaaggtcggcgctccccgccccgagccaggagccgggaacttggggagggggcctgggggctcgagggccttgcagagccgcctgaagggcgagccgggacgcctgcgttcccgggactccggagatccccggctgcaggggcgggggcgctattttgggggcagcagctgctacggttccggcatctccagccaaaggatcaaaattccccgggtgggaactcccccctctcccgccggtcactcctagcccagcccccgccgccctgagcggggggtggtggtgctgctggagattaactaggaaacccgagtggcgctaattataactcggggcttccgccgagcctccccttcccaaaaaatagagatggagtctccgcgggagggggcgtcctgggcctcggagggggcctctgcggggcgctgcgcaggggcgctggcttgtggccctggggatgggggtgcccagcccggcgccgggaacctgcgcagctcgggtaccgccccaattagggggtgtcttccagtggccccggactagggagcgatcggggaaggggtgctcgggggtccccgcgggaatcggagcgcagaggcggcggccgttcccgcgggctcgggctcctgcgtgggcgtcggtgagtgtgaggcggccggggaagagttccggacgagtgcggggcagcggagggcggcgcggggcaggcccggggaagcgggagccgtcccgttaggggggcctggacccctcggggagcgcacggtgccccggacccgggccttaaggagagtcccgggcggggagggagactcacctgaggcggccgagccgggccgggccgggccgcgccgggagctggaggcggccgatgttccccggcgcaggctgagccgactctgacagccgccgcctccggccccccgcacacaccccctccgggcctcacagcgcccccgcccgcccccgcccactgtctccgcccccgcccctccccgctctcccgggtggccacctcccctctctctccctcccttggagccgagacccggagaccccggggcccagacgcactccagtgccagacgccgaccgacgacagagcgcagtgacagacgcgacccaaagacctgcagcggcggagtagacacccacgtgacagacagacggacagaagcccgtggagacagacacgcgcagacggacgacctcatgcagtgacaggcacagacaaacgcagggacgactttcacagacggacggacacacttggacaccctgtcggtctcgctcgaggctggtgaagttagcgcaaggccaaggggtcatgcatccccggccacgacacagacgggtggcatgggaggagaggcatgtgggagtgtggcagagtaccgtccccttaggggtccaggtggcacgggtgcagaaaaggtgacgtgggacactcctggggatgaaaggacacctgtgggaatggagatgtaaaatgggatcgctagtggaaatgaggtgggagggcatggagacaggagacccctgggggaggaaggggtgacttgggacacctgagaaggcaggacagcgtggtagcacgcgcaaggctgctgggcgaggccgcactccgcggcggcagtggaaacttctggaacccccgcgggtgggtctgtgctggttccctgacgggtgacttcggactttcgtcaccagggtccggtcggggcatgacatcaccaggcctagcattcattggccacgcggctggcaggtgggagcggcctggctcgggcgcccccagcctgctccgaggggcctgacccgcgcagattgccccccgccccgccctccaggagttcacccgtgtggacagggctgctgcagcggggtccccacgaccgaggtgcatgcggcaataccgcgcggcgcctgcttcctggaggcggccggctcaggagcccccgagaccccgcgtgggagagcggccggcgcaggccagcgtcgggcgtgcgtgcgcgcgcgcggcggtgcggggcgcggcgtggggtgggcgcgtgcgcacacgctcgctctaaccgccgcgcgccccgcagcgccccgcagcgcctcgggcacgcgggcgccgccgccagggaccgcgggcaccgggttgcggggcctcgcaggggttgaatccggagtcttgccagtccctgggccgcgcggttcccggctctccaagctgggcgggccccacgcccgctcgccccacgggaaccgggtcccgcaggcacggtcacccgcgctccgctcgctggagacggccgccaggtggcgcaaaaagcagccactcgggcctcggagactgggctgggttgggggtgttggggaggtgaacccctcgccatctgtgcccactgtctccggctttccccgccccaatctcaggcaaccccaaatcccctgcctggacaccgaggctccttgtatccggccttcagcgttctggccgcactagttgaaggctcctcactggccagaccatgtgccctagttgagatccctgaagagcagatgtaagggctgtgcatgggggaggggacaggagggtggatggtgggtgttgctgcggggggaatgaatctgaggcaggtttctaagcgtggtaattatgaattattaaaatgatggggccgcgtgtggcccctagtgcggtgcctgtaatcccagcactctgggaggccgagacaggaggatcgcttcagtccaggagttggagactagcctgggcaacatagcgagactcccttctccgcaaaaaaataaaatgatggaaacaaactgtgaacgagtgctctgaggcctgccccagtcctgaggctttagggatttttggccctgctagtgatgaaggcttgcccctgtcaccctccagacgaactgtgccacgcaggtgtcacc

SEQ ID NO: 586096 - DNA, 4001 bp, Homo sapiens
actctgaatatcttttttcctttactcaaaaaaaaaaaaaaaaagtcaaacgacttattgctaatgcatgtgtctgtttaatatttagcgcaatggtgcagggcgaagtaacaatgacttgagaccggaggaaacaactttcgcctgacttaactgccaccagcatttttctccttcacagtttgtaatctccaaccttttgtaatctttttcatgttacctgatttctgtatcagccaagtgagaaaattatttaaacccaaccaaaagcgctgagattaaataataaattacggaaataagcctttaaatttgaaaactaataagagaaccattaatttattaatgggcgcttactaggtgcaaaggcacttaaaaggacaaaaagctcctgaggtttttgagcacttaacgacgacttgctcatttttgtgacctcctaccctcaccctttgagcacctggcatctgcaggagctcaaaagttgaactgaattggggacgctgaagtaacaggatctgctctagtgagaaacccgtgggagaaactttggaaagtgttacctgaacagcattacgctatttcaaacagaacaggttgctgctctgtttaaccccgcatgggggactggaactagaaacctggacaccgaggaaccccaaaggtcttgggcaaagagaagggagcgtcacttgcctcccattcttgcaagaaacgctgtgcctcgtcagaaccaacggtcttatgtctcctaaattcgtctttcacgtactggtcgcccagggatttgaggtccgggggcagaacacggtgcagctgcaagacgcgcttgtacaatgcccggactcgagaaacgtgccgccccggcatagcgccccacgccgaccgccgactgcgcctgcgcagagggacggcgcgttcccgcacttctgcgaacttgcgtattagtgaaccggaaggcagacgaaagagggcgcgcgacctctatccggtttggtcccttgcacaatcaggtcctcccggaaacccaagctccgctgcgggcggaaaacgggtcggtccttctctaggaggggcgtggccctcgtggagtcgcgcctgcgcctcgtcgtggcttcttctggcctgcgtcctgacgacacaggccttgaaagagagaggtctgtggtgggccgttgtcatttctcagtcccactccactgtctttttcattcaacttcgtttctgtcctcctaccaaaggcctgagaaaagcttcgttaagatcgggctcctccgggattccttccatggttcccaacccatttgaggcatttagagtattactgcaccctgctttagggatcagagtgagattaatctcgccatccactagctcaccaacccacgctctttgcacagcgctgttctcccaatttatactctgggcatgggctcttccttgcaaacaacccaagtgagcccagagctggcggactccttagccaaagtcaagttggctgctgaaggatccttgggaagagttttaaacgtattgtttccaggaccacgaccctggagattctggttaaatagtctaggataataagaacgaggaatctagaaatttacaaagctctatcttttgcgaaggtaatactgagagtagaactggtttccaaagctggcagctccttgtgttgtcctttcctgtcacacgtttggttcttcagcaaatcctgatggcgtcaccaacaaaaatgcagaaatcaaccatttcgccccatgtactctaccacaatctctctccactggatattgtgttagcttccatatctgtgttcagcttctggtcatgaccaactttggtcatgctccaacataatttaaattaaatttggcctaaaatttcctccctactctgagttgctatgtagggaactgcaacctaacttagtatgtaaattaactgcaactgagagtatattcttgtgacaagtagctgagcttcagccaatcacaggctgccaactgatcagactatgtgcatataaggcaaatacgtcataatgtcctgcccaaataagactagcccaactgtaagcaatcaagctgtttctgtggggcacttcctttttctgtctataaatactgcctgcccacagtgctgggtagagctctctgaacctctccctgttaagtgctgctgcctgatgaatgcctcataaatcgtgtgtgtgtgtgcacgtgcgctcgtgcaaataaactttattagatttaacttgtttaaagtttttcttttaacaatctaaactgtaaatcggatcatttcactcctctgctcaacaaaagcctccagggattttcatcagagtaaagcccagtctctagcccttaaaggtttaaattttctcctattgctttctccctagttagccagttgcagccacactggcctcctagctcttagttcatattttaaaaagccaggtacactcccaactgaggccttggcacttgctgtcccgtctacttggagtgctttgccaaatgtatcttcctggctaacacttttatttcactcagcgcatacttcaggtccccttctaatgagaccctccctggcaaccctatttgaaaccctgcttgaagttgcaacctcaccaaaccaagaatttcttatgctcctcctctgctttgtttctctctatattacttacataatttactcatgtgcttattctccatttattatcccccaactagagtacaaattctataggggcagggattttgtgatttgttagtgacctgcactaggtctgtagtaagcactcaataaatatctgttgaattaatgtgtgaaactcactaacggtgtcagatgcctcatattcctgctggtgaagaagaggcagaaatgttgaaatttgtgtgattgtctcacagaccccagacttctttctgtgcaaaaactttctgaaagaaaaacaagacacactcagctactgaaggcaggtacttactcattttagtatccttttcagggcccaccacagtgccatacaaatagtaagtagaatttattgctttgaatagagcttctccttttgcttaaatttagggaaaatatgtgttttaaaaaacacagaactttttaaaaatggatttaatttggtattatgacaaactgcattaatggcaaggattgaatggcagcgtggttattttgcttcaggaaatttttttctaaccatacttcatctgttaatatccctgtaaaattgaaaattgatttcttgtccccgtttgtttttttctggtttcctttggagttaaagaacatgtgtaataaatacctctttcaagagccaacactcttataaaaatgtgagaaaacattctgccaatgaattaattaaaaaataaaggaattaattgagcctaaagagagtagaaagggtccacaaagcattggagaatcaatgctcaaaatggcagacgatgggtgaaagagaagccaagacatagtggtgtggttaggccttgagaagtggaataaagcaataacagtgagaataatgacagttaacctttattttattttttttacaacaagctggacagtgagctatgttttgaggacaaaacttttctctgtttccctgaccaatttaggctgatcagtgttcctcttgtggtaaaaatagccatgaactgaaaataaaatcacacttatatttctggccaccaatctagatcactacacttcatgcagacctttcctttatccttccttcatgtgtttctttttcttatatgttactctgcaagtgatttaaccgctctgtgcccagattttctcacttgtaaatgagctgggttaggtaatttgcagtactttccaactttactaatctctaaccatgacttctctcagattccctccaaaattttttgtaaagtgaaagagaacatatatccactcttaaataattgctttaaaaattttttgtttagaaa

SEQ ID NO: 586097 - DNA, 4001 bp, Homo sapiens
gggtgaccccgtcaccggagtccatcacgatgccagtggtacggccagaggcgtacagggatagcacagcctggatagcaacgtacatggctggggtgttgaaggtctcaaacatgatctgtaaggcagagatacaccatgtcacactggggaagccactggggacagccaggccagacgggggacatgcagaaagtgcaaagaacacggctaagtgtgctggggtcttgggatggggagtctgttcagacctactgtgcacctacttaatacacactccaaggccgctttacaccagcctcatggccttgtcacacgagccagtgttagtacctacacccacaacactgtcttagacacctagtcagagagacaaacaccagaaaaagagctcatctgggaaaaagcaaatagaacctgcagagttccaaaggagactcaggtcagagaagagagtcctacggaaaacggcagaagagagaaccagtgagaaagggcgcagctccgggaggccaggaaggagggaggcggccaccagaagaggtagcgggccactcacctgggtcatcttctcgcggttggccttggggttcaggggggcctcggtcagcagcacggggtgctcctcgggagccacacgcagctcattgtagaaggtgtggtgccagattttctccatgtcgtcccagttggtgacgatgccgtgctcgatggggtacttcagggtgaggatgcctctcttgctctgggcctcgtcgcccacataggaatccttctgacccatgcccaccatcacgccctgggaaggaaaggacaagaagccctgagcacgggcgcagcccccaccccggaaaccgggaggctcctgtgcagagaaagcgcccttgcctcccgcccgctcccggggctgccccacccagccagctcccctacctggtgcctggggcgccccacgatggaggggaagacggcccggggggcatcgtcgcccgcgaagccggccttgcacatgccggagccgttgtcgacgacgagcgcggcgatatcatcatccatggtgagctgcgagaatagccgggcgcgctgtgagccgaggtcgcccccgccctggccacttccggcgcgccgagtccttaggccgccagggggcgccggcgcgcgcccagattggggacaaaggaagccgggccggccgcgttattaccataaaaggcaaacactggtcggaggcgtccccgcggcgcgcggcaggaagccaggccccaaccccctcccaaccgggcgccagccccgcctccgcccggttcaaacagcgccgggtcggcgcgcgcgcacgcagcggccacaccctcgggcggccagcggctcgggcaggaagtgcgcgcaagcgcccgggagccgcggcgaccccaccccttccggccgagcccgccttcgccccagcccaggccgcggcaccccgggccccagaacgcacgcgcagttagcgccttgagtcccagcgcgcacgcgcaattagcgccaattcccagcgcgcacgcagttagcgcccaaaggaccagcgcgcacgcgcaatggcgccccagcccccaccgggcctggcgggggctccgccgcgcccaccctgcgatccccattggcaagagcccggctcagacaaagaccccgccggttgcccccgccccgagagcggcacccccggagcgcgcctcccgagcgcggcctcgcgcctccgaactggcgtggggtgtcccccatctccggaggcccaggggcttctcccgcgccccccacggcggtccggttccccccccatgcgccccccgctgcggcccagacggcggctctgcacgggcgaaggggccgcggccgcctgcggccgggccgtgagccgcctgccccggtcggctggccgggcttacctggcggcgggtgtggacgggcggcggatcggcaaaggcgaggctctgtgctcgcggggcggacgcggtctcggcggtggtggcgcgtcgcgccgctgggttttatagggcgccgccgcggccgctcgagccataaaaggcaactttcggaacggcgcacgctgattggccccgcgccgctcactcaccggcttcgccgcacagtgcagcatttttttaccccctctcccctccttttgcgaaaaaaaaaaagagcgagagcgagattgaggaagaggaggagggagagttttggcgttggccgccttggggtgctgggcccgggggctgggggcgcgcgccgtggcccccgcgccccacgctgggcagtgcccggttcggccccgcatggccaggcctgcccccggcctgcccgtctctcgggccccccacccaccgcgggacatcctaggtgtggacatctcttgggcactgagcgcccaggtggggtgggccagggtctgcacgggtgccagggccctgggttctgtacgctcctgcagaaggagctcttggagggcatggagtggccaggcagtcactcccccttgccgacttcagagcaactgccctgaaagcagggcctgaggacctctggctgtggggctcagctagctaaatgtgctgggtgggtcactagggagagacctgggcttgagaggtagagtgtggtgttgggggagtcaggtggcttgcggccacttagaagtcgcaggaccacactccccaggacagggcaggggccagcggtccagtggctggaggtggcccgtgatgaaggctacaaacctacccagccgcagccctgggaaggaaggtgggctctacagggcagggcaccttttaccctggagctgcctgcttttgagggtaacagtcacgcccagccaagacaaggcctggggcgttagtgggtgacctaggcactgcggggcgggggggctgggtctacacagcctgggtctgggcccaccgtccgttgtatgtctgctatgcgcagccacagctgaactgccctcccagaccatctggaggccgctgggggactctggggaccaagactccatgtgccacagaggattgggggcggggcggtgctaggaactcaaagccagcctgggaagaccctgtccttgtcaccctttcttgccttgggtctgtccactgagtagcacacaagaccgggtgggcagggtccgttctgctccgggaatcacagactgtgtgtacccaggtggtgggcatgcagcgatcagtggcgtgggaccacagaggggcattcggctcagcctagaggaacctgccttcctcctcctccccctccttggaggtggtgacaagaagctggatttttacacaaaaataggaagagtggtgaggtgggggcacctcaggcctgcggggctctttgcagcgcgtagtaggtgttcactgagtgtgtgtcgcaataggcaaagatgagtccatataaggacatggaacctgtggccaggaaggaggctgcttgttccagttcacggtacaaggctgtgctcagccaatgggacctgctcctcccttgaaggttgcagaggccacagcctggtgggaaagatgaccaccacccagcacacagtggcagacacaggttcacagtccagaagacttgctgagcctcctccatcaccaccccacgcaagggcaaacttccccagcctgtatactccctgcctcctggggatgggactgtcctgtccctggccttgtatctttcagctgcaggcgtcttgccagctgcctcaggacctgccaacgttcacccggctggcgttgtggggcgatgggcggggggcccttcttgctgcctgttgatgagggctggttctgggggttcgtggaacgttgaactgggtggagtgctgggggggtggggtgggcagtggggatgggaccggatctgcagagcagggatgagaggttgtcaggtgggcggctccaggcagcaaggtggggtgcagagcagacctgatccccaggcaggacctgtgttgccactgggcc

SEQ ID NO: 586098 - DNA, 4001 bp, Homo sapiens
aataataataagtgaaaaggtcaaaaaaggacttggaggctgggcgtggtgcctcatgcctgtaatcccaacactttgggaggccaaggcgggtggatcacctgaggtcaggagttcgagaccagcctggccaacaaggcgaaaccccctgtctactaaaaatacaaaaaattagccaggcgtggtggcgggtgcctgtaatcccagatactcaggaggctgaggcaggagattcctttgatgtcgggaggcagaggctgagatctcaccattgcactccagcctgggtgacggagtgagactgtgtcaaaaaaaaaaaatttaaaaaggacttggagacagagaagggcagcagagtgcatagagcaagaagagagcaggagggatggagacttagccaagaaggaaggaaattgtttgggatgggtgaggggagtctgaaaagggaagggaagtggctcagagcagtggcttgaggggagaggaggagaggtggatggtgggaaggaggtgcagtggagatcagggttggacatgaggatggaggaggcactcaccggagcctcggacatgagcactgggtgcaggtttggctcagacttgacgtgtttgctgtaggtgtgatccaggatggctcggaagcactcccagtcctcgactggggccagaagagcagcgtgcagagacgcaagaaggcaggcaggggacagggacaggaagaaaaggagggagaaaggccaagcccaaaggagggtcagtgagtccagctccaggggaacgccccccttcccagaaacctggtgggcccctgggaagggaacccagcgagaagaaccctggcagccagaagaaccctggggctgcaaggaagactccgcggggagtgggggctgctatgacccagattgtggggagcgggctccttttctgtcaggaggtgatgggtgggggccccttactcatgccattcttgaggggcgacatgacctccgctccatcccgaggcacgtgcagggcattggtgtcgatgtggaagatcttccctttcttctctttgtccccctccagctccagcccgcccccctcctccgcggccagcagccccactgtggtggggaagtcagcctggtggggaagggttgggggagtattggcagggagagaggtcaccctcttgcccctgtccagccccacagcagggtcctcagaccgcccctgggtttattcccatattcccgctcagcagagcttctgggcgatctgggagagccctgggtcactggaaagcctgaagaagggtccgaagcccctaggatttggagaggagactggaaggctcaccttgggacagtcctccccagcgtacccagcgcggactgagaaggagccaatgtcaaagaccagcgcccccacctcatctgtgcggggagacaggcctgtaaggggacctcccccgaactctctcccgctaggtagctccgagagaaagtcagggcagagccacagtctcgccactttcaacaccagtctggggccggtgggagctgggcctggagtccgaggtcctgggactgggggtgggggcatcacaccgccagggtcccttcttgcccaatggccttgctcagggcaccctcccgacgggaaaggaaggggcccggggccaggtggaggtgggttgcaaggtagggccctgtgcgcgcggggcgtctggggaggaccgagcgcaggggtggcgggagacccgagcctgagactcgacccgctcgtgcgcggaggtgacaggccccggggtgcccagagctcggatggatggcgcgggtttggaacgcagggctgcgggagccgggggcccgaggctcgctcacctccgccgtagacgcccccgctcatagtgcccgctgcgctgctagcggcccgtgggcggtggcgggatcagcaccgaggcggccggacagctcccgggatccctggcggggcgggactctcagcggccaattgggaggccggatcccccgctccaacggcgccgccgattggctgccaggcgagacaatgaccgaccgggggcagctgctttaaaggggaagatacactctattaagcggccaggaggagatggggcagggggcacctagcagggacttagagaccgtcgctaaggaactggcggcagagaggagagcagggaagaggcggagaccaggactctgcaggacgactgatgaggtccctatccccttgctttttatttttatttttatttttatggtagagacggaggtcttgtgatgttgcccaggctggtctcgaactcctgagctcaagcgatcctcctcagcctcccaagtagctgggattacaggcaggtgccagcacgcctggattaaaaaaaaattttttatagagacggggtcttgctcttttgcccaggttgatctcgaagtcctggcctcaagcgatcctcccacctcagcctctcgaaatgccagaattacaggcgtgagccactgcgcccgacctctacccccttactttttaaagcaggattggggagagaggtccagttcccagaagggttatctatcttcaggctgctctgagcccggttctgccacacccaggcctaaatggaatcaccaaggtctaaatggaatcaccgggagagggagggaagggaagattgagagagggaccaaagggggtgtgtctccatctctctctgtttttaccttttttttttttttaagagactgggtcttgctaccttgcccaggctggtcttgaactcctggcctcaaagtcccaaagtgctgggattaaaagcatgagccaccgtgtccaacttccctcctttgtctttcgttggccccttttttccttgccttgctttcccccccaccccccgcagtacctaggccttatacatgtgtacacatgcttacacatgtgtacatacgttcacacacaggcattcagcccatctggctttagcttcctttctccatctgtctctcttcagcgcctgttctcctgaggaggcatttatcaacaagagggtttttgtttcttttctttttgagttagggtcttccgtcacccaggctggagtgcagtggcacacttatagctcactgtaaccttgaactcctgggttcaagtgatcctctcgcctcagcctcctgagtagctgggacttacaggtgcacaccaccacacctggcttttttttttttttttttttttttaagaaaaaactatgttgcccagtctggtctcgaactcctggcctcaagtgatcctcccactttggcttcctcagtcactgggattacaggtgtcagccacagcgcctggctaacaacagggttttctactgcttggatcccaggttcttctgggctcccagtaccacagttttggtagcaaaggcaaaggagcagctctgacaacttggggtaggtgagggactcttatgtgagggtgtgtgtgtgtctgtatgtatgtgtctatgtgtgttggcatatgggtgcatgtgtgtacatatgcacatctgaatgcttgtgtgtgttgactatgcccatctacttgtttgggggcgagggagctttgagaccagagatagcacaggaagtggatactatgtgaggtccgcgtgcccctgaaggttctctgctcaccacatgcccaccctggaagagactccacccctccccggccaaaggacagatggctttagctggctcatggattacctactgacgacggtggcatttcaatgcctagggttggttccaagttcagacttggcttctaagactgaaagggtccaggtttcagcaggagtggtgagctgtaggggagagggccgactcaggagctgggagagtgagatttttccaaagtgaccctaggtcagtccattgaggtctggaagaattgagtggatctcttaaagtgcttacatttctttttttctttttgagctggagtctcactct

SEQ ID NO: 586099 - DNA, 4001 bp, Homo sapiens
tgtgctcaagttggtaaattcgggctctttcaggctccttctggccatacactcgatatggggaattcatatggagattccctgccaccgtttctaagtcttgacaccaacttctgaagcatgactttgggccacaaaacaatgatctatagaagttgaatctccaagttagccaagttacattaatcacttacctcaaaaggtcaaaactgagcacgacattttaggtatttatagcaagaaagatgagtaaggtccacgacttactaatcttaaaggtatgacaactctgtgagcattattttattgctactaccaagaattcctttatattttaatagttctgcaagactaaaactacaaagcaaaaatctcacatgcaaatgtggaaatgaaaaatactttcacccactggtttcactcttgacacaaccagacctgaggggacctgaggtgaacccattgggggagggcatgagttaagggtgtcaataattgagggaggggagctgtagtatcgacaacgctgattttggcttgtgttttaggtagaaaagcaagttctaaaataaagagctacaaagcttgatatgacgtgtatttcaaaaagaattcacacaagcaaagaggatttttccagtccacaaccacttctggtcgcttcagcagcaaaaggaaggaactaacagtaggagatggactgtagcaaactaaagaaggcacccccacaaggttgtcaaggaaaccaaaccaagtgcatttttctatagaaaagaatcaagggtaaggtgaacatgccatgttacattttgtggcaaaaatgattaaaatcccttcttgaaaaaaatcgctaagagaccaaatttacttccaggctattttactaagcactacacccataacgcaggcaggcaagcttgtattcccaaactaccagctacatggattcagcaatcaccttactacaaccagctaacttgggtcaccgatacttcagggcatttcctaagatctctttttaatagcttaacggcaacgaaagaagtggtcacactcaaaaagttaaaaacaaaaacctctaccacaattccacaaacatgctctcccaaatttagggtatttttcaaaatggagtctttttaaacacatcatttttcagcgaaaaggcaaatctatgcaaaccaaagggacagcttggcctgagtgtgccatttcatactggaaaagcgcagggagggcagtaaaaatggtatcaagttgggagatcgatgctattctctccacaagtaggtggtaaagaatcctcagccaggaggaatgacacgcacacgcggggacagaacgagggccagtgctgagaacgctggaaggcagggacaccgttcactaggagatgagtgacgttaaaggatctgcagtgatgatctgtgcctcacgctggcgaatattcctaggaggggagatcccgcgctcccggtgtccctcagggtgtccaccccggcgacggccggagccgggctgcgggtccaggggcccggccacgtgggcgggggaggcgaggagcgccgggctcgctcagagtgggcaccgcgtccctaccctccgtgcttttcctcttgtggcccttcccggcagggaagagggggttttacgacgtcaaggcaaggcttggagggaagcggcggccggcgccccacctgcccaggtgatcgcggggctcaagcccggggcgacggacgcagctcgacctccaggcgaggtggacgccaggggccgggagcggggccgcggaggagcgggggtgggcgccgagctgctcttacccggtgccacagtccaccacgcagggaggcagggagcctgccatgctcgggacgcgcggcgctcggccccgccggcagcccgagagcgccccgtcgccgtccgctccgccgcccgctagccccgcgcgcagcgtctcccgcgagccgccgcagcgccgctgccgggagcccggatgctcggcggccgacacgtgacgtcactccccggtcggccaatcagaacgcgcgcacgccccgcctcccccaacacccccacccccactccggcgcgccatctttagtgctggcagcgaggcttcttggccccatacgtccaaccttgctgctggagagattggggtttatttttaactgacttacatgaacgtgaccccatttccgaggcctggcgcctttctcctcctgtaagtcttcgctcgaatgtcaccttgcgagggaagttgttcctgatcaccctgactatgtcccctaccggtactgtatcctctgtctcaacaatctgttggtttcattcctaacccttaaagcaaagtgtttatatttttatatttatgtatttgttgtctgcctcccctactggactatcaaatcttctaggatagggcttgagtctgtcttaatcactattgatgagcagcaggtgcttagcacagtatttggtgtacctgtggaagtgcccaaatgtttgttgaatgactgagtaaccttccccatataataaaaaaaaaaaaaaaaattagttggaattggccgggcgcggtggctcacgcctgtaatcccagcactttgggaggctgagggtggatcacaaggtcaggagttccagaccagcctggccaacatggtgaaaccccttctctactgaaaatacaaaaattagccgggcgtggtggcgggtgcctgtaatcccagctgctccggaggctgaggcaggagaatcgcttgaacctgggaggcggaggttgcagtgagccaagatcgcgccattgcactccagcctggacaacagggcgagagtctgtctcaaaaaaacaacaaaaaaaattagttggaattattatacctaacacggcctaaatttttctaagaagaaaaatctgcaaaacaaatgcttggccagccttaaggaatgaatggccttagactgagtaaaccacaccaagatcactcctggaaaatgttttcaagtgtcgaagatgggatgatcgcccaaaagttcttactgaaaccaaagaaggcaaacaccacctactatattataaaggtactgagagtcccacttgccacttgcttcctgcttcttgcccgatcgtaaattcttgatactaattttttaggagctttctggaaacatgtatttttttgttttgttttgttttttgagatgagtctcactctgtcgcccaggctggagtgcagtggcgcaatctcggctcactgcaactccgcctcccaggttcaagcaattctcctgcctcagcctcccaagtagctgggattacaggcacccactaccatgcccggttaattttttgtatttttagtagagacagggtttcatcatgctggccagactggtcttgagctcctgacctcgtgatctgcctgcctcagcctcccaaagtactgggattacaggcatgagccaccacgcccagccaagacatgttgtttttacaggtacttaaaacattgtgttttttacctagaagtaatagatacgttgaccactcctaggtaacccatcatcatttcttttttttaactcataagtacccattaaggcccagacctagagaatgttcaggagaactgaagagagaagcaaatgggaggaaaataaaaaggagtaagtgtggaggaatcccagtttagaagcccaaggctggggttaaagattggctggcttgctttgtgttttgccaaagccctgccttggtcccttttctttttcttttcttattgcttgtttcttagagacagggtctcactatgttgcccaggctggagggcagcgactattcacaggcatggtcccactactgatctgcatgagagttctgatcggctccatctctgacctgggccagttcacccttccttaggcaacctggtggttccccgctcctgggagggtgccatattgatgccaaacttagtgcagatccatcattctgg

SEQ ID NO: 586100 - DNA, 4001 bp, Homo sapiens
gtggaggttgcagtgagctgagatcacaccactgcactccagcctgggcaagagagtgagactccatctcaaaaaaataaaaataaaaataaaaaacttggataaagtgtaaagataaaaatcactattcttgggcaggggtcccagctgtagcccaagctggagaactagactggcttggcattaatttgcttggggcaggagaagggtcatctgaaagatatgggaaaagctgaggttgcccctgggaagactagggaagcctgcccccgggccagccccttgaatatgtccaactgaggaggtggaaagaagttcaaggtagccagggagacaaaagttgttcactttggtgcacatgtggaaccaacatgggacaaacaggcattttgtgctcgtccagggaacatgacttcttcggctcccacacaatttgtagctgcaggagtggcagagcaccagagtggatgcaggcccagatgttctctgggttaggtgttaaggacttgtgggagtcatcaggcagcaggcatttgccccagtgtcagaggtgtttaagccagaattactccatcttgaataagggctgggtaaaatgaggctgcattcataggaggttaggcattctaagtcacaggatgagacagaaggttggcacaagatacaggtcatacagaccttgctgataaaacaggttgcagtaaagaagctggctaaacgccaccaaaaccaatatggcaatgggagggacctctggtggtcctcactgctcattatgcactaattataatgcattagcatgctaaaagacactcccaccagcaagcaccatgacagtttacagacgccatgacaccatcatgaaatactctatatggtctaaaaaggggaggaagcctcagttccgggaactgcccacccctttctctgaaactcatgaataattcaacccttgtttagcatataatcaagaaataaccaaaaaatgggtaaccagtagccctggagctgctctgcctatggagtagccatccttttacttctttgctttcttaataaacttgttttcactttactctatgggcttgccctgaattctttcttgcatgagatccaagaaccctctcttagggcctggatcgggacccctttctgataacaccaggagacaccctgggtggatttcctgaaccgaccgatagatgagccttccacgcgggagacctggatccttatcgtctttgtggccccttccatctgcacgtgcggacgaggtccgggtcgcactcgggcggtcagcctggcacgcacagcgccggcgtgcagggggccttgggtgccaccgagtccgggaggaaatctaggccgccatccgtccggagactggcacctgtgaccaccacccaacatgtattgaacaagggcttggaggtcctttctctaaggccgcaccgataaacgattaccgactgttgacctcacggccccttcgcttccggccgcaccgcctcgctgcccacgcctgcgcactcaggcaccgcaggtaggaggaacgtaccaactgcgaggcggggggtgcgcgcgaagacccccgcaggctgcgcttccggaagtaacccctggcgcatcccggaatccagagcgcccactacggcctttggccaggccccctgggcgcgttccgggagctcaggcctgcggcgctgggagaagcacgctggccaacaagttgggtggtgggcacgcggcccaggggtcaggggccgccaggcggcgggcggcggggctgcggctcttacctgccgaggaggcgccggctctgcggtgcggagttgcgccggacttcccagcttggccagtggctccgcaggctgccggctccacccctcaggtaagcggggactgggccgccgaggttcagggaagggggcggctgtcggggcccgtgccggccccggggggccacctgctgggccagcggtgccctcgcgccgaaacacactgggagaggccagaatcttccggaacagccagcccttacccatctctccctctgtgccgagaactgccctgaaatactgtggtattaattaactcgtttaacactaacaatctcatgaggcgggtgctgttactattcccgtaatgtagacgaggaaaccgaggcgtgtgctggagcaggatcacggccgtgctcagagacgggctctggatgccatgctctgactccattgttagccctaagcttccagaaagtagcagagtgctgccgtgtcgtttgtaacagatctcactttgtgtcattttttttgcacagtatgaaacctaatgatgcatgattattatttaaaacatcttgcttagactttataagtagtcaaatttgcgtgtgggacaaaaccccaaaacatgcaatggcttgctctcctcttttcctttcacacgttcatctcctcctatccctttctctcaccacctttcaatcttctcacagatgttgtggaggaagatgagacttgagggcccagcaggtgcttaaaatcccctgcctggtgggggtggagtagacactctgtccccctgcagtgctggagttgagagcagaggggctggagagggactgggcggagtgagaaaggcctggcataatcatggaatgcccagggtggggttctacttctcttgcaggcacaagagaagtagaagagtggccgctttccttctgggcacgcacttgggaaaaggcttggtgagagcagcgagaagaataggtctaatttcttgagccagtgtgcggaggtgcttcccagcccaggctaagccagatcactcagccagccgctggctgcctttacagatgtacggctccccgtgagcaatcaacatgcctggctctcaggcataagctgcctcacttcccttctgcacagcactccaggacttgcctgctaccagacccatcctactttctctgtcaggaaaaatgagagttcttcctggtctcttgaggccaatcccttccaccgcctgtgccctggatccctttctccaggaagcttctcttccctgtgtagttagcctccccgctcttcccaggtcaccttctctctgtttagggacagagccaagccttttccctcccatccccacctccagcattcccggttcctgcttctcccccacttcctgctgtaccgcccactgaagggacctttgaccccgctgaccactgcttttggaaagtcttttcttggtttccctaacttcactttactttggtttttccttgtctctcccctctgcctctcagtcacctttgagatctgctcatcctctcacctccctgtattgtcagcattacctgggcagccccctctggtgttttccttcagtttctctagaaacttgcctgaagatttgccccaaaatagcccacatggacctgtatgaggaaagaggctcactgtggaggcgctctccatcattcctcctcttccacttgaggcttaggcatgggccacctcctgaacagctctccccacagtctcctccatgcattgtgccatcaccccgccctgccgtcaccccggcctggcccgctttcccttttgcctcccagggatgtgcctgcttcccatgtggcctggctagggcgctttcctgactgctgcccacatgatcgactatgggcaggcgtgcagcccaaaaggccgtgcttcagcttagaagcccttggaatcttgtcttgttgtggttgtaggcctccaatgtgttgtcagctgtggtgatgtgtgtcacaagtaacttcttttttttgagacagggtctggctctgttgctcaggctggaatgcagtggtgcaatcacggctcactgcaatctccacttccctgctcaagccatcttcctgcctcagactgccaagaagctgggaccacaggcacaggccatcacagctggctgatttttttgtattttttttgtaaagacaaggtttcgcc

SEQ ID NO: 586101 - DNA, 4001 bp, Homo sapiens
ctcctatcgatctgaaaagcgggcctaataacatcacctatctcagagggttgttggtggcattaaaaatgagttaatacttataaacacttagaatggggctgggcacatagaagtactcaataaacagccataatagccaatattgtatctcattccagaagaaataacatattaactgaagaaacctatgtttgtcatcttgaataggaacccaagcataattataagtgaaataaacaaaatatttaaactgagtagaggtggggaagtatcaggagagaaaggttaagaaggtatgaagatttctgagtacagctggggaaggtttcttgcctcccagcaaagagatgcctatttaacctgaagcaaaaacagacctgtaggaagacatcaccaacaagaatcagattaaccctggctccctgcattctctctgggtctaagttcagtgtgaaatgatgatccaaataaatcccagatggatgaagattaaatacaaacatcaaaggaaaatgggttttaccaacatacaaatttaaagttatggatgtccaaatgaaataaccaaaagagaaaggcaaaaaattaactgagtaaaactaacctgctgcaaatataacaacaaaagaagctttctatcttaattatatgaaagcttccagagaataagcagaatgtggtatctatgtacaatggaatattattcagccttaaaaagaaaggaatcctggcacatgcttcaacatggatgaagcatgaagacgctaagtgaagtaagctggtcacaaaaggacaaatactatatgattccatttatatgagggccctagagtcatcaaatgtatagagacagaaagtaaaatgggcattccaggggcaggtaaaggagtaaagagaattcgtgttcaatggggacagagttttagtttgggaagatgaaaaggcttctggagacagacggtggcaatggtttgtgaatgtgcctaatgccaccaagctgtacattcaaaaatggttcaaatgataaattctgttatgtgtattttagaataaaaaaaagttaagtaaaaacaaagttcatagaaatcacagcaacaagaaaagcaataaaacaacgatacgtaaaagagcacagggcatgaacagacagctcgcaaaagaggaaatacaactaactaatgtggaaaaacgtataaggtcaaagttatcaaaaatgcaaatgtaaagcatatggcaaattttaatccattaaatgatcaaaaataatattaatgctgacaagagtacaaagaaagcaagcctcttgcgcggtgctgacggcagtctgaaatggcacactgtgcagagactaataaaattactaacactgctgaactccataatcaaacactgctagttctttttaagtaaaaaagactcgaaatacaggaaaaactgtatgcacaaagattacattatttcttataaaaccaagaaaatgactaaaaatagtggaactgctaagcaggaaatacctactagacagattatcatatagctgttaaaataagggttatgaaaactgtaaggaaatgaggagtataatattgggtgtaaaatcattttaaaaatgggtaaaaagattaaatgaaaatatactaaatgtcaacagtacctatgttaatgtgataagactataaaaatcccacagatatcttccaaattttctataccacacttacaattctactgtagtgaagggggaaatgatctctatgtgaagtgttaaactccgagttatggctgtggggcaagatcacacaaactcctcatctaacttcccaatttcctaatgtattttatccacagacagacttacggcagcaagatggcaatgccaagcaggagacgcagcacatcttgccacagcttcctcctggccagaggctccctaacatgggtgacactctccacataggtaaaatccagccagagttgtgaaagcagctgaatctctcccttgctactgtcttcatgcctttgagtgacaccactatgacaggcattgagttgctcttaccaacactgcaagtttgtgactgacagaccactgatctatgatgggaaatggcaacaggcccagaaaaaagcatttcccagacttccttgtggacagggatgactaagtaagttcaggccagtaagacacaaaagctggagaatggttgccaggaaagctccttacaaagctgaggtagactcaagtcgtagacttgcctcctgcccttaacaccctcctccttcctggaacacagaggtgatagctggaggtgcagtaatcaacttgtgatcatgaggcatccttagaatgaaagccatatattcaagacactagagtagagagattgttagccacaccagagagctgccatatcagcactggactctactgcaaatttatttaagaaaaataaagccttaacttttttaaactactgcttttatacttctattacttgctgccaaaaacatttcactgtctttgaagaattaaaatctatgtatttccatttaaaggaacatttacaatataatgatgttctcctggttcttgaatcaaaatcgatgttattcaggccacatccttatgggttctgaggaccacaatcacaaaccctccgtcttcctcaacctcccatttcatctctatccaccactattgatgttataattattcctttaggagacaaatgtattattctcaaactattatttataacaagatctaaattggagatgtccagttattctggggttttttctctctttaagactagtcaagtgcagcagtgagaagaagagaaagagaataatctggttttttaaatatagaagcatatgatcaaagcatcaatgaatgcaagctacacaaacatttttattcataacaatggtaaaattatcacctggtattgatttaaaagtgaataatgactatcataaaaccaacccatatttctggataaagatagaaaattgaacacatgtatctaatattactccacctccatgcccctctaaaactacagtaaagaaacatttttaaaaatacaaatcctcaaggaagcgagaataggagaggaggcgacaatatactggaagctggaaagtacgtgcaggaggtgacttagcaaatccaagaaagctgacctctacactggctaggtctacactggctaggtctacactggttagtgaagtgcacaaggcaggtctaaccattctcaagaattcaggaaggaaactaggacataacgcaattgtgattcagatgtagggcactgctatggctagcatttttttatttcaccaggttcatgaggaaaatgatttcacagagcactaactttacctagagatttcaagataatcatgtattcgtaggttcatctctaaaataccaaggatggtacgttttatttttagtaatcagagttaattttccatcaactatcaacacgtgaatgctactgactcctacatcaacacctgctgcttggagctggctgctcctcggcttctttacctgtgtagcccagtcagacccttcgacctcagcatgtacaaaaccaaactctccttcttcctcctccctccctccctcaagtgagtttcttctcatgtttcccatcttaaccaatcacattatcatccatgcactgccccatctcaaaatctgagtcatcctagatttctctcttaactgctaccaattctcatcactaagacccatcaattctacctcctgtatatctctgctaactatatgtaacttaccccaaccaactgtacatgctccaaaaacacaacagcatacaaaagctagtgagggtacaagccagaacaatgaggccaaatatgagagcaggcgaaataactccatgagtgatacaatgtctgcccgggctccttaacgagtactggctctggaagcctgattgctcaatacaatgtctgcc

SEQ ID NO: 586102 - DNA, 4001 bp, Homo sapiens
ttaagctaatttcccaccttctattaacaaaatgttaacagtaccaactacttggctacaaatacagatttaagtaatattttctatttttacatatttcacacatacagataagttagtataattatcacatcatcaagatatatcttaaagcactgatgaatatatttatacatgtgaaaaggtttggcttgccattgcttcagtaaagtttacaaaaattttcaagtacatgaacaagtcctatcttaatatggacttacaggtgggtgaactgcctgatcagctgatgtgtagaaataaaaaaatacacagccccagaagtatttacttaaatttgtcaataaattcacagtaattttcaggcatatctgtgaatgtgtgatcttgatttaaatacagatacagtgataaaaactagatttttaaaaacataatttataaatgctcaacaaacagcacagccctaattaaaccaagagaactgctaccaataaagaaagtcggaggaggacaccttttctagaaggtaggggtgaatgggcatatctctggtgtccacaaatgtgtgcgaatagaaccttaaagttcagcttgtttttacagttgggtttcttaagaacgtctagccttgtttttttccaattttttcttacagtgtcaaccttgggttaaatcacttatgaagtctctttgaggagtaaaacaacaacaatgatgattcaaaccctgcccaaatactacctcccttctcgctgtgcatgcctggcttttgcttgacagatgtcagagggctctccgcctgttctctcagctcaccgcactgctgaaggcaccccgcacaaactcccctcgggcaaagccctcggcctgtggttattttggttcttttttgtacccttttccccttcttttttgcacagggagcgccatgcatgactcgcatcgggacccaactcatttcacccaagaagacatgggatctccagggcaaccgagcgcaatcgtggggtctcgggtgggccgggaggcgcggaggaccacctcccggaccgagcctctcacctgcgggccaccgaggtcgccccgcacccgcgtgtcgagcgcgtcgtgccgactttcgtcttcgccgcccgagcggtagatgaggcgcagtggcacgatgctctggcgctccacgaagcggttttccttcctcttctctagctccatcaatgaggcgtctcctccaggcaggaaccgggaaaggagggagtggagagaaaaggcgaaaataatgaccctgaccctcactcctccatcctgcagtcctacgtctcccctacgaaaatccccaccgccccctccctctcggaacccaactgggaaggacgcagagacaccagcccgagagccttggaccagctcatccgagagcaaccaggagcggggcccagaagcagggcacccctttcccattctccccattcctcttcagaaggagaaaaacaggctttgaccgaaggcttccagtgcatctgcgcgcctccacacatatatttttgctccacttctcaccaccctcccgaattaaaaaaaaaaaaaaaaaaaatctccccgcgcactcgggaaatggggatgcccccttttcaatacgcctgagggctccaaagattcccgggaaatggtatggcccaaaggcacagaggacggctaacttacctgcctggccgcagcgcgccggagggcaggtccccaggacacagagcagcaagaagggcacggacacagccactgccgcctgcatggtgctgccgtcagcccgcctcgcccgagacgctcagctcctcatgccggcgccgccgagtccgtttccctcgctccgcgcccccggggtccccgcggccacctccacccagccccggccggtgctgcggcggccgtggcgctgcaacctccaccgcggctcagtgctgcattgtgcttcgcggacgcttccgctggcggggggagcgagcgagtgctgcattgggcggttggctgtagctaagtggtttctagcgcctcccacctcatcccctggcaaaggctcgggcgggcgacaagagctcggcagggagcgagcgcccggtgcactcgccccccgcgcgcaggcaagggcgcgcgcaggagagtcagctgggaaatgtagttctctctccgtgtcccgcttgtctccacgacggcacggaccgtcgcgacctcgtgactgtgaggtcctctatatcccacagactggaagggcgggagggaagggcaaaagaaagagatcagcactggaccgcctcctggcatccgagatgcaccaactgggccgttacagcagccagtattcatctgcatcgtccttaaagagctgttctgtttaccacagattagtagttacttaagttatccggagaaccataccctcacgaatacagtgctagtgaattattcaacaaatacagattgaggatatactatgtacccagcggttgacaaccggaaggacacggggatcagaggcacctgttcttgggtaaagttgagcagacagaccacttttttttacaatacagtgtgaaaagtgtcatggttatacctagaggaccattaattcagtccagggagtcaaagaggacctcccagggaaggtctctgcaggtaatagagggatgatttagcttaactctacgggatatttttgttctttattgccagacagcctcaaaactctaccagatatggggaactcagttttctcaggctgcttattccattttcctctgattcaaaatgatagaaattcttgagtataaaacaataataaaatagttatctacataaagtaatacttgtattttttagtttttcaaagttcacatgtattatctgatcctttggtcaagaatttgattataactattactctgattttatatttatgtatgtacgtatgtatgtatgtatgtatttttgagatagggtcttgctctgtcgccccaactggagtgcaagtggtgagaacacggctcactgcagctcaagctcctgggctcaagccatcctcctgcctcagcctcccaaatagctgggaccacagacatgtgacaccacacctggctattttttgttattattattactttttgtagagacaagagtctccccatgatgatcaggatgctcttgaactcttgggctccaccttggcctcacaaagtgctgggattgcagatgtgagccactgcacatgcctactcccattttagaaaggaaaaaaattaagatttagaggtgtgcctttcaaatactgtagccagtagttacttgaggctattttttttttccgagtgtttattatttatttttgtatttcaatcgcttttggggaacaggttgtgtttgtttacatgaataagttctttagtggtgatttctgagattttggtgtacccatcacccgagcagtgtacactgtacccaatgtgtagtctgttatccctcaccatcccccaccctttcccctgagtccccaagtccaatgtatcattcttatgcctttgtgtcctcatagcttagctcccacatatgagtgagaacatgcaaagtttggtttttcattcttgagttactttacttagaataatagtccccatttccatccaggctgctgcgaatgccattattttgttcctttttatgcctgaatagtattccatggtatatatatgccacattttctttatccactcgttgattgatgggccttttgactggtgccatatttttgctattgtaaattgtgctgctataaacatgtatgtgcaagtttcttttttgtataatgacttattttcctctgggtagatacctagtagtgggattgctggatcaaatagtagatctccttttagttctttaaggaatctccatattgttttccatagtggttatactagtttacattcccacaaacagtgtaaaagtgttcccttttc

SEQ ID NO: 586103 - DNA, 4001 bp, Homo sapiens
cacccctttttccggggtgtccagaggctgcatattgaaccagggccttggaggcaaatgcaaggtcttcccccgctccctccctgggggcctcagtcaccgccggtgagtttaggtttgttccgaggggcttagactattggcccccagattcctggtgtgcctggggtggcgggactgctccggcggggccctctctccacagcgcagccggcctggggctgacagctcccgagcagggcagggctggtctgggcactgggccccgttcacagccaatgacaggaccagtggcctggaagggagggactccgcgcctttggactccagtgccttgaaatcccacagacctgggaaccgagtcagggatgcccggccgggagaacgaacgggcgggcggcgggtggaccaggacctgcgtccggccccacctctcccaggcctcacctgtcctggcgcccgccccggagcagccaggtgcagggagccgggggcaggggcgccgctcacacccagggacccccggtgcgggaagggcgtgaggcatgacgtcaccgcgaggtggccccggagccggcggaccccacagcccagcagagacctccggctggcggcccgttccctccctgcagccagccccgatttcctctttctgtgcggagcccgagctttcgcaacgcggcgggcggtccgcggtgaccgtcagacacgcagcccggcgggggaggggaggcggcggcaggggggtttccgggggtcctggggggggcccccccgctgcgcccggcccgggaagacgtccgggtccccgcaggtgcagccgggcccgggccccatccgagcgccgatccggcccggtgttcagcgccgccacccccgcggcgtccgcgctcccccgcccggtccccggggcccacccaggacccgcccggcaccccgcgcccaccccggacccacccggccccgcgcccacccggcccacacctacccggggcgccgcagtccgcgcagcgcgcgttccccggccgctgcagcagctccaggaccgccctgcgccgctccttggccatggccgcgatgcgcccgcgatgccgatgccggggccggggccgggagcgtcagcccggctcgctagggccccgcgcaggccgcccgccgccgccgcccctgcgccatcccgggcggcctcagcccgcgcgccggttccgcattcccgccgccctctgggctccgccgccgccgctcgtgtctccgccgcggtcgctgagcgagtgccggcgcggggcccggggcgcacgctgcgctctggccggcaaggcccgcgggcggcccccagcggtgcaggcgagcgtgtggcctcctccctcggccgctccggcgcccccagcccgcgcgccccggggacccgctgggaaatcgcccgccgcccgccccccatccgcgcgcagcgtcccacctgcctgggcgcgaggccgccccaaaacctggccggcctgggtgggaccctcgtgccgccgcgcgcggtgggacggagcctgcacacctactgtggggggcgcagagggcacctgccgagccccccaagaccatgggcatgggggtgctcgtggaaggcaggtgtgcgtgtcctgtgctacggaccaggaccagggcgctcacaccatccctgcctgggagggacggccagcaggtgacaaacgccagcgtcccagggcactgaggccacacagggcccagacggagcctccccctgagacccacccagccgcccaccacccacagatgggaccctctgggcacccctcccactcaggcaggctgaggggccccgccgggacttcacatgggggctgacaggtaacaaaaaacctggttttgatgtcacctcttcccagactcgcgtgcccttcctctgcacaccccagcatcttttcaaattctttccattttcttcttgcagggttaatgcagtacacccggctgaaaacaaactggaacataccagactgaaaaaggaaagcctctccccactgccttccaggcaaccactgttaacaaattcctcagcaccttccagaacgaacgtctgaggcctgtagcctttcatttatttattcatttatcgagacagggttttggctaacggctgtaatcccagcactttgggagaccctggcgggtggatcacttgagctcaggagtttgagaccagcctgggcaacatggtgaaaccccgtctctactaaatacaaagaaattagccaggcgtggtggcgcatgcctgcaatcccagctacttgggaggctgaggcaggagaatcgcatgaacctggcaggcagaggttgcagcgagccgagattgcgccattgcactccagcctgggcaacaagagtgaaactccgtttcaaaaaaaaaaaaaaaaaaaaaaaaccaaacaaacaaactcaaaaaaagttcaactgaaccatgacttgttcacccagtcactggcataggggcatttagagcgttttgaatgcatcagaatcatggtctacacaacctcatctttgcaagagttttgtgtggatttgctctcaaagtggcatcgctggggcaatggtatgggatgtggaatggcctccactgaggctgcactgaccagagtgccaccaaaggcacctgtccccctgctccagctgacgtggaatcatggagctgcttaagctctgtctacctgaagcagaacgcggcagcccgttttggtctgtgtctctgggatctgtgccctgtggcatcacgtgctctttccctgtaaccgttcacatgggtctttctcctccctcagacgggaggctttggggtggggacaggtggcattttcatctctgggtccctgtgccaggctcggaatccaccacacagcatgagcttggagaatgtcgcctaataaagacagacgaacattaatagcagcagctcagcactaggtattaggagaaatagcctgacttgtattttctattttcttttcttttcttttctttttttcctttttttttttttttttttgagacagggttttggtctatcgcccaggctggagtgcagtggcacgatcttagctcactgcaacctctgcttcctggggtcaggtgattctcctgcctcagcctcctgagtagctgggaccacaaatgggtgccaccatgcccaggtatatttttattttttggtagagacagggtttcaccatgttgcccaggctggtctcgaacacctgacttcacgtgatctgcctgccttagcctctgaaagtgctgggattacaggcctgagccaccacgcctggcttgacgtgtattttcttttttcttttttttttttttgagacagagtcttgctctgtcacccaggctggagtgcagtggtgcgatctcggctcactgcaagctccgcctcccgggttcacaccattctcctgcctcagcctccccagcagctgggacacaggtgcatgccaccacgcccggctaatttttttgtatttttagtagagacggggtttcaccgtgttagccaggatgctctcgatctcctgacctcgtgatccgcctgcctaggcctcccaaagtgctggtattatgggcgtgagccaccgcgaccggccgacatgtattttcttattaaagccccattttcagctgggaagactgaggcacggggaggttcgatcccttgctggaggccacacacctcaggactggaatatacataaaacaatataacaaagcaacacaccctaacatagccgttacccaaggtccccaaagacggggaggccatcatacaaggcatagaaaaggcagcagggaggcctcaggggagccggtgcccaacaggccagagcttctggcacaagccaaggccatctactgcctgctgttccggggcctcctccgtggggcagctccagcaggcgagtgtcttgccttctctgtccttccatcccgctaaggga

SEQ ID NO: 586104 - DNA, 4001 bp, Homo sapiens
gaagggagagaggaggaggaagggaggaggaggaagggagagaggaggaggaagagagagaagaggagaaagagagaaattgacctcatcagaattattactattattattattattgagacagggtcttgctctgttgcccaggcttgagtgcagtgaggcaatcatggctcactgcagcctcgacctcctggattcaagtgatcctcccgcctcagcctcctgagtagctgggactacaggtgcgcaccaccatacccagctactttaaaaaactttttgtagaaacaaggtattgctatattgcccaggctggtctctaacttctgggctcaagcagtccttccacctcagcctcccaaagtgctgggattacaggcatgagccacttcgcctaaccaagtccctgttttatttatttttctttatatttttaacctttttttttttttttttgagacagagtctcactctatcacccaggctggagtgcagtggtgcaatcttggctcactgcaacctttgcctctcgggttcaagcaattctcctgtctcagcctcccaagtagctgggattacaggcgcccgccaccatgcctggctaatttttgtatttttaatagagacggggttcaccatgttggccaggctggtctcaaactcctgacctcaggtgatccgcccacctcggcctcccagagttctgggattataggcctgagccaccgagcccggcctatttttaacaatttttaatctttaatttttgtgggtacataagaggtgtatatatttatggggtccacaagacattttgctacaggcatgcaatgtgaaataatcacatcacggcaaacacggcacccatcacctcaagcgtgtatcatttctttgtgttacaaacaatccaattacactcttttagtcatttttaaaagtacaataaattattgttgacaatcgtcaccctgttgtgatatcaaatactagatcttattctattctttgtacccattaaccatccccactctacccaccctgagactctgttttaaagaaagattcagaccctgggagggaagagcccgggggggtgactctgggtgactctgggcgatgtcttaaggcctctggtctctgggagagtgacctcggaagcccttgaaggcactgaaatagaaggtggccttctgatttgagtatgctgaagctctgcagggtgggctcacgtgtgtgtgtgcaggtgtgtgtgtgtgcaaggagatggggagctagagtcccccagcttccagtaaggaaaaagcctggctggtccccaaggcagaagggacgggctgacccttctgttttccaagtgactgaggctgggctgggcaggcctccttctcaggctgctgggcatggccaggcctgcctgcatccgcaaatgcccgcagcccatcggagcgaaaaggggcggggcacgcactctcagagaccctccagggtggaaggggagctggtctgacgccccagcagcagggcccccacaggcccacgcaggagagcctctccctaagcctgggctgcactccagctgccccctccactcggggcactgaaccgtggggccggccctgcttctgcccaggaccacttctgggttcccaggactgtggaattttgttccaaaatgcctggagtcagcacccacggcctgtggtgcccccagaacaggccacaaggccagcaggtacacactgggcccaagggtggctgcggcatggctgatgtggtggtggagatggaggccctgagtgccaggtagggaggggcaggcccaagactccagcccccacaaacatccaggctgccagcaccgtctccaggagctgcctcctcctcggagactgcccacagccgccagcctctttccctccctcctcccagccccgctctgccctacctgctcccaggacgcccgaggtgactcagccgctcaccatttccggagctggtctggggcacctgggcaggtgagccacattcttgggcggagccaggtggggcaggcgtgtcccccaagccaaggcccaggctggggcacgggcagggggaagggcagtagccaagcctgtccatggggccctggttccagagacctttgccctcccaaggctgacgcacagcagagatcccggtgcaatcgaggccgggtcggacgctggctctggccaggcacgcaaggggcagccgaggtgggagggtgcccttgtgggaggggctccggtgcccaccacccttcacagctacgtgaggcggggcatgcatggctgtcccccaggcacacagcgccccactccacgccgggacccaggcccctctccaactccacctccgtgttttccgcatattgtctcccagttacccgtggcccctgcagggatccaggctcccgccggccggtggatccccgccagcgaggcagtgacctctggagctcctgggtgggctggcagcccacacctcctctctgcccaggccccaggcccccaccccctcacgctcacgggcggccctggtcccattccattgtgaggatggggccctttggccctaggaacaggccctcccaggacccagatccgctggcccctacccggttcagggacacgtgcccctctcctggatccctcccagcagcacccggacacagtccattttcagaatcccccaaggacccccccaggctctgccctgcccctgccctcccaccctctctccctcctggtgctccagccccatggcgggaaccccacggtgaaggccatccccagtcctccctggacccaccctgtcccggagcccactctctggggcccccaccccgcgcccctccaggctcttcagggccctcgcacagggccgactcctctgcggcccatctggtctctcggctgtcaaaccctatttttggaactcgatagaggtggtggttgaacagcatggagaacgttctaaatgccactgaattttcactttgaaatgattaacctgaggccgggcggggcggctcacgcctgcaatctcagcacctggagaggccaaggtgaacgggtggagcccaggagttcgagaccagcctgggcaacatagtgagacaccgcgactccatccttatgaaaaaattttctataaaaggttaatttttcatatgaattgcacctcgatttggggttttgttttttttcattttttgtttttttgagagagggtctctgtcactcaggctggagtgcagtggtgcgatcatggttcactgcagcctcggcctcctgggctcaggtaatcctcccacctcagcttcctgagtagctgggaccacaggtgtgcaccaccacatctggctgattttttggttttttttttttttttttttttttagagatgggggtctcaccatgttggccaggctgaccttgaactcctgggctcaagcgatcctcccacctcagcctcccaaagtgctgggatcacaggtgtgagccaccgcgcctgaccttgattttttaaaaaaggagagagagagacattcacacactggcaacccctgtctctagctcgggcctctttcctccagagctgcccgtgtggctgctgtccccttggcggccaccgtggcttctcacagagcctcacatcgcaggtccctcccgtctccctggacactgctcccacgtccccatctcagcgagtgaggtgctggctaaaggcctgggtgtcctcatttctactctgcccaccacaccccgacatcccgttgaccagcaaatatttcaagacgatccaggctttgaccctccccacactcacgccccgccctaggcctagccaccgccacccggcctcggtcactgcagcagcgtcccacccacctcccgctcccgcgctggccctacctgccctggaccctgtgacgcgtcgtgggctgggacactcctcggctcacagaattcccatgg

SEQ ID NO: 586105 - DNA, 4001 bp, Homo sapiens
ctccagcccctgctccccgaagaccccgggagggccggttcatgctgcaatcccagcactttgggaggctgaggcaggaggatcgcttgagcccaggaatttgcaaccagcctgggcaatgtagggagaccccgtctctatatttaaaaaaaaaaaaaaaaaaaaaaggcccaggatggtgtgtagggttgcagccgggaagtccgtccttcctcccctctccctcctccctcttccctccggcctcccctccaccctatcccccaacccccacccgccttccaggggccttcggatccagtgaggacccctgatcccactgccccttcatggagctcactgcagggggcacagaccccaaacagggccccggatgctggggaagaccccctggtcactgcagtccccaccagcagctcctgggcaggcagagcccaggctgtctcagcccccgagtcagggcagagccagcaacggcacgtgggcccctcatgggctgggaggccaggcgcccgccgctttcctgcggcactgttggctcacacccaaaccctgcacccagctcgtgctcggggtatctctgcggggtgggccctctgctgagtgggttcacggagtgagtcaacggagggcggtgcccagtgaggctgggattgaaccagggcaggaagcatggggggccgggagggcacccagtgggccaacacgtctttcccctgtgacaggtacgagggggtcggtgcgaacagtcaggctgggccctgtgtggttgtcacctctcattcccaccgtccgggcagatggggagactgaggcttggaggggcgggtgttggtgaaggcggctgatgtgataccgagcaggcctcattccctctctccacaacctcccgatcccaggatgctcagaggactgggtctcaggcttccccaaccggccaccggtacccacgtccgctcccgccctgaggagccagggcaggccccgaaacaacagccgcccctcccgttcccctcccagaccgccaggagcacctgggagggcccctcagatccacccgagacccccaaggcctcagcgaacctgggtgggctgtagctactgatgcacaatgaccttcccagccccaccccagcgccccccgccccagaaccaaagcccggtggtggccagcagacacaggcggcacctcggggtctgggggacgcagctgcggctggcttctccccgaccctgtgggcggcacccaactccccaccctgccgggtcctcccggggccatctcggagccacccagcacttgaccatggccctgacaaggcccctttgtactcactggcagtcggagggcgtgggccggtagtagaaggagggtactttggactcaaacctggctctcgcggcgtcgttcccgtgggaggccatgaactgcaagagaggaggggccgggtcagaggcctggggtcccaggggcagcctaggaggtgccagctgcccttggggccgtcaccacagtgacccgcagacccaaggctctgagggctccaccagcaccaggacgggaacgccacctcctcctgccccagggacaccatttctgagtgatcgaccctcccctgggacagggaaggagccagcgtccctaacgacggggtcccggcaaagggggcccaggggccaggccccttttgaggatgggtctgaggtttgccccaccgtttcaacccccaagtccacccacaccgggtgtcccgtgggagagagctggctgcatcctgtgacccccatctctgccccagagagcgagggcttcctcgttcacccagctccccagctcacatttagcaaagagccaacaggcgccagacacgggggcctggagatgggctggtgagcgagagacccagatgtggctaggacagagtctctgaggggactctgcagggacacactgcagggacccagaacatgtttacgaaacaggctgagggagaaggaaacggcgccgtgaaggaggggaggtgctgcaggaggctgtcgttccaggaggctcgtgctccaggaggctgtcacgcacactgtgctcctggcaggcgcaaaggccctgagggtggacgctggcaatgaccctgccgccagccaggtatggtgagccttgagcagcaggaggggccgccacaccccacgccagccccgagggcatgggagaggttctgcttgctatgctgtaagcccccaaggcagctgctgtttgcaccttcaagctcctgaacaccactcgcctgaggccgcagccaggcccagccagactgaagtcccctgacatcaccctgctccgaggatcacatggcagtaaacagggagggcccagaagagcagctggagaaatcacaagcaacaagaggctggcaccaatttaaaattcgaaaaccaatggcttttccatagaaaactcaaatacaaggagagatcctgtcaccaacagcaacaggacaaatcacctgagtggctggatgagaaatgtcccaggtctccaagggaaaactggcgtgtgctcccgaggacgagagcctcgacccgagacacagggaggtagaaaaatgtctccttatgggagtctacatgttttttataataattgccaaaaaacagcaacagaatttattatatttttttacctagaaatggttctaaagttgaaaaaattaacaagggccagccggggacaggggctcacatctgtagtcccagcactttgggaagctgaggtgggaggaccccttgagcccaggagttcaagaccagcctgggcaacatagtgagaccctgtctctcaaaaaaaaaaaaaaaaaaattagccaggtgtgatggcgcacacctgtagtcccagctactagggaggccgaggtgggaagatggcctcaacctgggagtttgaggtcgcagtgggctatggtcgcaccactgaactccagcctgggcggcagaacaagaccatgtctccactggacacagcggctcacacctgtaatcccagcactttgggaggccgaggcgggaggatcccttgagcccaagaggtcaaggctatgagctatggttacaccactgcactccagcttgggaaaaagagcaagaccctatctctgcaaaaaaaggaaggtaaaaataaaaaataaataaaaatgggtaagggtttttaaaattacttttacatgcatatgtatacttttaatttgttttaatggaggtggggttccactctgttgcccgggctggtctcaaactcctgggctcaagccatcgtcccacctcggcctaaaaatggggaaggatttgatcggacatttctccaaagaagatgcacaaatggccactcggccacgcaaaggcactcaacactgttagctgtcaggggaacgcagatgaaaacctcaatgagctaccacctctccccactaggatggcaaggtcaaagtggcacaggggagtgagctggagagaatgtggagtgatcagagcccccgcacgctgctggtgggaacctccggctctggtgactaacagtctggcagttcctcaaaacggtaaacacagagttaccatagagtccagcgattcctctgcaccgtaagagacgcgaagacgcagagacatgcacatgagtgttcacagcacattcttcgtgacagctgagaacgggaacaagccccagctccgtgaacggaaccacagataaactaaatgtgatcgagccacaccatggagggttcctcggccataaagaggaatgccggccgggcgcgggggctcacgcctgtcatcccagcacttcaggaggcagaggtgggcagatcacgaggtcaggagttcaagaccagcctgggcaacacggtgagaccccgtctctactgaaaatacaaaaattagccgggcgtggtggtgcacgcccgtaatcccagctactcgggaggctgaggcaggagaatcgcttgaacccg

SEQ ID NO: 586106 - DNA, 4001 bp, Homo sapiens
aaatgagatgccaggagaagcaggagttggggactgctggggggcagagttggggactgctggggggcacagccagaggcttggccagctaagcagcactggggagaccgaggctggggtggggagaccgaggctggggtgggctggcctcccaggcccccatggcactgcctcccagcgcccacctccacagccccgccagcccacgaagctccaagacgctgcctggatgtttctgccacccgagggcccccaagggcacccaggcaggcctaggggaggtggaggccgcaggccggggccgcaccctccccacctgcagcacagtgttgccacacagaggacgccctcacgcccctcacccgggccttcaggtcctgcccacactgctggagacaggggtccctgcaggccacccccgaatggaagtgcgtggccaccaccagcagaggaggggccagccacggccccacgaggtccccatgcaccccactccttcagggctggactgtagacagctgtggcgaccccaagccctcagtcacgtcactcagagggcaaaacaggtccggggacgcgggttcaaactcacgagtgtgttacccaggttaataatgactctgtccacacgagagggagggagggaaggagagagagagggagagacagagatagagagaggatgagatagacgtgaagagagaggaagagagacagagaatgagagacagacatgaagagagagtaagagaaacagagacacagagagataaagagagacagaaggagggagagagagagagataaagacaggggagaaagagacaggtgggggtgggtgggagagacggggagagggagggagatgggggggaaggggggagagggagggagatgggggagggagggagatggggggagggagggagatgggggagggagggagatggggggagggagggaaagagatgggggagggagggaaagagatgggggagggagggaaagagatgggggagggagggagagagccagggagaggtagccgggaggccccaccccacccgggtggcctcacctgccgagtagggctcctgcttctccgggtagatgaactcctgtcgctcgtacttggcccggatccactgctctcgaaggagcctgtggggagaggagagactgagccactgggccaaggcggcctccgacccagcacacgccgctctctggcccggaccctggacatctcaagaggctcatagggacccccggcagactcgagccgcccctctgggcacaagatcccggaagaaatgcagggtcagcctcctgcccgggacgcttctcactctgatattagtttattggtttcttgtgcgttcggcccccggagcatcaggcctcacgttctgcacaagcgttcccggtggacgggctggtgcctcccctctccttcccaccttggcctcagctgatgccccacagggctggggtacaggggttgagccaggcccccccaccccgagtcacacgcccctgggccctccccgaccctccccacctcgttggaccggatctgggaagtggccgcggcgccgccctccacccaccgtgctgccaccttgcaccccccgtgccgccctccacccgccgtgccgccctccacgtggttctgagacacaggacggagctatcagggcacccgtcgaggtcaggaggcgtccggggcatcaggagaaactaccggcaaatacccaagaatccaggaagacccgggatgaggagaagcccccgagagtaaagcccgggacgagggccccccacggcacccactgagcccagacatccctgcccagagccacccaccacggcctccccatccaccgtgactcactcgagtgaagccaataccattgcagaaaccacgacccacacacaggcccggcacggcccaggtgcacaggcagccgccccagccttttccactcccagggaattacgcggcaaagaacaaataggaaccctgtggcttcctgctgggcccacgtgaacagccttggagactgggcgggaatcctcgcccacaggatctgatgggtgatgggtcccagctgggtctctggcccctggccccaggtgtgtgtgtgtcccccacctgctacaacgatcaccccaaaattcggtccccgaaagcaacagaaatgtatcatctcggtcacggaggccaaacgtctgagatcaaggcgtcggccgagctggtccctccaggtgttctggggagaatctcctccagggtccctcccacccctggaagccgccagtgcccccacctcggcgccgtcctcacctggccttccctgtggggtttgggcccaccctactccaggacaacctcacaaccttatcttaacctgaagacatctgcaaagatcctacttttctttcttttagagacagggtctcactgtgtctcccaggctggggcacagtggtgcgatcacagctcaacgcagcctccaacacctgcactcaaggatcctcctgcctcggcttcccgagtagctgggctagaggtgtgcaccaccacgacttggtaattttttattttttgtagaggtgggagctcactctgttgcccaggctggtctggaactcctgaggccaatcctcccacctgggcctcctacagggctgcgattacaggtgtgagcctcgcgtccggcccctatttccagatgagttcaccttcacaggggcggcgggttaggactttaacacgtcttttcgggggacaccgtgcagctgcctgagccgctccggctgtgtgaccacggaggagttgccccctagcacccagcgtcccatgaccccagggtcacacagcggcctctcagagtcacgggaggaccgaaggccgcatgtgtggaagccgggggcctgtggatgagaggcaggtgccagggacggctttgacaaccacgcctgccaacggccctcagggcggggcacccacagggtcggcagccctgccctggtgcagaatgggcccccaaggctcacacccgcacacaagggcatcccagggcctggcacagaagcttccagaagcagcagcagcaggaggaagcctgggagtgagcaccaggaagtcgggggctggaccccatcctgcccagcggagccctccggaagcccctcatctcctgaaaaccagtactgcccggagccctcccgactcccacagccctggaggggccgcactgacaccccacgtggtcacgaggaggtgggcttcgggccacctggcagccgggacggagagccaccaggaaagctccagccacacctcagcccacgccccaggaagtgccccaagttccagggctcaggggagccaggcttcaaggacccctaggccaccccttcaaggccagggcctcagggtcaggtgggtcccctcaacgcagagcaaaatgtgagctgggggcagggggccgggcaggtgctcagggcgactgcctcccctaggtgtggactcacaggggaagacgctctgagccccagaagccacttccccacagggctcccccagcccaagatgccatgggagacccctccccgctttccccaggacgggtccagtggccactgtgacccccatagcgggtgctgttcacacagctggcacgtccatccctgagggtccactcctgagtgtgccttctgcccgagttctgccagtttccaccgcatggagttcaggacaccatcaacacccttcctggaggctttgcctcttgcgaaagtgaccccccagggcccccggctttgcttctacgtggtggaccagtggctcacccagatgggttttttccctttttattacaggaaaatagcccgggtggtgttcacgcccccgcccacacccccgcccacgcacctgcctctcagcaacacccccacccccgccacccccgcccccattgtctatcctgggtgtt

SEQ ID NO: 586107 - DNA, 4001 bp, Homo sapiens
cctggctgtgaaatgagagtgacccctcacagcatcccccctccatggcgctacccgacagaggagacaagtcactgaggtcatggacagattctgaaaaggcagaggtgcggccctctacccggcagcgtggggcatagggacggcagagaacagctctggggtgggccaggctggaagcttagcaggtgggccgggcacacctgcacccactgggaggggaggaccactgaaggacccagcaggccaaggaagtcccctcttcctcctgccaggctgggaggcccagagggtggctggagaggggccctgagtccagagaagctgctcccaggctgtgtggccagggagcagaggttcagaggcaagcccagctcccctccccgtgggccacagcaaccccaggccaggccctttcccactggctttcctggggagcgttcctgaacaggaggaaataaaggtctgtggggagagagtctggggtgagccagcccagggggccacccccaccgcaccattgcacgggccctgtggccgtcctgtctcaggagaccatggaaaggccgtgggtcctgcctgtctttccagaaaagcctgtcgctatctcccctctgggacaccccagctcctgatgtggcctttccagccaagctgcagctggacagcagccaccacgacctggggctggcagagacccctccatcccagagggaatcagggacacccctttttccggggtgtccagaggctgcatattgaaccagggccttggaggcaaatgcaaggtcttcccccgctccctccctgggggcctcagtcaccgccggtgagtttaggtttgttccgaggggcttagactattggcccccagattcctggtgtgcctggggtggcgggactgctccggcggggccctctctccacagcgcagccggcctggggctgacagctcccgagcagggcagggctggtctgggcactgggccccgttcacagccaatgacaggaccagtggcctggaagggagggactccgcgcctttggactccagtgccttgaaatcccacagacctgggaaccgagtcagggatgcccggccgggagaacgaacgggcgggcggcgggtggaccaggacctgcgtccggccccacctctcccaggcctcacctgtcctggcgcccgccccggagcagccaggtgcagggagccgggggcaggggcgccgctcacacccagggacccccggtgcgggaagggcgtgaggcatgacgtcaccgcgaggtggccccggagccggcggaccccacagcccagcagagacctccggctggcggcccgttccctccctgcagccagccccgatttcctctttctgtgcggagcccgagctttcgcaacgcggcgggcggtccgcggtgaccgtcagacacgcagcccggcgggggaggggaggcggcggcaggggggtttccgggggtcctggggggggcccccccgctgcgcccggcccgggaagacgtccgggtccccgcaggtgcagccgggcccgggccccatccgagcgccgatccggcccggtgttcagcgccgccacccccgcggcgtccgcgctcccccgcccggtccccggggcccacccaggacccgcccggcaccccgcgcccaccccggacccacccggccccgcgcccacccggcccacacctacccggggcgccgcagtccgcgcagcgcgcgttccccggccgctgcagcagctccaggaccgccctgcgccgctccttggccatggccgcgatgcgcccgcgatgccgatgccggggccggggccgggagcgtcagcccggctcgctagggccccgcgcaggccgcccgccgccgccgcccctgcgccatcccgggcggcctcagcccgcgcgccggttccgcattcccgccgccctctgggctccgccgccgccgctcgtgtctccgccgcggtcgctgagcgagtgccggcgcggggcccggggcgcacgctgcgctctggccggcaaggcccgcgggcggcccccagcggtgcaggcgagcgtgtggcctcctccctcggccgctccggcgcccccagcccgcgcgccccggggacccgctgggaaatcgcccgccgcccgccccccatccgcgcgcagcgtcccacctgcctgggcgcgaggccgccccaaaacctggccggcctgggtgggaccctcgtgccgccgcgcgcggtgggacggagcctgcacacctactgtggggggcgcagagggcacctgccgagccccccaagaccatgggcatgggggtgctcgtggaaggcaggtgtgcgtgtcctgtgctacggaccaggaccagggcgctcacaccatccctgcctgggagggacggccagcaggtgacaaacgccagcgtcccagggcactgaggccacacagggcccagacggagcctccccctgagacccacccagccgcccaccacccacagatgggaccctctgggcacccctcccactcaggcaggctgaggggccccgccgggacttcacatgggggctgacaggtaacaaaaaacctggttttgatgtcacctcttcccagactcgcgtgcccttcctctgcacaccccagcatcttttcaaattctttccattttcttcttgcagggttaatgcagtacacccggctgaaaacaaactggaacataccagactgaaaaaggaaagcctctccccactgccttccaggcaaccactgttaacaaattcctcagcaccttccagaacgaacgtctgaggcctgtagcctttcatttatttattcatttatcgagacagggttttggctaacggctgtaatcccagcactttgggagaccctggcgggtggatcacttgagctcaggagtttgagaccagcctgggcaacatggtgaaaccccgtctctactaaatacaaagaaattagccaggcgtggtggcgcatgcctgcaatcccagctacttgggaggctgaggcaggagaatcgcatgaacctggcaggcagaggttgcagcgagccgagattgcgccattgcactccagcctgggcaacaagagtgaaactccgtttcaaaaaaaaaaaaaaaaaaaaaaaaccaaacaaacaaactcaaaaaaagttcaactgaaccatgacttgttcacccagtcactggcataggggcatttagagcgttttgaatgcatcagaatcatggtctacacaacctcatctttgcaagagttttgtgtggatttgctctcaaagtggcatcgctggggcaatggtatgggatgtggaatggcctccactgaggctgcactgaccagagtgccaccaaaggcacctgtccccctgctccagctgacgtggaatcatggagctgcttaagctctgtctacctgaagcagaacgcggcagcccgttttggtctgtgtctctgggatctgtgccctgtggcatcacgtgctctttccctgtaaccgttcacatgggtctttctcctccctcagacgggaggctttggggtggggacaggtggcattttcatctctgggtccctgtgccaggctcggaatccaccacacagcatgagcttggagaatgtcgcctaataaagacagacgaacattaatagcagcagctcagcactaggtattaggagaaatagcctgacttgtattttctattttcttttcttttcttttctttttttcctttttttttttttttttttgagacagggttttggtctatcgcccaggctggagtgcagtggcacgatcttagctcactgcaacctctgcttcctggggtcaggtgattctcctgcctcagcctcctgagtagctgggaccacaaatgggtgccaccatgcccaggtatatttttattttttggtagagacagggtttcaccatgttgcccaggctggtctcgaacacctgacttcacgtgatct

SEQ ID NO: 586108 - DNA, 4001 bp, Homo sapiens
ctcatgcctcagcttcctgagtagctgggattacaggcatgcagcaccacgcccagctaatttttgtattttcagtagagacagggttacaccatgttggccaggctgatctcgaactcctggcctcaagtgatccacctgcctgagcctcccaaagtcctaggattacacacatgagccaccacgcccggccagaactttgatataagcaaaaaattaatttgttgcattaagccactgagatttggatgttctttatcagctagtgttaccagctctaacacatcacatgagttatgacataccagaaaattattcattcaacatttactaagtagcagctaatggcaagaactatgttaggtgctatttacagctgaggggaggagaactcacctgttggaccatcagcttctcaaattcctccacaatctcaggcaagctaagccacttgatgcctggcaaaactcccaggactcggctgccaatcttcatcagcagcaggtccatatgcacctgagcgagcaggccagggtgcaacacctgtcagaaagaggaaccgtgagacaggagaaacctgctggacacattttacccagccagggctgggtcccaccatccaagcaagagccaggtggcttcttatcaaagaaaagaggatgtggtcccgacacccaagcagttagttcactccagactcagttcattttcctctatcagactattcacaccgccacttcaagccaataaatgaaacagcttgcatgaaataagcactcagatattggtcaggcaaatagaaataaacgtgggggcgatttgcatggcggttgtttctgatctgggatagctcagtgggtaggtgagctgtgagctctcacaacacttactttcactgccacggagatgaggttggtggcctcaggttggtggccagggacctgagcccgagacacccctgcatttgatccaaccaggtcagctttagggaggagcagcctttctagaaacgactggtctgcgagattttctggaggtttccggccatttccaaggtatccaaagagctctctcagcccaccgactgccccagtatgtgagaagggcggcagacaggaggccctgccaagtctctggacgctgtcagtctccaggaaggcagtgttggcgtatgctttgtacacctgggccacgcagcctgagcccacaggttcccggttctcaaaagagaggatgctcccccagtcatccccaaaagcctgccgaaggaagcgctcagtgtgagtccacgggtggggcgtcactcggacatgcagcttggaaaattgggcacagaaagcctccgaaaacagatcgcgccgggtgctggcccactggcccagtttgatgtaggttgggcctgaggtctcggtggctttcagaagcaggtggagccagagggtggagacgctgggagccaggtaggtgagggggtagaggagtaggagggggaagaatttcaccaacagagcgccggcgcgaagccagaggcggagatgcaggaagacgccgcccagaggtcccgctcgggggaggctctccgcgggccccgcgccagccgccccgctgcagcggacccttcgccgactcagaacgtcaggggccccctcacccacgtccccgcacagggagacgaccttgggcaaagtgcccagcagaagccagcagagcctggcatcgcgagggcactcggagggcctcaggaggctgagtccctgtctgagctcgaagcacctcaggtgcgacaggcaaaccctgacggagacgcgccagggcgccaccatcctcccgaggcccgcggcccaggcggcccgccctccacttcagaggcgcccgctcaggcgaggctgcggtgaagccgaagcccggccctgaccccgcggacggagctgcccatctgggccggatccgcgccccgctccctccagcacctcgccgggcctcaggccggaggcccgcgccccgcccgacacccgccgcgccgcgccgcgccgcgcggaaggggctgtcagacggcaccaactgcggaacgggaggagccaggacccacgcgaagccaggccccgggcgcccgcgacctgagcgagggggccgcgcgggcggaggcaggggccgggcagccgcagggtcaccgtgcgcccaggggccagtatgagatcgctggggtggcgggcaccagcccagggcgcgggcgcaggcgggggccgggagggcggggcggagcgtggagggcgggcggagcgtcgggggcggagcgtcgggggcgggcgggagtgcaggtgcagggaaccgaggcaccgagggctgtggtggagcggaggggcgcgggagatggatgggacgggttcggccactaggttgaaaccgccattgcaaaattataacagataatgaaagagatctgacctaaccaactccatcttgcttctaacctccaagctgtccttgttcattcctgggcgttggctgaactaactttgggaggaacttagtttatactttatagtttaaaacaaagatgataacagccctttctgaaaacaaacctccttcttgcctggggaatagactgtctttgtaggactaacaaattaaccaaaagattagaaagtatgatttaggagtcaggcagcaaggctacagtattctgaccctccctaaactgctaataagatcagtgctcaagatattttgcagaccctgcacttgatggatcaactgacacctaccagatcgataaaccaggtcatctgatcttaggcccccactccggaactaactcagcacaagaggacagcttcagttccctaagatttcacctccgacccaaccaatcagcactctcgactcactggccttcccccacccaccaagttgtccttaaaaactctgcccagtgtcccgcgcagcctgatctgtgtgaattactccttctctattgcaatgcccctgtcttgataaatcggctctgtctaggcagcaggcaaggtgaacccgctgggctgttacagggtggccggtgggggcagagggctgggtgctgggcggtgagggtcggagggagcagagggtcggtggcagaggcccgggcagccagggtcccttgacccgccccttaaagaggacggcgaccccaggccaagaccaccctgcccttgagtcctgggtcctgggtagcaaaacgcaaaggcaccctctatgtccccctccccatgtctatcttcccactgacttcttcgtatctttcattattccaaagagcatggctgaaaagtatgaaggcaggttctgaacacaggtccgcttttcagcgggggttgggtaggggggtggtgttggatgggggtaactgggctgcaggagtaggaactggatgctgtgtcctcggctgcattaattcggcaattgtgttggaccttggggaaaggctccggaaaggccatattcattcattcaataatactcactgagcccaataaatatttcttgagcccaatctcatatttgtcgaggctcaataatatgtactgatcaagctaggtcatgtgctggaccctgggaaagcggacacaaatatcctgcccttactggctgaatacgtaatgagggggacccaacatgggaacatataaatgtgcaatttcaattttttttaaaaaaacacccatgataagaaatcaaaatgtgcagtttcaaagtgtggcaaagccatgcaagaaatgaccgggcacggtggctcacacctgtaatcccagcactttgggaggccgaggcggggggatcacttgaggtcaggcattcgagaccagcctggccaatgtggtaaaatcccatctctactaaaaatacaaaaattagctgggtgtgatggtgcatgcctgtagtcccagattattcaggaggctgaggcaggagaatggcttgaacccaggaggcagaggttgcagtgagccaggatggca

SEQ ID NO: 586109 - DNA, 4001 bp, Homo sapiens
ctccatttgagtcataccatccccctgctaaactgcagctagaggcagaaacaaaaccctcctcagggtcttccaaatctccccaccccccaactccccagccccatccctgcggcccgttggagatgggcacaaggggaagctctcaaagccccgccgtggggcaaagacctctggtccacgtccacctccgggcagttggaagagcaggctcctccagggcccaggaagagtccgcgggaggcagacagcgtccccgtccttgcaaccatctcgcccgcccgactgggaagacagtgacaaagttcgggcgcagaaaaggcagggtcagggcaaccgccgagtggcagcggcagggactagactgtgtttgaccttggcaaaccccactctttctgggccggaggcatgtccacagaagggtggccagcaaggctggaagagccgaagtcctttcccaccacccatataccaccctcgggtccgcagggttgggaggcgagcccagcacgcgctctaggtgcgcaggggaagagcccagcgctgcgcgcagagccggccttggagcttgccctgggggtctgctctcctcgcccactttcagtccctctgtggggatgggtgcggcaaaagaccggcggacccctctggccgccgtctggccgctcatcagctccctgaccttggccaaacctttctctctccacacctgtctcccctctccacacttcacgccaggggcgcttcgtggattgtaactctgaagagagccctggccggagggtgccagccccgactgcgtccccaactcgtaggagtgaccttgaacacacccccactcggagcctcagtgtccccacccgccgcataggaaaaagcgcgcccgactccgggcattcccagcatcgtcccagcaagtgtgtccgagaccagatgaggggtgcgcggctgcacttaccgtcctccagagacgtgggcgcttggcggggaccaaggtggctgtgaccagcaagtgcgacgcagccaccacgagcccaaagcctatggccagcaggctgcgcacgggcagcaaggcataggacacgaaggtgaccaaaaggagctgccaaaccccttgttcggcggtcgctggccccccagcggccccggcggaaccccgggcggggccgcccagcgcgaaaggacagcagagcagcgcgaaggtgaggctgaagagcagcgccagctggccgacctgctgcagctggggcacctgcagggaccggacgttggttaccacgagcagcgccaggaagaggacgcagtgcaccgggtgtgagcccttggccaggccgggcgcgggccccggcgcgcccagcagctcggccagcgccagcgcgcccgccagcaggctgagaacggccagcgccttcagcgtggccgcctgctccagccgcagcgtgtagccgcggaacagcgcctccagctctgggcaagcgaactcctcgtcgcacgcccggagcccgcgccggcggcttgtcccggccgcccgctcggcgcccccgggctcgcccgcgccgcctccgccgccgcctccgccgcgcggcgcccccgccatctcagcgccatgcagcggccgcggccgcgggcgcgcccctcgccggcccggggcgccggggcgcgggcggcggcgccggggcgggcgggcggcgggcggcgaggcgccggggcgcggggcgcggggcgggcggagttggggcgccggctgccccgcgcgcgcgcccggagcgcgtcccctcccgcccgccgcgcctgcgcactggagcccgcccgcgccccgaccgtggtcctcggcggcgaccgcgctgcgacagccgagccccgggagccgcgaacctgggcgcgcacagcccgcgccccaactccgcgtcctgcgttcccgcccgccggaggagccgcgtgacctcgagtaccttccttgtcccctccgagcctcagtttccccaccgtgcacagtggaacccaccctcttggcgtcacctggggagtcgaaaatactgaaatcctgcgaaattccctgttgcggggcagttaatcttggaaaatatgtgccttcccccactcaataaaaccaggccactagatttgagaggggcccgcgtctgactgcgaacccagggccctcgcccctacgagacggagaatcgacgtccaagaatccccggggtcaggaggaaggtggaggcctggggcgtacgtcccttccatgcgcatgagggaccccccgcccctcggcaattcttccctaagctctagggtcgcggagaccctgtgggcgggtgcgggctgcgggagctgtgctggggaggcggcggtggtgaagtccaagaaacaaagtcctgggagtcggcccgagggattcctcctgggtactgaactgaaccaggatgggctcctggcagtgctgtgtcccgggaagaaggtgtgaggctgtaggtgcagaaatggggcaagagatgaaaggaaaaggggcgctgctgtttgccttaacgattagctggatacccgagagagagcgaaacgttttcttctagcaggacaattgggagggaaggacgctggcccatgggggttaaaacccgcgagtcgaattccactgcttacattcattcactatgagggagacaactttgtgctggtgcttcaagtacatgatgtcatttggtgctcagacggcccctgggctgcctgcatcccccttacagtgaggatctctcatgatcagctccctccaggaggcctagagaggagtagccactgcaagaacccctgcctcctccgttatcccggctgcttctcgtcccctcaatatggatagaccaggaactgggatcccatgaaataatggagaccaggaggctaggccccctgcagaaggccccactcccagaaaccaggatttaagggatctcgcccaggcattggtctattttagaaatgccccagggattccattaactctcagggattccacgtgttgttatacggaacaaaggttagaatttgaggcatttccattttatctggaattggtatcaggttgaaccatacaaaattgccgtttttgtaaaagggccaaagttgtcacatgtcagctctttcatatgcttcaacttaatagttgcagatgatgacacctctaggctttgtctagagtaggggcactttcccatcccatgtccccagtagctcacaccaaaggcccccagcagacacttgatgacagctggtccctcctcctggaatagcatccccaacagaacatcctttctgaaacctttctggctccttctggcacagctcgttgctttctccccagtcccagtcttccgtgaaaattcatacccaccactctgtagcctcattttctgttcatttgccttcctcccctctttgagctgaagccctcagagggcagcactggctctgaaaagatggcatggcccaacctctgtcactgacttgagaaagcaccttcttctatccactagtcccctgcttatccccaaataggagcaaagtctgcaagatttttcttttcaagtgttaagattgaagtgaagattttcttgttaactggtgtggtatatttttggatcctaacaatttattaaagaaaagctgaataatatccaaaaaggatcaaactacatgaaaatgaaaaagtatgataaagttaatctgggtgcaaagtttacaaataaatggcaccttcttttacctgttttggctctcaactttgtcctcactcaaaaaatgacattcagacaggtgcagtggctcatgcctgtaatctccgcactttgggaggccaaggcagggggatcacttgagtccaggaacatgagagcagcctgagcaacataaggaagcctcatctcaacaaaaatttaaaaattagctgaaagtgatggtacatatctttagtcccagcggcaaatgagttttaagggaggctaaag

SEQ ID NO: 586110 - DNA, 4001 bp, Homo sapiens
tctacctctcttcctctcttcctccgacgccctctttgacaattctccatgtactcctgccttcttccctcccgcccctgcccacgggttgagcacatggtggtctctctctgaccctaagacacaagtccagtgatgtgtctatccctgtgccaggttgagcatctcatggctcctctgactgtgtgctgcccctggcatcacagtctaaggatgcctccttagatccttgggtgctggtcccccggggccgggctgtgggactccttaccaccgccccccagttattcttccctaatctctctggattcagcttcccctccgaccccttacctctccccagtttgctcccaccactgcttcctttcgtgagatgggctcccccactccatttgagtcataccatccccctgctaaactgcagctagaggcagaaacaaaaccctcctcagggtcttccaaatctccccaccccccaactccccagccccatccctgcggcccgttggagatgggcacaaggggaagctctcaaagccccgccgtggggcaaagacctctggtccacgtccacctccgggcagttggaagagcaggctcctccagggcccaggaagagtccgcgggaggcagacagcgtccccgtccttgcaaccatctcgcccgcccgactgggaagacagtgacaaagttcgggcgcagaaaaggcagggtcagggcaaccgccgagtggcagcggcagggactagactgtgtttgaccttggcaaaccccactctttctgggccggaggcatgtccacagaagggtggccagcaaggctggaagagccgaagtcctttcccaccacccatataccaccctcgggtccgcagggttgggaggcgagcccagcacgcgctctaggtgcgcaggggaagagcccagcgctgcgcgcagagccggccttggagcttgccctgggggtctgctctcctcgcccactttcagtccctctgtggggatgggtgcggcaaaagaccggcggacccctctggccgccgtctggccgctcatcagctccctgaccttggccaaacctttctctctccacacctgtctcccctctccacacttcacgccaggggcgcttcgtggattgtaactctgaagagagccctggccggagggtgccagccccgactgcgtccccaactcgtaggagtgaccttgaacacacccccactcggagcctcagtgtccccacccgccgcataggaaaaagcgcgcccgactccgggcattcccagcatcgtcccagcaagtgtgtccgagaccagatgaggggtgcgcggctgcacttaccgtcctccagagacgtgggcgcttggcggggaccaaggtggctgtgaccagcaagtgcgacgcagccaccacgagcccaaagcctatggccagcaggctgcgcacgggcagcaaggcataggacacgaaggtgaccaaaaggagctgccaaaccccttgttcggcggtcgctggccccccagcggccccggcggaaccccgggcggggccgcccagcgcgaaaggacagcagagcagcgcgaaggtgaggctgaagagcagcgccagctggccgacctgctgcagctggggcacctgcagggaccggacgttggttaccacgagcagcgccaggaagaggacgcagtgcaccgggtgtgagcccttggccaggccgggcgcgggccccggcgcgcccagcagctcggccagcgccagcgcgcccgccagcaggctgagaacggccagcgccttcagcgtggccgcctgctccagccgcagcgtgtagccgcggaacagcgcctccagctctgggcaagcgaactcctcgtcgcacgcccggagcccgcgccggcggcttgtcccggccgcccgctcggcgcccccgggctcgcccgcgccgcctccgccgccgcctccgccgcgcggcgcccccgccatctcagcgccatgcagcggccgcggccgcgggcgcgcccctcgccggcccggggcgccggggcgcgggcggcggcgccggggcgggcgggcggcgggcggcgaggcgccggggcgcggggcgcggggcgggcggagttggggcgccggctgccccgcgcgcgcgcccggagcgcgtcccctcccgcccgccgcgcctgcgcactggagcccgcccgcgccccgaccgtggtcctcggcggcgaccgcgctgcgacagccgagccccgggagccgcgaacctgggcgcgcacagcccgcgccccaactccgcgtcctgcgttcccgcccgccggaggagccgcgtgacctcgagtaccttccttgtcccctccgagcctcagtttccccaccgtgcacagtggaacccaccctcttggcgtcacctggggagtcgaaaatactgaaatcctgcgaaattccctgttgcggggcagttaatcttggaaaatatgtgccttcccccactcaataaaaccaggccactagatttgagaggggcccgcgtctgactgcgaacccagggccctcgcccctacgagacggagaatcgacgtccaagaatccccggggtcaggaggaaggtggaggcctggggcgtacgtcccttccatgcgcatgagggaccccccgcccctcggcaattcttccctaagctctagggtcgcggagaccctgtgggcgggtgcgggctgcgggagctgtgctggggaggcggcggtggtgaagtccaagaaacaaagtcctgggagtcggcccgagggattcctcctgggtactgaactgaaccaggatgggctcctggcagtgctgtgtcccgggaagaaggtgtgaggctgtaggtgcagaaatggggcaagagatgaaaggaaaaggggcgctgctgtttgccttaacgattagctggatacccgagagagagcgaaacgttttcttctagcaggacaattgggagggaaggacgctggcccatgggggttaaaacccgcgagtcgaattccactgcttacattcattcactatgagggagacaactttgtgctggtgcttcaagtacatgatgtcatttggtgctcagacggcccctgggctgcctgcatcccccttacagtgaggatctctcatgatcagctccctccaggaggcctagagaggagtagccactgcaagaacccctgcctcctccgttatcccggctgcttctcgtcccctcaatatggatagaccaggaactgggatcccatgaaataatggagaccaggaggctaggccccctgcagaaggccccactcccagaaaccaggatttaagggatctcgcccaggcattggtctattttagaaatgccccagggattccattaactctcagggattccacgtgttgttatacggaacaaaggttagaatttgaggcatttccattttatctggaattggtatcaggttgaaccatacaaaattgccgtttttgtaaaagggccaaagttgtcacatgtcagctctttcatatgcttcaacttaatagttgcagatgatgacacctctaggctttgtctagagtaggggcactttcccatcccatgtccccagtagctcacaccaaaggcccccagcagacacttgatgacagctggtccctcctcctggaatagcatccccaacagaacatcctttctgaaacctttctggctccttctggcacagctcgttgctttctccccagtcccagtcttccgtgaaaattcatacccaccactctgtagcctcattttctgttcatttgccttcctcccctctttgagctgaagccctcagagggcagcactggctctgaaaagatggcatggcccaacctctgtcactgacttgagaaagcaccttcttctatccactagtcccctgcttatccccaaataggagcaaagtctgcaagatttttcttttcaagtgttaagattgaagtgaagattttcttgttaa

SEQ ID NO: 586111 - DNA, 4001 bp, Homo sapiens
aaagccatgggtcccaaagtgtttctccaatcaatcccctgccagcctgaaccttatacaaaacaggacttaatgcaccccttagcttagatcagtcccgagagtgcaggagagggatcctttcagaggctccccacagacacctcccctcaccacacatggggacaaacagacttttgggggtcttgtcccagacacccaaccacccatgaaccacccatggccaaagaggaaaagtatcaggcccgcctccatcgtcaccccacacacacttgttgatggatcagttggaagagctggcccagggcctgctcagcgtgttccacctccaatctgtatgttcagatttcggcttgtgtccaagctggtgcctctgcctgccctccccaaggtcagtgaggagcagaacttagcttaggactggggactccaccagtgctacttgtacccagcaccaaactcatttaattggggtctcctgagaaaacctgggtgctgcctgctgcccctgcccccaaaggctcaaacatagttttccatctgcttgggaatcctaccgccactcaaagcttctagcttgaccttcaggatgcttgtctgcctctggccagctgcagtcccagggcaagttgccctccacatgctgcgtccagccccttcccatcccccaactcctccccagggccgctcatgggaagagccaaatgctgtgtcttggagagggccaggggggctttgcgggacattgtaaggctggggaagataaagggagtctgacgcacctgcactcaaaaacataaaaatggtcggaagaattagcaggtgtccaccaccccacccccatcttccaaaaaggggctgagctccatccaggggtgaggctcccctcctcagctccacgtgaaatgcaatcggcttccggctgggttccctcctgagggtctagttgcatccatcggctcccctgtcccttctgagccccctaacctgccaaggtcccgccgaggatgtggcctccgccccccgcagccgccgcaggagcttctgcctctaaagcggcaggcaggggtctcagcgggcccacttcaacctgggaaggccggtgcgtttccccacagaccccgcagggcgtttcttctggggaccactgaagccctggcatccccaaccccagcccctccgcgccacgggaaacgaagacgacactcttttgaacaatcccggatgtgtcaccacagaggggcattctacactggcccctaccccaacccccacctagcacattgcttgcccacccctcaaaccccgtgcggattgcggtacctagccccgggggaccctccagccctgccttcccgatccgcgtaggtgcgtccgtccacctaagggtagggaggcatgtccctccgggtccctccggccgcatggcttgcctgcccccctggtctcccttctccgcatcaggaggggcgtgagatagctaggtcgacccccaccccggcagtctgcggcgatcggccgccccgagcgcagcgccagacacttgggttggggggtgtcagcctgacgcgcaggaagggcgcagcggcgggagggggcttcatttcagatctgggaggcttgcctggcgccggccctcgcccgctctccgtcggtggaggtcgcggctggcggagaccgccaagccagaggaggggatccgaggtcccggctgggcgaaggttctggagggggagaagacggccgaggcgtggaggggcagccgcggcggggcgacccttacctgctcactgcggggcctgtccgtggggccggggcagactccgcaaaggacgcgcagcctgcaagtccgcggcccgcgcggcgcggggatggggagcgtgtgcgccgaggagcgcgcgccgagccgggtctccgcgcctgtgtggccggctggcggccggggtccgtgtgtccctgcgcggcggcgtgtgcgtgtgcgcacgcggggaccacgctcgcccggagccgccgccgccgccgtcactccctgcccggggccgagcgcagcgccccctttgcccgccccgcgcggcgcggcagtccagcttggctccgtcctgcgggagaggcgccgcctccgccgcgaagccaggctgggcgctggagggaggcgaccgaccaccgcctccccctgctcacttcacaggctggggagggggtgctgcaggccaatgagcgcccgggggcggggttagatcgagggcggtgcggtggggggcgcggtggggggcgccgggctgctcaacccgaccccacccgcagcacagactggagcaggagctgcggcgggaaatcccagcggcgggggtcgggggcgctgaggtggagccctcagccccctgtcatccccgtctcctctgactctgggcctcctgggctcaccaccctctttccagtctctccatcatagccaggactagaaagccttctttcttctccctaggtcctcaagatttcctgtgtatcagagcctgtcttccctctcctccaagaagccttccttaccaggcaagtctcagaccctccttgggctcttctttgcccctaccgcccaggcctgggagggtcagctagttttggggtgcctgtcgggatgtcctccaatgtgacccccccgcccccggagaaagaccaggaaggggatggtggtgcttacaggacagaggcaacttaaaatatcagactgcctggctccagtccctgctgtgccacagctctgtgagcttgggtaagtggctcagcctctctgagcttcagcttcttcatctgcacaagggaacaatagtaccggcccccaggtctcttcacagcagcattaaataaaaatggtacactcaccccatagtagtttctccctggtatcattgattcgccgatgctgaataaattactattgctactgttattacagtcctgtccaacctcctcctagtgcaaatggcttaataaggagaactacacaggtaaaggtggcctagcgggttggcagcgaagcccaaacttaactgagagtagttagttacccactcccaggcaagttctcaccctctgcccaccccacccagcccccatcccacagctgctcctgcctgcctctgctctcggtttttggtccctgcctcaggcgtcagtctctgagagctctcagttctgcagccaggctctgttcttgcccattcaagtaaattctcgctcagcttccctttgggtccaagttctaggtatggccaccttgtccaggaggcctcaagaagggggaaggaggagggagagccttgagccttcctttggggtcgccagtctaccaaagaggaaaggacctgtggatggagaggaatccatatggaaacttgaaagaagcaatctgagggcccagaaagacgcgtggaggttcctaggtccatgtttctctttactgaccaatgaccgctgacccccattgacacaacacactggtagtctgattggttcatgttcctttcagtccaggagagcttcctggtggaggagaatatcagtcttatctatatcaagaaagaatgaagagaaaggagagaagaaataatggagagaaaagggccaggtgctgtgctaaaatcagacacagacaggacctccctttaatcctggctaaccccttcttagcttgttgccctaacccctgagagctgagagccgctttcttcatctgcctccaactctggtgttgtgaagatcaaatgagatgatgtgtataaaaactctctataaactgtgaaactaagtgtgagggaaaggaggctgccaggagtctcagagtcaagagggactcagagtgcaggacgtagagggcctgggagtgagaggaagggtgaagatcaaggtcatctatggcagaccagcccatcctgggaatgtggatggccaggcttccagatagaggcccccctactttgaagttcagcactcagttccagatt

SEQ ID NO: 586112 - DNA, 4001 bp, Homo sapiens
tgcaagtctggggctgtgaccaccaatctcaacctctctaaagactgagcgtagggttcccagttcccagggggaggccctcatccccccacctgccaaaacctcaataggggttccttactatccactcctccactattctgttctgggcacagaaggggcagagaggtgactgagccatccaggcctggaggagcatctggtcatccctgccaactgccatacaaaggaagggacatgggcccaagaccttcccctggtctcctacggggcaagaaaagcttcaaagaaaagggacacttggttgagtattgaagcccaaagaagaggaagtggtctcctttcgagaagtaaggggtttggaattgattggaaggatagggagtcctggggggttcagggatcacacagaggacagaaaagacaggtagggagcttgtggctgcacactcatttcagagtctgggagagggagcagggactggttgtgaggattccccatgggaatcctcccaggaccctaagcaggagctgcaagtgctgttgagaacctgatgagaggtggggagcatgagggaagtttggcagaaacacaggaaagctaccaaatgcagacagccaggggacgcagggctgctagagcggtgccccagagccaggagagcaagcctggaaggagagccagaggcaggaggggcacaggcagcccagggtgtgggaagcagccaggaaagatctagagctggggtggcaggggaggggctgctgacatcaggaatgttggatggtgccttggaatctcctgggagacagggatcacaagaccctctgccaccttccagagggccacgatgaaaacagctaagatttactgacaactgattatgcaagaggccgtgggttaaatgcttcagtgatgcatcacctcatctaatttcctgtactaatgtaggaccacccattgctcaccaccacctgaagccctgtgctcaccaccacctgaaactctctcacctacgtgagacctcctggagtaggagggcaaaggcaggagggagggacgacgtgaagctgtgccaccaacagggagagtggtcccattagtatggcagggggtgacacagcacagtcccctgtggctcaagcctagtacctgtcgcgtactggaggaatggggataagcgacccgtacaaccacagcaccaaccctagagccaccggcccccaaaagcggccctgccgcccgggtgctggatgtgcctccacgccagcgctgacctcggcctagcacagggtccctccaggcatctgggctcgcgtgcgcattagtaagccagccattcctcccctagcagactggggagtggccagaccctaccgaatccccctgttcccacctgagatgccagccccccacacccccgccctgccctgggctcttaccttctgcggccgtccctggccgcttccctggcttgccccccgcctgggcttttcggacccgcggggtgggctcgggaggcggcggggcctccacgtcgtcctcccggggctcaggttctagctctgacaggaagccctcgaggaactcctcgatctcgtcgtcggtcagcaccgtctgcgggcgccctccagggcacagggccagcaacgccaggaggcagctgagcaggggcgccccgcgcacggccgccatggccgcggcacgcgcggggggctccggggagggcgcggggggtcaggggctctgggtctctgggaaagggcggagaggggatcgagacgggtgagggaatccaggaaggggcgggagagaggatggggtgagcgagggaatccgggaaagggagggagagtggattagggtgggcgaggggacccgggaaggggtgctggggggctccgaagccagaggggctcaggggtggtcggggcgctccgaggtcctggcggctaataggcgctccggccccgcgtggcgcactcccgcgcggatagccgtctccaaagcgctggcggggcccggggcgggggcgccggggcttccggagccggctccccacccccggggaggaggaggaggaagagaaggaggagccgagagtggacggaggggctgcgggggggcggggggcggggggcggggggctaggggcggggcaggcgggcgggcgctggcggcgagcgtcccaagcccggagacttgcgcctaggacagaggggcagggggcggggcgactgggaagacagagggcctgagggaaggaaaggtggtggggagggcctggggtgcgggtctgagggggccgacatccctcctccttctgccctaggcaccccccttaaggcgggaccccgagtccaccggggctctgagccctccgcgggtgaccaggaaccctggacggaaagccgtggtgtcaggcctctgagacctctctcaattcggagggccacagaaaggccaccccatccttcccaggctctggagcctctgcccatgggccctgctgcatcccagcgtcaattcattcagtcatcctaccaacctcttcaggtcggtgtggggccgggccccgtgctgggccccagggagggacagcacagtgggaactcactttccagccaggaggcaggtgcaaaactgccctcagagtggccagctgccccgctgggggtaggagtcccatgtaagggcatgccatccctcccctccgggtcccaacgtggacaaatagccatttatcaccttcttcttaccagaactcattttttaaaaagtgtctaccatacctccagctgccacatggacccagagggcccagaggacccagaaggcaggtggattgagtgtcaactgatcccaggatccatcagggatgtgcaccttggtgcctggtgtttgccataaggcttctccagggcaaatgttggctgccctacaacggccatcaacaggcagagtggtcccattagtatggcagggcgtgacacagcacagtcccccgtgactcaagcctagtccctgtctcatactggaggaatggggagctaaggacagagctccgaggacattcccccttaaaggaatgaggacacaagagaaagctcacaggtagtccatgggccaagtgcagaggcagacagccctaagccacgattgtctgcggggtttggccccagtgaagtagtcaggtagggaagcctaggagcccctgggatgattgacagggcagagtttggacctggggtcaaaaggaaagaggaaaagtgggtcaggaagcacctgggtccccagagcagccccgagtgagttggagcaggcagcagccggggaggccacagtggaggctgctgggcctgggatacatgccaccccctgggagcaggaccacaaggaggccttgcctcctctcacacctggtcctgccaagaccctgcctttgctttctcactgcatctccttgaaaaagcagtgggactgtgtcaggttctggctctacctcccaggcaccacatctcggcaggtagcctcagtgccgtccacctgtgtccctgttctccttgtcgttcatacaggatcatgcatgtgctgtgcctagcacacattcttggcactcacactgctgccttttagctctcatcatttgccctcagagatcaacctgagctgtgcccactggggcgctcagagcagaccctgagccccaacacccaggctccctgtgcacctgagcctgcctctgcctgccacgtgcccccaggccagtcctggtggcagcaaggatccgcaagctctcccctttcctcatcctctgcaaagctctgaatcatctttctcaaaacttgttctgggaatttgctccgttgccccagttgagcatgtcaagcccggcggcccaaggctggggtgaagcagcgtggcacgtcacttccctgggaacaactcacacatggattggatttgggtccaacatcctctgccagggaaaatagaagcc

SEQ ID NO: 586113 - DNA, 4001 bp, Homo sapiens
ggagccaggggagcccggaaacctctccctgctctgggaaaagctcggaagcagatgtgcccccaccctcctgtggccggcccacgaggcttgtcgccctccagaaggagctgggggaaggtaagcttggagcaaatcaggaatgtctttacttcctccaaggacagtgaagctgcagcaacgatgtctctcccgcctccaccctcttcagatctaagaggaaaaattggtcatctcctgtctttggggcccagggctcgcacaaatgccatctcctagtccccagccacagcggtgattcaggccatttactcagatccacgttaatgagttttttctgtcacctaattagttcacagagaactcagccttgagaggaaagaaataagaacgggttgggaaaaggcagaaggaagtcagactggcatgtcacaacaaaagatagaacccagcaccacatggggtccccccagacccagtacttcttccccggctatggggacctctgaaagcagaaagggaggtgttcaggtgcactatcccccagaacctcaggcaagcagatgaagctgggagtggggccctaaccttaaggcccaagtcagggacaggcccctgcccataactccatgttatcgcaaaaggccttggctctcactgcatttccactgaggccaaacccaccacctgccggtgggcgtcccctttcaaacagagctgggggaggaagcagatggcccagggtgaggcccatctgtccgtgcccgctcgaaggtcaccatgccaccggggtgcctgcgggtgcctccagcacccaccacaccagggcttgcgaggcatctgccagcagcgtgccaccacttcctgtgccctcagcggtcgaaagtccagggcctaagggcccagagaaaaaagcgctaggcagcgcagtggccgggggtttccggtccccgactccgggtgcggtgtccctggcggtcggtcagcacccggctgcccagcagctgcctccagaccgaggagccgcggatccccgtcaggctcatgacccggccaaagcgcggatggacctgccggcgcctcccacgcggtcgctgagcctcagcccagcgccaggcccggcccgctcccgcttggccgccgcggcgtagggggtgtgcgtcgggagagggcgccgcggcgagcgccaccctccgggcctgcgggcgctgggcccgggaaggctgccatccactaacgcgaggctccgatcccccgccccactgcggagcagggcccgggcagcggctaagaagcctccccggtcacgaccccacctccccgcagctgaagccctctgccgcgcccaccttccccggccaggcctggacagatctggtcccggcccccccaagcgacaccaccttcgcgccctggaacacagtcagcagaaaacccccaaccccaaagtgtccccgaacgagatatggcgaagctgcccgccggttctgcaacacagatcggcaaacctcgtggcctggtcctcaagcgcgcaaggacccccgacagggagagcatggccaggcacggcctgtggagccctcggccggcgccggagaggccactgcgccccggctcccgcagcccccggctccgctcaccctcgatggagatgacgtgctcccggatctggttctgcagcgccaaatcctcgatgcgctcgatcaggtcgtagatggcgtagatattgggatgcacggactcgaagcgctggatctcggcccggatggccgcggagttggagagcgcgaactgctgggggggcccgccggccagctgctgcgaggggccgccgccgcccccggccccgggccccgcgccgccgaactgcccgccgcagacgagctgctgcgcggcagcgccgccgccccccggagccgccaggctctgctgctgctgcgggctctgccccccgcccgcctggaagttcatggcttcggagccgtggggcccgaggcgggcccggggcggcgcggcggaggcggcggcggcggcggcggcggcagcggcgagcgggagcgcggggctggcggggccgggactactgggctggcggcgcggggctagcgcatggagccgggggccgggggccggaggccgaggccaggaggcgccgccgcgcacgctgtggccgccgctgccgagcgcttcccagcgccgtgatcccgctgcctcggagcagcctccagcggcaacaacaacgggaccgggagcgcgcggcccaggccctccccccgcgtcatgcgcacgcaccgccgcccccgccggctccggcacacgcagcccgagcccccctccccgccgcccccgcccctcctgcgcgccggcccgggcgcccccgcccctcgctcgctcgctggctctgcagcctccacccccgagccgcgcgctccagccctggcgccccggcccctcccactcagcctcggcccttccgcctcctcaccagcccccacccgcattgcctcgagggccaccctcgcggaggggacagctgccctggtctcctcccgcgcccggctgtcgctttcgcctccctgcgctgatctgggcggggtgtcggatctctaggcaatgcccaaacagtgccctgcgcctgagggtgctgctgaccgaggctgattggccgaggagtccgcccaggcccagctgctcctcgcttacagcgtcccgccttcagtgcggcataggctcccctgtccccaggctccgaggtcagccctagagaccaccctgctgccggagttttctccctgtctccctgcccaggctctccactgccggctgcagcagtgctctcctaaaagaccctccccctgccggacttgggagattagctaaatgctacccgaccccattggtacatagaggaagaagagggagggatgaaatagtatatgcctttctcccctactcatcccattggagagaccaaccaaagcccacgtggctctcaatttttcttgtcctcaccccttgtccatcctgtcctttcactccctctagggccagggagctccctgaaatgtcccagttcctctgcagtcccattgccaaagtgggctgcagttctgttagccccctcccccccaccaacacacacacgtttcctaaaacctacaagaggtgacatttgcagaggccgcagccaataaatctgccagagatgttgcagggtatctgctacccccagatatcctagggcatcagtgacacacatcgtccttcttacgcacacttccacttccctggccaagctggatcttttcccagcatgaagctgtccactgtttgattacccacacaactcagccccagaaccaacccagtcactattcccgagttccttgtaccttccaaagcacctggtgcaagctaatcaacacacagggtctcctaagctcctgaggaacctgtgtttctatctccctgcataagcttaaggatatcttgtgccctctctgggtttcatctgcgaaatatagtggttgaacataaaacctagttctgatgttgtataattctaaaagtaacatccaacatctcttttaggtgcttaattagaattgacagcaggaagtagcaccaggtatacctcccaagagagacactaagagcaaagagctcctcaaatgtgttgccccagcaactagcacacacgtgttatagcactgttgggctgttcacacgtctagctcttctactagtatatggagccacatgagggcaggaagagggtctgattcaccattttattcccagtatcttgcacaatgcctgggatatagtgtgtgtgtgtgtgtgtgtgtgtgtgtgtgtgtgtgtgtgtgtaattttttttgagacggagtctcactctgtcacccaggctggagtgcagtgactcgatctcagctcactgcaacctccacctcccgcattcaaatgattctcctgcctcagcctcccgagtagctgggatt

SEQ ID NO: 586114 - DNA, 4001 bp, Homo sapiens
gaaagtccagggcctaagggcccagagaaaaaagcgctaggcagcgcagtggccgggggtttccggtccccgactccgggtgcggtgtccctggcggtcggtcagcacccggctgcccagcagctgcctccagaccgaggagccgcggatccccgtcaggctcatgacccggccaaagcgcggatggacctgccggcgcctcccacgcggtcgctgagcctcagcccagcgccaggcccggcccgctcccgcttggccgccgcggcgtagggggtgtgcgtcgggagagggcgccgcggcgagcgccaccctccgggcctgcgggcgctgggcccgggaaggctgccatccactaacgcgaggctccgatcccccgccccactgcggagcagggcccgggcagcggctaagaagcctccccggtcacgaccccacctccccgcagctgaagccctctgccgcgcccaccttccccggccaggcctggacagatctggtcccggcccccccaagcgacaccaccttcgcgccctggaacacagtcagcagaaaacccccaaccccaaagtgtccccgaacgagatatggcgaagctgcccgccggttctgcaacacagatcggcaaacctcgtggcctggtcctcaagcgcgcaaggacccccgacagggagagcatggccaggcacggcctgtggagccctcggccggcgccggagaggccactgcgccccggctcccgcagcccccggctccgctcaccctcgatggagatgacgtgctcccggatctggttctgcagcgccaaatcctcgatgcgctcgatcaggtcgtagatggcgtagatattgggatgcacggactcgaagcgctggatctcggcccggatggccgcggagttggagagcgcgaactgctgggggggcccgccggccagctgctgcgaggggccgccgccgcccccggccccgggccccgcgccgccgaactgcccgccgcagacgagctgctgcgcggcagcgccgccgccccccggagccgccaggctctgctgctgctgcgggctctgccccccgcccgcctggaagttcatggcttcggagccgtggggcccgaggcgggcccggggcggcgcggcggaggcggcggcggcggcggcggcggcagcggcgagcgggagcgcggggctggcggggccgggactactgggctggcggcgcggggctagcgcatggagccgggggccgggggccggaggccgaggccaggaggcgccgccgcgcacgctgtggccgccgctgccgagcgcttcccagcgccgtgatcccgctgcctcggagcagcctccagcggcaacaacaacgggaccgggagcgcgcggcccaggccctccccccgcgtcatgcgcacgcaccgccgcccccgccggctccggcacacgcagcccgagcccccctccccgccgcccccgcccctcctgcgcgccggcccgggcgcccccgcccctcgctcgctcgctggctctgcagcctccacccccgagccgcgcgctccagccctggcgccccggcccctcccactcagcctcggcccttccgcctcctcaccagcccccacccgcattgcctcgagggccaccctcgcggaggggacagctgccctggtctcctcccgcgcccggctgtcgctttcgcctccctgcgctgatctgggcggggtgtcggatctctaggcaatgcccaaacagtgccctgcgcctgagggtgctgctgaccgaggctgattggccgaggagtccgcccaggcccagctgctcctcgcttacagcgtcccgccttcagtgcggcataggctcccctgtccccaggctccgaggtcagccctagagaccaccctgctgccggagttttctccctgtctccctgcccaggctctccactgccggctgcagcagtgctctcctaaaagaccctccccctgccggacttgggagattagctaaatgctacccgaccccattggtacatagaggaagaagagggagggatgaaatagtatatgcctttctcccctactcatcccattggagagaccaaccaaagcccacgtggctctcaatttttcttgtcctcaccccttgtccatcctgtcctttcactccctctagggccagggagctccctgaaatgtcccagttcctctgcagtcccattgccaaagtgggctgcagttctgttagccccctcccccccaccaacacacacacgtttcctaaaacctacaagaggtgacatttgcagaggccgcagccaataaatctgccagagatgttgcagggtatctgctacccccagatatcctagggcatcagtgacacacatcgtccttcttacgcacacttccacttccctggccaagctggatcttttcccagcatgaagctgtccactgtttgattacccacacaactcagccccagaaccaacccagtcactattcccgagttccttgtaccttccaaagcacctggtgcaagctaatcaacacacagggtctcctaagctcctgaggaacctgtgtttctatctccctgcataagcttaaggatatcttgtgccctctctgggtttcatctgcgaaatatagtggttgaacataaaacctagttctgatgttgtataattctaaaagtaacatccaacatctcttttaggtgcttaattagaattgacagcaggaagtagcaccaggtatacctcccaagagagacactaagagcaaagagctcctcaaatgtgttgccccagcaactagcacacacgtgttatagcactgttgggctgttcacacgtctagctcttctactagtatatggagccacatgagggcaggaagagggtctgattcaccattttattcccagtatcttgcacaatgcctgggatatagtgtgtgtgtgtgtgtgtgtgtgtgtgtgtgtgtgtgtgtgtgtaattttttttgagacggagtctcactctgtcacccaggctggagtgcagtgactcgatctcagctcactgcaacctccacctcccgcattcaaatgattctcctgcctcagcctcccgagtagctgggattacaggcgcccgccaccacgcccagctaatttttgtatttttttttgtagagacagggttttaccatgttggccaggctggtctcgaactcagtgatccgcctgccttggctcccaaagtgccaggattacaggcgtgagccactgcgcctggccatagtacatcttttaaaaaatatgttagtagaataaatgaatgaacaggagggatggaactagaggtaggttagttctgtatggtatcaatctagactgacattcctaaggcaatatttgggccacttgctcccacagtaggcaagaaccatgggaagactaggatagattattttaaatcaagactggcctgtaaaaaccaggatgtgagatctctgtggctacaggagcccagagggaaaaatccagatatccacaggcctgggattcaatgccatccacacagtaacacaccaaagacccgactcctgagaccaggtttgggtggaggtgagcgaatagctactgtgtgacatgtaccttagtttttacactttttaataaaacatctaatttcttccttatgattgacttacgaggtgtgttttagagaggaagaaattaatgttcagagagattcaataacccacccaaggtcatatagctgagaagcacaagataagggatcaggatttctgccaggttccaaggtctatgcttcttccacagccctgaaggggctgtggagtcccgaaggtggaggaggggaccaaggaaaggggcagccctgaggatgggtatccctagccagcctggtggggcagcccatggatattgggctctgggctgaagaattaattttggtggccaaagtgccttctggcgtccactctgacataacagtagg

SEQ ID NO: 586115 - DNA, 4001 bp, Homo sapiens
aatctcgcagcctatgtagtagaaaaagactaaagaattttaaatactacgtttttccccctttttcttcttccatgtctcttcctttatgacatcagagccacaataaactgttatggtgatacacaataaggttagaacacggtggttctactatgattcatactacgatgtaacacaatccaatcagcacatagaagaaaataagtggacatcaatcctaaaactaaaaccctactaataatttcatatacaaattttaataaaacctagaagaatcttagctaaaatattttctcaaaaaaaatacaaatatagtttctctttctagacagggcatagtgttcccagtgatagcttagctttttcagccaaattatttcccaacttcaatgacaataatttaaacatccaattgatttttatatccaattgattttataatattttaattggggatttatataatacaaattttatctccaagtaaaataaagttgagaaaaacataccgattcatcttcatcactgattgttctgtctgaatagtcttccttttctgaatcttctgacatcttttccagtgtttgacttgagatttcttgtaatatacgggtaggctgtaaaacaatttctaaggaaattatatgacagcttttcttttcaagctgtaggtgtttactacattaaatgagtactcaaaaatatattcaattgtatttaacagtcacaacagtcttctctaaaaactaattagaatacaactaataaaaccttcaatttcaaagagttaaaggaattttccatgactatacgagacaacaaccacaataagacaaatcaagcaaatcatttaattaaaaggaatttccagagtatacagccaaatcattcacattttatatttacaattaaatactacacagcaagttcagaatgatcctgaggcattaaaagataatgaatttaaaaattatagtcacttactgaaatgtagcaatataattttaagttttctccttgattttcacttgaccaaaagttcaagtgacaagactttacattttgattattattctgtagatactgtctgttctaatattcatttatattattcttattcttagaaatctaaatagctaccagaaggttgtattggtaatgaccattaccattctatgcaagtatcttcccatgtgggtaatatcaagaccagggaataatcgaaatttcttgtcaagttcccatcgttcttgagagaccaaaggactcgacaatttcaaatctattagtttacgcccctctctacaggaagcgtgttttggagcgtggactacatataagttaagtccaagctctatggcaaatcactgccaatgccacggaaccgactgtctcatagatgacaccttcagtcctaagaaactgaagtttctgcctgggcatcacaactccacatttggaaaatccgactggcctaaattccattccttacaggtgcacacagggcgcacgaagtgctgacctgctgcggatacagctctggtctcaggaaacggcccttatccaccggcgctccgcgggtgtcttccaccactgcggaggaggggcagatgcgggcgcgtccacgcttagccgcgtcccgacagtaccaaggcgtttttggcgggaagcacgatgaggccacaactccgggcggccgagttccttcccgcactcactcctggacaccttggtgtggggaggcgctcattttccggggcgcgctcgcttcccgcagggggcgccccgccttacttctgcatacctcaccgtcctgtcggggccggcacctcgctcccacgcgagtcctctggccaggccagtcgtcgcttccgtgcggggagaatatctcgggatctcgcgatctcgcggagaacccggtatccagccgctagaagtaacgccactgctggagatccgcagccccagccacactcccaactctcgtcatcaggcaacgggtccgccctcgcgagacttcggacagccttcggagatcacctagcaaccagctcggaggaaaggagcctgcgtaggttttggctccaggaagagggatcccagaggatgccgggaactcggggtgggccgcagggcggtcagagaggctctcagagaggctttggggtctgtcgggagaatttaggagtggggaagaccgggcagctatttattcccagtggtctgcacttcggctgttgcctcagaggaggcagtagagcatgctggttaggactgtgctttggagcccacctgacttttaacagtgtgacattgaacaaattaattacctggacttcatgggtacaatacttgtaactactacttggagatgttagaatattaaaaagtacgttggtcttgattttttacagactgagttccattctacacaattgtgcgattaattcgcttattcgattctggaaaatgaggcttttctccttaaatactaaatggagagtcatagatgaactagggtgaattctcaaaattatcagctcagagattctttatagcaatcgtcagctagcatatttaacactgttttcctgatgactgcaaatcactatatgtagtctcatttagttaacagacgttattcatgaacatcccatattgattttttccctcatctttagctctacagggtaaggtaatctatttggaaaagttttccaagtacagctgaaaaaaagtctagattttgatgatataagaatgtaaataaacacttttcacaaagcgttatatgtcatgagattcgtgatattgtagaaatggagataataaatggtagcaagtttgaaagtagaataaagggcaaagcactatggcttaagcatggaaatgggttaacataatctctttgtattttgtaagtatctgaaaataggtgtttttgaggtcagcagtttaaaagtatgaaccttccagattagaccttggccagagaatattaatagagtatatcttagatcaacctcttgaaaagtagctcttatagttgaagcttgttttatgccatacataaatcactaaaggtgacatgcacagagaaatctttatttatgtaatctgtttttctgttggattttagtcatggctgcaagccataggatgtcagctgtacaaggtaaaactgagaaatggtctaaccaggttatataagaaattaatggcagggctgagagacttaagtctcgtgatttttagtccaaatagttatattatcacataccaagtagtccatgggaagaaaaatgatcttaatgcataattttaaaaacttaggattttttttttttttttgagacagaatctcacttgctctgtcgcccaggctggagtgctgtggtgcaatctcagctcactgcaacctctgcctttggggttcaggtgattctcatgcatcctgactagctgggactacaggcacgtgccaccactaatttttgtattttttagtagagacgtggtgtcaccatgttggccagtgtggtctcaaactcctggtgtcaagtgatccgtctacctcagcctcccaaagtactgggattacaggtgtgagtcaccgtgcctggccaaaaacttaggaacttggcaaaactttgaaaatgatattcattcattattttattaacaacttttttctttttaaagacagctctgtcacccaggttggggtgtagaggcacaatcatagctcactgcagactcaaactactggtcccaagagatcctcatgccttggtataacaaattcactggatggctgctgcctactagggacagttcactattgcaaggaaaaaaaccagacatttattgtggaggttatgttctggtgggagtaatcaaacaaaccaatgatgataataaaaatgatatcactcagacaataaccgctatggagagaaatcaagtaggggggaaaaaaaagaataggggatgctggg

SEQ ID NO: 586116 - DNA, 4001 bp, Homo sapiens
tcctcattgctggtctgccatgatcatcactaatatcaaacaacaaatgttggaaaccgcaatgcccatatggcactggataagttacgaaacctctctttgcttctgttctcccatctgtcttgcaagaacaatagtgctcgctccctggctcctaaaggtatcaagacagggaaagcttttttttttttttttttttttgagacagtgtcttgctctgtcgccaggctgaagtgcagtggcgcaatctcagctcactgcaacctccacctcccgggttcaagtgattctcctgcctcagcctcccaagtagctgggagtacaggtgcgcgccaccacacccaggtaatttttgtatttttagtagagatggggtttcaccatgttggccaggatggtctcgatctcttgacctcatgatctgcctgcctcggcctcccaaagtgctaggattacaggcgtgagccacagcgcctggctggaaagcattttttaaaaaacaaaacaaaaacaacagtgtcttaaaataagactaaaaaattgtcaaaataaatcccttgacaaacttattaaaaaacagagatccaggcctgatatcagatgttaatcatgcatctaaccaaataatatcttaatttgggagtaggaggagtgcagaggggagtggagggggctttactatataaccagaaatctaggctagaattgtggctgtaaattcactctggcatgaccgaacagtaccaatgccaagagtagcactcagatgatgcaccaaagcccccccaaaatctagagtttcctggatgctaccaccaggatccagtcatggcaacagggatcttaaaggtgtaaatgattaaccttcaggatggctcacctagacgtgcaaacgtttgaaaaagctaagctctctaccagggtaacccattggctctcatctcttagatttcgtaagagttttaccttctgggtaacatttcaaagccctgctaagattagtatctacacctgaactctggaccatggctcccttccagccactatctctaggctgtcaatcggggttaattcgcttttttttttttttttaatcctgtactctaatcataggaatttcaaccaagtttcagctggcttctgcatctcacactccagcagggacacaagcccgaaggaagaaaggtgcccgtccatctccaggccggctttccccacctttttcctttttgctttccacctgcatgaagttccctctaaaggtgcatgtcattttctggccctttaagtcccgacaccccatcccactccgagttcccttccatcctccgcactttctccctccccacttgcagtttgcctcgaccccctcggggagtttctcggtccctctccgggcgtctttctgcacccgtacccttctctccgcagagcgactccggccttgcttcctctcccctgccctttcccctccccaccacaccgctgcagcagacgaccccgtccccacagccggcgcgttccctgacctcccctccgcccctcacctcggcccccttccctcgcgccccggagccccggcctccccaccccgcccccgggtccccccacgccgacctcggccactccctcccggtcactcacaggaggccggagcaggtggtgcacacgaagctgcccacggtgatatccacgtaggtgaccccgcgctgggcgcactcgaagcagtggcggttcccggcctggctgcagccacccagctcccgcacccgacggcaccacacctccgaggccgcctccgcctccgccttgcccccgctgaccccgccgcccgggcccgggcccttcttcgccgccatcaccatcgctgcccactccctccccgctagtcagcaatcaccccttcaaccactgccgccttcccgcctcctcagccgcctccgcacgcccggctcccctgacagaagctcgggagcgggcggcatccgcaggagacttcgccgtccaccaccctccttgcccgtcctgcacactgattggctaggtttctcccacctccttactccgattggccctccctgggacggcctccggttgctggagccgccaatgccccgccccaccgccttcaggcctcaggcctctcctattggccggcagagaccccagcagcgagaaccgtgcgtgccctctccttgtccccgccccctctcgccgctgcctccaccgtggcccgcctcctagttccgattggtgagtcctcggcactcgggctccgacgctaattttgattggctggcggggctgcaaagttagcgcgcgagacagaggaggtgccccgcgcgtgcgtagctgtcgtcctcccgactgatgacgttaattcccggcaaatttcaaaggcttactctagactgtgtagagtgtcatgcaaagccgaagagaagtggccatgtgaggggctgagcaggagggggaaagaagagagcgcttaagggagagagggagagggagcaagagtgctttactagaccagtgctctaattcctgagccacagagcgaagggagtgctttataaatgtcatttcattcgctccgcctatcccagaggtggaatccccattttacacccttaggttcaacaacttgcggcagatcacacgagtgcgtggcccaggattccactctgggtcttccaactttagaaaccctgcctttaaccctcctagtaggtggactattattcgattattcatttaacaaacactgagtgtctgctaggtttcaggcacgttctagacactgggaatagaatacagcagcgaagcaatcaaacaaaatattcttatagagcttagtttctagtagggggaagcaaacaatacacaaattaaagaatcaccagttagtaataaatcctacgcagagaattaaaatcacatcttggaaaagactttttgggtacttttttaattttttaatttaattttaattttttgagatggagtctcactctgttgcccagactggagtgcagtggcacgatgtcagctcactgcaacctctgcctcctgggtttaagcaattctcatgcctcagtctcctgagtagctgggattacaggcggccaccaccacccccagataatttttgtatttttattattatgattattattatttgagatggagtctcgctctgtcgcccaggctggagtgcagtggcacgatctcggctcactgcaagcttcgccttctgggttcacgccattctcctgcctcagcctcccgagtagctgggactacaggcacccgccaccacgcctggctaatttttttgtattttcagtggagacggggtttcaccgtgttagcaaggatggtctcgatcttctgacctcgtgatccgccggtcttggcctcccaaagtgctgggattacaggcgtgagccaccgcgcccggccaatttttgtatttttagtagagacaggatttcaccatgttggccaggctggtctcaaactcatggcctcaagtgagcctcccgccttggcgtcccaaagtgctgggattacaagcatgagccacaatgcctggccacctgttgggtacttcagattgggttggtcaccatttttaaaacaattactttttttttgagacagggtctcgctttatcacccaggctggagtgcagtgacacaatcatggctcactgcagcctcaaccttctggactcaagtgatccttccacctcagccttccaagtagctgggagtacagctgtgcaccaccatgcctggcgaatttttaaaaattttttgtagagattgggtctcactatattgcccaggctggtctggacctcctgggctcaagtgatccgcccacctcagcctccatctcccaggttcaagcgattctcctgcctcagcctcccaagtagttgggattacaggtgcgtgccaccatgtccagctaatttttgtatttttagtagaga

SEQ ID NO: 586117 - DNA, 4001 bp, Homo sapiens
tattaggagatagagccttcgggagataattgggtcataagagtggctcccatgaaagggattagtgtccttatgagactagacactacagagatggtctctctgcattgtgaggatacagcaagaagacagatctctacaaaccgaggaagagagctatcaccatgcactcaaccatgctggcaccttaactttggacttccagcctccggaactgtgagaattaaatttctgttgtttaagccacccagtttttgctattttttttttacagtagcccaaactgagagtgtacaaaggcataaaagacagtaaagtgtgttgagagaaacatacgtagatagttgaggggagaattaggttcatggctgagactggaaaaagggggtatgatctaacagtaatacgctggggagaatttagcaaggcctatttgttctgattcttctctgtgtacctgtgtcttcaaagataagggcattcctttcctcgatcctatacttacaggatgagcacctctcactgaagggtcttatacagaagaaggtcaaacaattcttttatggcctgcttcaggggagaaaagtgggaagacacaaagtgactttcctgcttcagttgtttcctctaatgccaacgagtcatattttgcggcagtgtgtcctgaatctcatcaacagcggagtaaaaattggagtgtctagaacaggggttctcaacctttagtgcagaacttgttaaaaacacagaatcctgggaactgccccttcccgcaagagtctcatttgttctggaattaagctgtcatcttcacttgttaacaagtactcccatgttggttgcaatggaggtcaccactataccagactttgagaaacagtggtttagagataaaggattgaagaccaggtgggattagaaaagaccttgaacccacactaaggactttggctattattttgaagacaatgaaaaacctttaatgggctttaagcaggtgagtgatataatcatatttgaactgttaaaagaccactttatagcagaatgaaaaatgaactggaagaagctaaaattaaagctaaagagaaccattaggaagttattgccataatctgtaggctcctaaaagaacaaaccaagataaaggatggatttggaaagctttagaaagtagaaattggcagcagttggtggtccattgactgtagtaagtgagagaggaggaaccaagccaggtttttgtgcttgggtgactggttgaatagtgatttcagtcatttagatttgagtggtaggtttgtggagaaaagtagtgcggtttaggagatactgaatttgacacgcctgtggagtatccaggtggaaatgtttttcttactagatagtgaacccctcatgggcaagttcgtctatccatctgcagcaccagaacctagtaaagcgccagaatgaatgaaccaaccaacccatcaatggatctgatactattggccccattttgcaaagggctatgctgaagcccaagggacgaagtgaggggggtccacaagttagcgacagctctgggactcgaacccaggacagctgactcccgccgtgaccacgggatccgcgcgaggccctcccctgccgcgccggccaggcccgcaccccctaccctcaagccgcgccgccgcctgcacccacgacccctgatgcttgggtccccgcggctctcggcccagcgcgactccagaggctccgcccagcgccccgggcccccatcccgactcccaccccgctcgcgcgctcagtcccagcgacccgcactgcgctccccgcctgggcgccgctgcactcaccacggctggtccagctcgcggctctgcctttcctgtgtgctccctccagattccccggctcgttcaagggaaaccgctgccgccgccctcgggttccgccgcggggctgcgagcgcgcgcgggccagttcgggccgggggcgggaaccggctcggatgctcagggacggtgggggtggcagggcccaccggcttgaggctgcctttcccggcgttccctcgtttattggctcactcttcctttcatccatccatcctttgcgcaacaatatttgatgggaagcctgccaaggtaacactgttttagcacctggaactaagtcggaaaataaattaactaaatgaacaaggccattggagatggtgctccgtgccacgaagaaaatgaaacgaggtgatggaaggcagtgcgggaagggggagaactgtgtgaaattaggcggcctgcgctaggccttctgagtaaggggccattggtctgagacctggatgtcaagaaggagcagctgaagcaaagatccaggggagagagcctggagagggaagggcccgtgcaaaagctgaaaagcctggggcactctggcgagttgcaggccagtgtgggtgagacagagagagctaaggagacaggccaagcgaggaagctggagaggtggagacaggccacggcggccaggagtttggacatgacattaaacagggcgagaagacattgcgggggtgcaatcaggggctggtgggactggtttccatttcacacagctctctggccacaggtgcttgattggattctagagaacaagagagcaacggagaagctaggccaatgccaacctccagacagtttacattctgtactcgcccaccagattggtgtggggacaaagccaggtccttcttctttccagcattcagtctgccaacttttttttttttttagacagggtctcactctgtggctcaggcgctagtgcagtggtgcaatctcagctcactgcagcctctgcttcccgggttcaagcaattcttgtgcctcagcctcccgagtaactgggattacaggtgtgtgccaccaggcccagctaaatttttttgtatttttagtaaagacgggggttttgtcacgttggccaggctggtctcgaactcctgacctcaagcgatctgcccgccttggcctcccaaagtgctacgattataggcatgagccatcgcacccggccagtcaaccaacatttgagtgtgcactaggccctgcatcaggcactgggggtatgctcaggtacaaggcccttcatggttcctgccccatggagcttgctatctagtctgcacatttcctacgtgtagacatgcatcctacctatgtctccctaggtgaatgcttcaaaaaaaaaaggccggggcggggaccttcaatgaggctatggtgcagtaaacatattccttatgccagggtgcaccaatccattgggccacactgtttagtagcaagaaatttctagccctctctcctgagtctccatctgtaaactaggggactgagaacattactattaaaaaaaaacccttctagctctaaaatgttgtcatagggtatggaagaccattattttcagttcctcttttccaactatctaaagcgtttgtgtttggaaataagcttctgaactgctcacctgcaggctagaaaaatctgagacttgattttgatgttccaagggtcagactcagcgtatgctttagggcttcagcatgaaagtggttccccaaataagaaaaggtcagctttgatgaaggatgaagaaggatggaaatataggagattaagggaatctgaatacacacctgcaggcagatgtgtaggttggagttttggagacctataccaattctactctcttccaaataccattttactaggatgcattcagattccagaataatcaggcacaagctctagccagccctgaatgggttcctgcagcccaacagaaacctgacactctgacttaggcagccccaagaacttctgttaggctgggcgcagtggctcaagcctgtaatcccagcactttgggaggccaagatgggtggattgcctaaggtcaggagtttgagaccagcctggccaatatggtgaaactgtctctactaa

SEQ ID NO: 586118 - DNA, 4001 bp, Homo sapiens
atgaactgaattttttgggaaaatttgtgtaaataaactaattctcccatgcattgggttcctttgcccctcatacttaggcaatttcagtttttatgctcagcgttgttgaccatctaactcaccttggaagtcgagacagaacaccagctgagattgacgttaaagcatcatccaggcgacctggtggctttcctttgagaatccagctgacaacaagttcaagcagcatcaaagaaatgaaaaatggagttgcctggaaaggaagttgcagaaaagagatgctattatgttccatatgaaattattttacatttcctgattagtcatttcagaattgaaaggcccagatttgggaagccctgcaggagatggtagacactcattttagaggattacttcctacacagtggtaaagaagtctaattattttagacatacactaaacatgtgctcaaattctatcatccaatttgaatatgaaatgtaatcatagatataaccacgataattataatattataagattaagaggaacatcttccaaattagtttaaaaaatacatttagaataaggtagataattagaggtctattgtctctacatgtataatttagacccacttcaagaggctttccttaaagatgcacataattctaatttttcatattagacttaccagaactatttctaatgatgaaattcaaagagtagagacaattttctgcttagaattttagagaatatggtaattttacatgtttgcttaaaacatgattcagattttattcatttggttttgatttttgtttcacataataagagatgttttgaaagctccactattggtgatggagcattgaatttggtttgatattgcagtataaacaataataatttatgaagatatcagtgccactttttttaacttaaaaactcagaaagaaagtgtaatatctaatcttgaaaaagatacggattttactcatttggaagctaatcatgagttttgaagctttctaaactgaactctcaataacatattctatgatgtcattttttttctatttctgccatgaactagtgagtgttgtaggaataactttgatagggtggggaacttcagtattcaagttctaattctggatatttccacttccaatcatagccaggaaccagaagtgaaatgtgcctctgagcacttcagagtttcaaagaaaacttgggtcaaattcaaacttaggaagtcagagctggacctggtcaagctgcatatccttcattctgctgaactactctaccaaatgaaagaggaaatagtttccctggaaggggtggacaagtgaaagatttaaaaatgaaattgttacaaagtttactgatgtggtgtaactatttgtcattgagcttccaatagctacatttacaatgccatggagtccaggaaaactttaaacttttgtttttgtcatattctggagtgacatataaaagagggaatttacaggtgaagatggctatggattgtaagaaaattcaagtggaaattctacttttgcttcacgcctttaagaaactgaattattattattagaatgtaatcatttgaataatgaaagtgaacaaaaccctaaggagattgaccttaccatttattaagaaagcagcaagaataagagtagcctcttccaataaagtctcaccttttttacataatcaggcacctcttctaatgtttggaatgaagtttcactgggtttcatcgtgtaaaacaacatgcgaaatccctgggaaactgaaacatcctgctgggcttctgggttcttcatttctgcccttgtctgattcccagctggagaatatttaggattcaatgcttgaagcctgaggctgaacaaagaggacgagatgtgcagctcagaacaagctctttgtcagagaacagctaaaaccaaagctccactgagagcacactcaacagccgattctgtgtagagagacaggaaaatacaaggatcaagaacaagtacagagttcagtgggcgctgggccagaaacagggcatgtgggggagggaaaagaggactcatacccaaatcaaagtcatacagtgcagtttgactgtaggtggagcaagttactacttaaaaaagaagagaaaaaacatcataatagtgtctcggaaagaaaaaagtgataacgcaggtatatgttcactctgaaaaactggatagaaattcaagcatcaagtcacatagaaaaacctttttttctcctcatttagaaatttacaatgtgttcaagcttgtagtttctttatttcctacagagactgtgtataggcgagctacttaataatagcttgaaagtcagtaagcactgaatatctggctccttattgcctatctatatttctgtatctgaatcatgttattaccacttctgaatgtttgcaaccagtttaggggcatttggcttattacataatctacattatttaatggaaaattggctagtcacatcttctctattcttcttagtacttatgggaactttctgattaaagaaggtgccaagatgttgctgtgagacctgtttctgttttacagaaagagcttaagtgattgtaccttttaagtagattagaaggcacttaatttattacattaccagtgaatatgtggagcttgccagaatagcctcagctctttacccaaaacagctgtaatcatcctttagctgccatttcatcatttaaagatgtttacatagatctaattaaagtatcaatgcacgattgttttagaaaaatatagaaactatagataagcaataataagctgcccaaaacgctattaacattttggtacatgtatggtcagttttgctataatgtgatatatccattcctaaaaatcactatactgtacaaaattgtgcaataaaaaccacgggacttgtgagaaaaaatgtgattagggtaaaatactcaaaaacttcataatgacccacaaggaacaagaaaaaaaggatgagagcctaataaaaatggtagcacactttcacacgttacatggttaagatatacataaatactaaaataaatatgatgctttaccttgaaaaagacctgaaacttgttttggaaattaggcattggaagatttgcaaactgcaagttactttagcttgttgaaatgtgggttatctgaaatcagacagaaagttgcaatatgacatatgggtgtcaaggctcacaacacacaggtgaagtgagggtgttactataagtggtgggtgtattttgtgcatcctaagcctttctgtttttcagttcagttttttaaagttcaactactctttttcactgaaaataaaatcacacatgagcataggcagtatgctcaaattattttctggtatattaatcacattggaacaaatttaatctcaaagcacatgttatagcagaattgactgtcctttcagaccattcccattaccaataagtacatatggacattaatttttaataaaggtgtctgggcgtggtggctcacacctgtaatcccagccagtactttgggaggccgagacgggctgatcacctgaggtcaggtgtttgagatcagcctggccaacatggcaaaaccccgtgtctactaaaaatacaaaaattagctgggtgtggtgatgggcacctgtagtcccagctattcgggaggctgaggcaggagaattgcttgaacccaagaggtggaggttgcagagagtggagattttgccattgcactccaggctgggggacagagcaagactctgtcacaaaaacaaaaaaaaatttaataaaaatgatcatagtaggcatactgttttattacctgctttcaaaacaattttggaaattaacaatgtgatacaagagaaaaaaatacaaacaatatagctgtatataaagtcaaaagtggcagcatcctttcttctcaatatatgcacacct

SEQ ID NO: 586119 - DNA, 4001 bp, Homo sapiens
gtgagccaccacgcctagctgatatcttagttaaattactttttctttctggtatgccacagttgattcccaggaaaaactaaagcctatgaaaaggaaagtacatggcaagataagttttgtgagtgaggagggagggagggagcaaagtgagttgctctagcaagtcactaaggttgtccacggggccgtaacatggaaggctggagatttgggattctgataaaaccaaacactaaaagtgctaaaaaggaaatatgaaaccccggcacctaactctagtattggtgaatggttttgaatgaagtcaaataaactctgcaaggaattactattgttaagcaggaagtttttcataatctaatatcttgagtggaaacctttgctaagcattagctgatttttttttaagtgttgctaagctaccagatcgaaatgatgttttgtatttaactgaccaatgattaactaatccatagtatgtaagcacaaaatgtcttactcagaaaagatgtaagcaaaaatcagggatatactttgttcattttctatacctacaaagatgtggaaatgccaataacttttgtcttctagagttttgcaaaaacaacctaagtgttcactgtaagtcaacaattctcagccctctttgtataaagacttctttgtaatgttaaaaaaatcaagaacttttacatgagaataattatacatttggaatactggctggttcagaaacatatggcaaataatttctttgaatctatcaacaaacatttgattttatcttttatttataacagcatctatatatattctaaaaaatagtaaattgatggtaaggcatttttatttacttagcccatttacagttcttgttttccaagtagctattaggaccttgcagtatctccaaagatcacaggttggaactattgatatattgcttgtgttttacggcaggatgactcaaggaaggctaacataactcctgctgtacaaacatcctgctgtggggtgactttctgagattcactccactgagttttcgtaatgtgaatagattctgctctgcaaatttcctgcataaaccacctcaaaacacaattccatggaaaatattgataatttggagacacacacagacataggtacacacacacacacacacacacacacacacattatgtgaagccagcactttttactcatcaccgtatccctgtcttcttgtctttagcaaataatgaacttgcaagacattttagtgtccctatttgtagatgcttcaggaaagcaaccagctctctcctctaatagcctatcccatgaatttaaagattgcagaggcaacaagaatgtctttgcagcaaaaagagaaagaaaactgttttctgatttgcaataatatattccaagcgggcaatccgagctgaggtgtcatagtggagaagcctatggggctttgctttagcccgtgggaaagaaagctttagatggtgactgagacgaaaatccctggaccctgtcccaggcttgaaaaatcctaggattcacctactcttggaaattttgtttcgcaaaagagaaagcatttctctgaactaactcgggaacgtcacactgtgccagctctagccaaagaaaggccccagtaagacttttgtggaaattccatgatttcccttccgtatcctacttcattgcctttggaaacttgcagttctctgttgcttgattgcctacaactttatatagcaatcagaggcccgaattcactccagcaagtacccttctaaagctgctgtcaggagccttacctggatttcctcacccacctgccttgtgtgagtcggcggctaggatgcggtccaagcttctgagtgtgccagcacagctgagtctctatttatgcaccagggcatacctcaatcccacccactagtgctgcatttacttgttgctaactcagaaacgaaccttcctttccccaagtgattatcttccctgggttaaagagttccttgtttttaaaaataacattgcaaaagtatgcttttcagtatgcatgtttttaactatttgtgaaacgtattgttaagaggttttgaaacgatgggcagagtgccaaatccaggtagactttgaatgaagacatttgatttgcctgaaggctgatttgtctttacatgattggacagagtttgtagtttgtagattttttttctgctccgtgggcagattgcctttatttacttgaagacacacaagagatgattcacaattctgatcctcgcagtcatataacctgccatactccattatgataaaaattattttctacaatacttccctgctcctgtcaaaacaatgcaccctaacttctacaggtatgaaaaaaaatacaaatcaagtaacccacgtaatttttcaaaactgaggaagtattggcaaaaaaaaaaaaaaaaaacagcctaatatcgtgagcttgtaataaatgccttgccattgaatgtatgcagcaacttccctccacagagttcaaaggtatttcacagataatctcttatttaaaggcaaactttcctgccacgcaagcaggaagccatttactccattttctcagacctaaaaactaaggtctgcaaccaagttttttttcccctcaagaccatttaattactccctgaagattttaaaactggaatttaaattttctgtcagaaaattttaatcctgtattttgttcatgaagttgtgtgcagtctttaaaagctcagaatgaagaaaatgttaacaacagaaagttaatgaatgggatgcaagccctatataaatgactttttaaaatgagttaaggtcataatatttcaaaaacatttgcaagtatgtatatttttccaataaatccttgaattctgtgggcaaaatcgtgattctccaaatactgaatttcctttcaattctaatgaatttatagaagtaatttcttcaggagtttgaaaacgatgatttgagcaaaattcttaaaactagcaggcccttagatagacccttgtaatattcaattccagtctttcattttacagatgaataaatgaagatggcaaaaaattcataactttttgaaggtctcacaactagtttagggcagagttgggaccaaagtccttcagtcccttatccactgaaagtaacaagtggatgggatttggagtcacgagattcccatctgaatcctgcatcctggtgcttgctcataggatgatctgagatctcatttaacatccccaaaacttcagtttctccatctataatatggggataatattaacatacgggaccattttgaatattaaatgacttttccctgtattgccacatggtttttccctctgtacctgtctgtgtcatttttttccttttcttataaggacaccagtcatattgtatttgggtcctgcctaatgacctactttaacttaattacctctgtaaagatcctattctgaagtcctggggattaagacttcaacatatgaatttttgggggggacacaattcagcccataacatttgataaaagtagctaatgcaggctggcttaagacctagttgttgggttgatcagtgcagcaaaccaccatggcacacgtttactgatggaacaaacctgcacatcctacacacatactccggaacttaaaaaaaaaagtctttgatttgttacagttaattatagtgatataattattctatactcatgtgcctaatctcatgtcgggaaaaacccagagtttgtcatagtggctgacggatggcaaggaggaggtaattattagcagatatcctacacatgctattgaggctgtggaatctttggcatatctgtcttggtgtgaggtaactagggttctgtagatggtacatatagtatgctttgagacaagcaaaggaggggtttttgttttatgctattaaacttcatcacttttaacagt

SEQ ID NO: 586120 - DNA, 4001 bp, Homo sapiens
taccactccaggttaaccttactttatttccctccctaatccccagttgtccctccctccttcccttccccttccttccttccccttccttctttccccttccttccttccttccttctttccttccttccttccttcctctttctctctctctttctttcttttctttctctctcctttctttcttttttttttttttttgctcttgtcacccaggctggagtgcagtggggccatctccactcactgcaacctccgcctcccaggttcaagcgattctcctgcctcagcttcccaagtacgtgggactacaggtgtccaccatcatgcccggctaatttttgtatttttagtagagatggggtttcaccatgttggccaggctgatctcaaactcctgacctcaaatgatccaactgcttcggcctcccaaagtgctgggattacaagggtgagctacatcgcccggactcctttcctctcccctcctttcccctcctttcccctcctttcccctcctctttcccctcctctcccctcccctcccctcccctcctctcccctcctttcccctcctttcccctcctctcccctcctttcccctcctttcctgtcctttctttccaggcatataaaaaccctgttaaacaattatcacggtgcctgataagaatttcagtttaagttctcataacttattaaaccataaaacatttcagaatgtcatcttgtaccttaaggccttggtcatcttgtactttaaagactgaaacaaatacagggtggattttagtacaggacagggacagttgactctggaacacaaagctcaacccagggaaggcagccttagttagacaggttgggagttgcagtggaggaactaaagcaaccacctaggacaggatcttaacctggatccagcaggcttctagaaggcctgtggctgagctacagaaggctcaaaacccctggaaattgtgtgcaaaattttatctgcctctgttccttttccgtgggaatagggtccaaaacgtcattaaaattcttccagggatcttggatataaagaagagttaagaaaagtcaatctggaaggaatctttagaaagatttttctatgttagctacagagacaagcaggtggaatctgcattttaaaaaagaaaaagcataacctcatcatttttgctattttaaagctgcgaagcttagagttaagcgggaaccattttttctttaaaatttcaagtctttatgtattattgtcaaatactttctaattaaaaaataaaaatcttggttttctggttttacattgataaattataaaatagatattaaatatattctgtgacaaagcagtacaacttgtacactgtagattttgaataaataacgctttccttggtaaaatatagtgtaaactgctgagggtcctttagtatcagttgcaaggttaagctacttgggggaacacagataaatgtggcatggttacaggcctacagcagcttaaaatgcatttgggaggcacataaccatatgtcagcaattagattgtataaacattggtcaattagcattttatgacattagtattttatttttcaaaagtaatttaacgtaagtaactgatattataagttcctatattttaaaataaaacaagacttaaaagaatataaagaagagctatcattacttgtagaatacttttcaaagagtcgtttttgtggttgacgtcaatttattctaataccattaatataaatagagataaaactatgaaaccagcaaaggaaatccagttcagtaaaagaagaaaaataaaaattcatttcactttcctaccctttactgaaagcttcacttttaaatagcaaaaggtgattatttaaatatagcaaagcttgaccactgattaagtaatctggaaaatttgcttgcttacctgacttggccagtgctcttgttggaaatgtattctggatgtttctggttaaaaatgggtgtggatttatagacacacacacacacacctgacctacaacctcacctgcatagaaacaagagcatagttaccggaaaacaaacttagaaaaataggctggtctgaaaaactctgtacttctttccagttctcatgcttctcacactaaaaaagctctattctttttctctaaattaagattgaatgtcctcataaaataaggtcaaataccatctttgtgcttctttctcttttaccttttatttcccaaggtagtttaatgtttggctgaagttcagcacaaaaaaaaaaaagaaaaggaagaaagaaaacggaatgaatttaagaactgtgtgcatgccattgttcaaatagaaattcctaagggttactctgtttacaggaatataattaacagctaaagagattgggtccttttttttttgagagagaaggaaataaaaattctgttttaaagttgaacattttcataatttgattattctttacaatttttctataaaacctttactgcacaaaaaattagaaaaacaggccattagataagtttaaatttatctaatagttagatactgttgaattaattgagagtaattatttaattactgttaaaataacgtaaggcagtgtgtcatcaaatttggcatacctgttttttgtacagcccaggaaacaggaacggttttgacatttttaaacggttggggaaaaaaacccaaaagaatcatattttgtgacatgtgaaagttatatgaaattcaatttcagtgtccttaagtagagagagatgtggcggatggcatgcagccatgtgcatttgcttactagtgtctatggctacttttgcactgcaacagcaaagtccggtacagtccaggacagtggataccaaaatctgtgcacactcaaagtcccatatctggccctgcgtaacccacagatatgaaaagttggtcctccgcatatgcaggtttggcatcccgtgaacacagtatttttgatccacttttggttgtggatacagaacttgcccatatgaaggaatatattaaaaaaaaatccttctctaagtgaacccacacaattcaaatctatgttgtttaagggtcaactgtgcttgtgacagggactgtatgatctgcaaaacctaaaatatttactatctttagtaaatgtttacagaaaatgtttgttgaaccttaatccagggtattgtttataaattccttccttccttctttccttcctttcttcctttgcttcctttcttcctctctccctccctcccttcctctcttcctcccttcctctcttcctcccttcctctcttcctcccttcctctcttcctccatccctccatccctccatccctcccttctcccaccctttttttgtttcttttttttgtggggaagggtctaattgctctgaatacattaacaaatatactgtgcaagaatgggagtgatgattgtcttgctcctgatgttaaagcgggtgtgcttccagtattttaactttagatgtagtgctggatttggctgagttgaccatgttaagaaggtaaccattattcttaaactacatctcttaaaagcaggactgttggattttgttctataaagatgggcatatggattttctcatttgttatagaaaattttactgttttcctaattaaactttccattgtcctgaaagaaacttcatgtagctaggttgtatattctttaactgtactgctgatttgtgtacttgtctaactgtgctttcttccttacataggattctcaaagggacccttccctggaacatgctattcaaatggaatccttcttgctgaaggttatgaaacttgacatataattttaattttaaatccagccagcctttgcaaagcaaagaaatggctgggcaataatccttatatttctctgttagtgaaaagtctgggaaagctttcaacttcttgttgactgagagtgg

SEQ ID NO: 586121 - DNA, 4001 bp, Homo sapiens
caatttgttaaacacttttagcctaaagaaatctaaccaaattacaaagtttagacaaaaacagtctttatcacaagaaaatgacttaacgatacaaagtatctcaacaagtcagaagtatgctttggatttccagactcagatctaggtactcccagcactggtgctgctgctgcctctcttttttactttactttttttctttaaacccatttctgcaggatgctgcctctttctactctaattcttcccagaggagtttcatactacaaacgacaaagacattgtctaaagcattacagaaattccttcagtcttgcctctgacttatcacctaaatttgtatcgttaggatgaaaggattatccgctataccttaatcatgacgctatgacaacaaaaagttatggtggatccaaggttccaattcagctggtcccacacagtaaaaccaatgcacacttcccgtctctttgttgctgttctgataaagcaattaaaaaccattcacaacaatttaaaaaaaacattaatccctgtgcccatactgtgtctacgaaattgaagctgtaagccctttttatatgatccacacttctgtcttttccaatacttgccctgtttttctgtgctgattcagctttaagagagaaagaaagacaagctttgagagagacagacaactatggatagacaatgtacgggtaatacagggctatcatccacctaggcagttacttcttggtattctgagacctcctcaaaactgtctgaaagaagctgacgcctaagaccgaaaaccccacaaagatcgtctttcccaaaagtagcagcatttcttcctatcactttcagattataataaagcaatcaataagacattcattctcttcatacacagcctaataatcctggtgaccaactatacccagcagggaggacaaagctcttaacacgaaagagtgaggagaatctctccattacccttttacatattcagggaagagagaatatcgcagtcgctggaaatgaagggcacagcatcgtgttgctgtatggccacggttggccacagaaaggcagaaagtcatcaactgtatggaaaccagacaactctgacgatttctatgcaaggtgactacaccttactcgttctccaagtattaaagatcttttcatccttattgctgtgtgaactcccgtgagcggtaaggtttttctatactatcgaggtctcttccccgataggctggaaaatcacacccgggagcgtgttggggccgcgggacgtactattaggtgtctctcctcccgctgcctattccaagtagtaggggagagcgctacctccatgttattcagagcgaagtacggccgtgcctcctggagtctccgctcccagcacgaggggccggctggggggcatctctgagagagtgggtttaaggggacaaggggtatctccggtcctgcgatcagaaaggagggcgtggagggtggtgccgccgtgccgagaggatctgcagttcccctcccctcccttcctctcctagagaggcagcccggccccagtaccttcttgactgtgcgcggcgcctcggtgacggtgccgtcggggctgaccagggcctcgccgccgtcgcggtgccgctggtgctggtgatgtgggtcgctccgcttcatggccgacgcctgaggcaccttcccggcggcggggctgagagcggcggcgggccccgagcccgggccggggaccgggggccgctccgcggcgggagctggagcctcagggtctccaccgcccgccgggggggccatggcgcccacggcggccgtgctcagtcctagttgcgactccgcctcggaggggctcaggtccttcagctccacctcaggcaccttggcggcagccgcggctgacacaacctgcaccgacatcaccgcctccgctgcaaccaccggctcagactccagctcctgctcttggtcggccccgcctcccacctcccttcctcttccctcccccatgtccccactcctcccctccatcgcctcctctcccaccccctttctccgcccgccagtcccggcccctccagccccgccccgccccgtcccggtctggcctcgcgcgaggcgccacggaacctgtagtgcgtttgctcccggccgcacgcggcgagaagaccgtgggacctcaggccccgacctacactgcgcgccccatgggcggggcccgcagcgtcccctgggagttgtagtcctttcagcctttcctccactaagtgagattcagccgaggagagggagcgctagggccggcagctaacagaaaggagtgaggataggtgactcgacggaggggatgaggaagagaaagtctccagaggagttgtgacttccggggagggaacgccaagaagccttaggggaggggaagtggtagaggaatggctcgttgtcctgacagcgtgaagttcctccgcgcgtgcccgtctgcgatcacgtgagcgagtatttaaaggagaagcggcggctccaggctggaagtggctttatttttctttgtgatattgagaactcaacacccttccaaacttcagtggctttgtttttagaagggataaagtaggaccttgcttgctgtggcgctttctgtcacattctgggtttggaagctaagatcattcctcaaagaagttaggtatcactagatcaaaattcaaggctgaggaattacacgttgccttaaacgaggccaaatcttttcacctataattctaatagggcaatcatctgaaattcagatacatatatcagcatagagggatatgaatagtgaatatgagtagttaatttcctaagtgatgggatttaaggtgatttttactttgtacttttctgtattatttttaaattttacatttagaggatgtaagcaaaaagacatgcaccgcagcgtcctttttaataacaaaaaactgtctaaaactaatgtccaacaaatagagcaattgttacagcctttgaaaatcgtttgccagctgggcatagtggttgacgtctgtaatcccagcactttgggaggccaaggccggcagatcacttgagatcaggacttcaagaccagcctggccaacatggtgaaaccccatctctactaaaaatacaaaaattagccaggcgtggtggcgggcacctgaaatcccagctacttgggaggctgaggcaggaggatcgcttgaacctgggaggcagaggctgcagtgagccaagatcatgccacggcactccagcctggacaacggagtgagatgccgtcccagaaaaaaaggaagaaagaaagaaaattgtttgccaatactttttaacaacaaggttttccctttttcattctttactctgaaagccaaaatgtgaagaggaagctaagaaactcttgtgtctggtacacttgtgagctctgtggaaatggcagtgctcagacgccttccgatacatagtgtgaggcacaaatttggcgatcaggaaatgagagactccaaggcaggacaacttcacgaagtgaagatttccaaaatcgtaatagcacaggaaagaagatcaaggcattctggctttcagaataaatgcttatgataaaaacattaagctaagaagcaagagacaaaattgcacatgccataagattttatgtaaagaatactttaaaaagcctgtaatcccagcactttgggaggccgaggcaggcagatcacgaggtgaggagatcgagaccatcctgactaacacggtgaaaccccgtctctactaaaaatacaaaaataagccgggcgtggtggcgggcgcctgtagtcccagctactcgggaggctgaggcaggagaatggcgtgaacccaggaggcagagcttgcagtgagcagagatcgccccactgcactccagcctgggcgacggagcaagactccgtctcgtaaaaaaaaaaaaaaaaaaaagaata

SEQ ID NO: 586122 - DNA, 4001 bp, Homo sapiens
ggtctgacaagtgactctacctttaatgataaaaagatggttccttgatgggcagaacatacagtacaccagaatgaaagcaggaactgacggctccacttcctgcagttagaggtaactaatgagtcacttgagtattgcgacaagggaccaatgccaaattgaaatagcttcacattgccttttagggggattcatagcattttcatagctataacaacaaataaagcctacagagtgctttagggcttgcaaattgttttcagcaataggaaaactcatcggataagaagttcttcatgaactaaaaaaaatgacaaagatgattattttgctcaactagcaatttattccaaaaagataaagtgccctttctatgtactcccataggacgtacatgaactttcatgtattgcatttctcctagcacagcacttaccacaatgaatgtaactatctgtctacttaccggtattctctataaactataggctcataaagggagaagctgtgattcttattcacccttatatctgcaggcacaaatcctaggcactcaatcaagtgctgaatcaatatatctgaagtagcctattctatcttcactgtctatacttgtttgaatactcactaaatatggcaaacataaaccaagtctaaagttaaaatgatttttaagggcaaaaagagctgggaagaagagggaaggtggaaagctggggaggtggacagcagtcaggatgcaaactctggcttccgtttcaccaaccttgttcaaaacagtcacatgtctttattcttttttagaagcccatccaggaaaaggaataataatggaacttttccagtgtcccctttaaagaagaatagataaaccgtgtttcagatgctcaacacaaccccaacacaaccacacacctgcgtacatgtacatgtgggtgcatatgcacacacaccatgtacacacaccactagagggggccagtcactcttatactctagattgtaggctcaaggtgaataaaccatatagctatctagctgcattatcatctcaaaccagtttatctgagctgagctgtcttctctatagtgttttctatttacagcaatccctccttcctgggacaagttcatgctatcttttaatactaaagaagactaggttgtacaaggctttctccacttagaacatagggttctaaaaccttgcttactggttagacaccgaattcaagtttctttaagacagaaaaatattagagtgagattaaccacttaaatataagttatgcaattttccgcaagaaacgagtatctttctctgacgaccagaacatgagttaagtggctccctggtgtttacctcctcttaataattaaacaccaatatacagtccattttgtaatggattggttttgtaatctgcccaccccaattgtggtaccttagtagattctacccctaactttcctaccttgtctggaaccagggtcttttaaggtaatcctccttttccatttgagagagaactgcctaattccaacaggcattaaggcaagggagggaaagagactgttaaaagaggggtagctcaccttatgccagagggagggatgaaagcaggaaaggaggggaaaaagagtataagcagtcggccttttacaataatggctatagcagcggcaagactggtaaataagagcttagcctcacctgggccttaatcccagagttgccattaacaatgtatttcttcttgctgcccagcatagtgacattaccagccccactgccacctctgtggtccagggacccttgtgatcaggcctttaaactttcctcatcagcaattctgttggctctggttccagccagctttttgggctggggagtgggggactactcttccttggaatccctgaagcagctccaacaaccccttcagcagtacagccccaatttaataaggcatttctgttagtggctcaacagccattcctaattctagtggctgttttgcttttacttgtttttttcctaaacacctaattacatggatcctctgacctctaaaccttgcaagtcccttgacaaggcccaacttgcatgcgcataacaatagcttatttatataaccactgcacttttttgctcgctataattaacttgctaattaggttccttttcaaccttacctcctccttttccatgtcagatgattttagttaacctagtctcattagaaaaaaattaaccacagagccacttaaacaatgagagacttcattaaaggagtaagaaaaaaaaattaatggtgccaagtactcaggcaggccctaccctacactctgtgtccttggattagccagactggggacactgatttcagctctgtcaccaaggaaatcaattttctcagttcactgctttcctctgaattgtgcatcttttatacaggttttgacatttggtttctagtcccagctcaagattgttgctgatttggcacagagtgacccagtttgcttttttcacaaaatgtgtgttcatggaagggacgactacaaagggaagtttcttatctcctcagagtcccccgaatcacaacaatcttactacgtgccaaatattcaagcaaaagggcaaagaatcacattatttatttgctgatttctgaaagagacatagtgaggaagaaagctacactcaactgtctgctacagagattggggggaaagtgatgtcaattcttccttaattaaaaaaaaaaaaaagactgcttgttgagcacaagaaaggacataaaatggcagattttttttttttttttttgagatggagttttgctctttttgcccaggctggagtgcaatgatgcgatctcggctcactgcaacctccaccctccgggttcaagtgattgtcctacctcagactcccaagtagctgggattacaggcatgtgccaccacgcgggctaattttttgtatttttagtaaacatggggtttcaccattttggtcagctggtcttgaactccagacctcaagtgatccacctgcctcggcctcccaaagtgctaggattacaggcatgagccactgtacccagccggcagatttttttttttttttaaggataatctttatttagagagagaaggtcacattgcatactgcttattgacatctctggaagagaaaagtttggtaagtgcctattttcacagttctgtgtatatgttacttctattaatttgtacaagaatcttaagaattaggcagtattattctcacttgacaaagcaggaaagtttaactctaagagaacaaatgatttgtccaaggtctcacagcaagtaagtgatgggactggaatttgagcctgtgtttatgctagagccaaagctccatctactataccatgcctcataatattaatcagaagaccaaaggtcctagtcctaggtgtactagcctcaaatcattccttttatctttaaatttatttaatttaaaattactctttaaattcattttcgtatcagattacatcttagaaatgacatcatcccggataatcttggggccctgatcaagtcacaattctaaaacacctaattatataagaattagaactctaacagctctttaaggcaactttgcccaatgtcactaccagaaatggaaacagaaattaattgaactcaaatatgaatattcaccatcacccacagcaattctgatctcttactcataatttcacaaagtgagacagatcatttgcttgcttgatgaatctctcaacttttgctcctcctaacaagaatgttcaccccagtccgcatgtactaagctggttcccctttccctcactcaggtaaaaaggagctccttggtccaatgacttaagtcagataacttgagccagaaggactggcatatctataccaaatagaaccagaagacattttaggagacaggaaaagccttacca

SEQ ID NO: 586123 - DNA, 4001 bp, Homo sapiens
gttggcacactaatgttcagtagaattcttctgtaatattcctttatagaaataccaaagtttgataccttaacgtggcccttcccttaagaaaaccaaatttctttttccctcttcttgttattagtgagtagcaagaaattcaaaaaaactcaacccaatcagaagtattacataaatccttccattaattctaaaacactatgttacttggaataagcttgtagatggataggttttctttccacaaaatgttttaaaattgaacacaagactgagcgtggtggctcacacctgtaatcccagcactgtgggaggccgagttgggtggatcacctacggtcaggagttcaagaccagcctggccaacatggtgaaaccccatctccaccaaaaatacaaaaattacccggtatggtggtgcacacctgtaatcccagctacttgggaggctgagacaggagaatcacttgaacccaggaagcggaggttgcagtgagctgagatcacgccactgcactccagcctggacaacagagccagactccatttcaaaaaaaaaaaaaaaaaaaacctgaacacaatgttctgaaacgacattaagaagaacagcaataacctcccccaaaacaataaaaaatagttgtaacaatgagttgaaatgtaagttcctcagggggcctttgttaggcctactatatattctatctcattatcaatagttatttcttcaaatccataattctataaacactaaaaagaacttgaaatatgttttagagagtctaactagttttccatagtggggaaacacaaatctgtaaacataaacctgtgtgggctgtaagaaatcaggctaaatctagaagaaactatttagaaacataaggatggttattgtctttaaaagttgaaattcgatccaatataataggtttatatgctagttcttatcaacaaataagtccttattatcattttagtaaaactactgatcaggcaaacatggtattctgaagaactgtaccaagagagctgcagttcctgccatagagaaatatatatataaaggatagctgggggggaaatagggaaatgttgtgactgaagggaaaaatacgggcagggaggggagaaatgtttgcaatctttgcagacttcagagagcaccatttctgtaagttctgtttttgttttttctcctcattgttctttttctttacccccagagaaacaaatgaagcatcaggttgaaaacagaagtgcaaaacagtcacaggaaacacaacccatacatcacaccagcagccggaggaaagcccctgcccaccagagatgaccaggcaacaagccctggccaggcaactctcacacctttcccagcttcgtggataattaagaaacagtggtgacctagtacctaggaactaatcagaacgtagagtaataactgtttttccaaccacggatcttggtaggagcttctcagaggtgatccttgtcacccgtcagaaatggttgcctctcattatcaagaaacagaaggagaaacaaaacgaccagtgaactcaccatccactcaggcatgtgaaaagctgaggtgccctcattaccgtcccacttctccatagtgcaggcttgggtaagatatgtcctgaagcaaaagggaaagctggtttggaaatactggggttatctgagtgccccaaagcagacccaaccctagtgagattcagaagttcacagtggctagcagaagctgcatcccttttcacagcagcctccgattcaaatcaagagcattagtcaactgcctgacaaccccttactggccggcttcaaagccttctgtgtctgatttcaaaatcagagctgatgcaaagtgctgcacccaggcactgtgcttctcacagggcactcactgttttaatgctacccaaacactctacccgcacctccccagtggggactttctgcagcaatagttggacttccttctttccctgtgtgtgaggcacttgtgaattctctcccacccttcaggacacgtcactggaggtgcggataccaagatcaataaagactgaggtcaggaaggcactcccatttctcaagagttgcttgatttggatcagtaaacaggcgtttccttgaaatcaagagctcctagggctttcaagtttaaacagctatgcagaagctccccatctgctcacaccaggggtctggcaccaaactctcgcatatctcaagttagagtcttattgcatgggaggttcggatggagcctaggaagatctttttcaaaatcagaatttcttagcagctctaagaaagttctgggacgacagctccctctgctggctccctgtgctacatacacgaaggcctcagggcccgcagctacagacacacaggtgctgattgcaaagtgacttcactgaggctagtcagaagccaccacagtgtaggtttagaggacagccagggtttccaaccaagactagtgctgcctcaaagtccctaaccaatgctggattttacacacagatctggtttcaggaagaaacaggatgccagtgcagtagccctgtacactatcaccttaaaggacctccgaagttgtttctgctttatctctccataccaactccctccttgctgcacacttcagaattttggaaataagacataactagaaaaaaggtaagctagcctatctcacctgcttagttcattcctagagtatattatccaataagagtaccacaggtttcaggcacaaaggaagcctaacaagatatgcctgctttggtccctttaaggaccaggactctttacagtgttaattcccattgaagaggatagtttctctacagctaacagtgacaatattataattatgattataggctctgtgaaaggaaaacatcttgggcccccaaaatcactaagccaaagggaaaagtcaagctggaactgcttagggcaaacctgcctccgattctattcaaaatcacccctctgctcactgagataaatgcacatctgattgcctactttgaagaggccaatcaaaaactcaaaagaatgcaaccatttgtctcttatctacccatgacctggaagccccctccctgcttccagatgtctcgcctttccaaactgaaccagtgttcatcatacatatgttgattgatgtctcatgtccccttaaaatgtataaaaccaaactgtgttctgaccaccttgggcacatgtcatcaggacctcctgaggctgtgtcatgagtgcacatcctcaatcttggcaaaataaactttctataaacttttttttttttttttgagacagagttttgctcttgttgcccaggctggagtgcaatggcgtgatctcggctcaccgcaacctctgcctcccaggttcaagcaattctcctgcctcagcctcccgagtagctgggattacaggcatgcaccaccacgcccggctaactttgtatttttagtagacagggtttcgccatgttgaggctggtctcaaactcctgacctcaggtgatccacctgcctcagcctcccaaagtgctgggactacaggcatgagccagcacgcctggccaaccttggcaaaatactttctaaattaaccgagacctgtctcagatgtttggggttcacagttcatcaccctgtaaggccttcattacttaagagaatggtcctttggatttggaatggaggagaggaaggtaatatctatggaagaggtactgtaagatgccagagagggcagaattcaaatgaatggccagaggtttgactggagagaaaggcaggtgaaaacagggactgttgaaccaggtgcattcagacgtatcaagggatcacagggagggtggagagcaggcgaaataagaacagcagaggtagaagtaaaggaagctgtggtcatagaggagctatggagttgaggcgacttgagtgatgtcaggacac

SEQ ID NO: 586124 - DNA, 4001 bp, Homo sapiens
ggtagaaaactgctggtttgacaatattcccttaagacacactgtaccataaaacttccaaattttcatcagtctatttatagattattatcctctgttaatgccaattcataagtatacttctgaagaactatgataactgaaattctgaaaggaaactaaaattttagaatgaaactttaaaccaataactggttttaaatgtaaatcttaaagtgttatttttctggttcccattagtgatagttggagtctaagcaaaatgcacacttctgatttggtctgagaagacgtttaagagttcttaaaattgtttacgaaaacttgaaacacatgtaggtaaagtaactcagagatctagaaataaaaaaattggaataaacacatgaatacaaccacctcacaacaggaaatgttttgagcacggatagttttttctgacacacacaaaaaattggccatctcacacaaatattccaccaaaatcaaccgacaacgacaaaagcaagtttgtactcactcaactagaagaaaactttgaaggggaaaagaattagaggtagatgttaagaatgaaaacctctctcaaatgcagttctaaatcttttattttacagaccctaaagccaccccaaaagtgataagcaagcttccgaaaaagatgtctgaagaatacaaatcctccaccgtatcctgtccgttgcatccactcccacctgctaccacttctatccactttaccgatatggtcacgatgagcgctacaaaattgctgccaaataagtaaatatgagcgcaacacaaagccagttggtggggaccaaaaagtacctttagaggcactcagccccttcgtaaaagtcagcatgtgtttagctctttaaaacatctcgccttaccaaactctacgaagaatgagaattaagaccgtcctctaacctaacccatgcggatatgaaaagtggaaggagatttcaagacaggtttatactaactaatccattagcccaaggcagatcagagctgtcaacaaatcaggaccaaatcagaaagaacaaagttgcaaatgtgagagggtgtgtatgcactggtgcgggggaagaggatgggtgggaggacaatttttaaaatgcaatcattgaaaacgggagaatccaagtcctctgtctcccagccggcctccaaacctcgattccacgggcagtgccgggaatggacctaatcccaggatcgcagggatttgggggcggggtggggctgcctcccgcacccgcgtgcctgagcgcccagcccccgcgatgaggacgcgctcgggacactcacgttttctgcaccggcttccgccgcttgcgactggcgtaggtgatgttggcgctgctgctgttcatggtgcccagccgacggcggcggctactccccgggcactggcggccgggtccccggaacccggtgtaggctgggaccactgcggcggccggcgccgggttccgcgaagccgcgcccgctccacctgcgtcctctcgggacagtggcgtgggcgccgcgcctcaacgcctcggctcacgcaggcttccgcagcccgcgccagtacaggtgagctgcctgggcctggcgcagtgagggtgggcgaggggcggagacccgcgagcaaggcggcgcaggtgccgtctacaccggcggaggcggcgcggcaatgcccgcaggtgaggcggcccgggcggaggaggagcctgggccgtctatttagaatcctggcctgggtcgctcacggtggcgccgcgccccgtgaccgtcgccgcggccccttgggtgagggaggtgccgccgcgctgctcccgggacttcctaaatccagggtgcttcccgcctgcggagctcgggcgcgggccaccagtcccggctgctcccagcttccgttcggctacacggctgcccctgttctgagctggcggtccggggcacgctctcggaacagagcgtcgacgggactccccagccactgcctcccgccgccgcgcgcaccggctgaatagcaggagcacccccgacccctcaccggccccgccccgcccagatcccgcgtagccccgccccgtcctgcttgcccccgcccatctggattccattccgtcttccttgagggccccaccctcatcccggcacgtgatgacgtaggacgtaaggacgcccccccccgccggtagccatcttcgtgcataggcaaacttattgtagctagactgtacaaagtatatcaagatatgccaaatattgagcttaacttcacctgtttgagagacggtgggtcagctaacttgtggctaagaattacaattaactggtagacaactggtagacaaccaatgggactgtatattttcctagttgggaaggcttcagaaggccagatttgagttgagacttgaaggctaggagtttccttgaccttttttggtgtgcgggggaagtctttacaatagacaggaatatagataataaggggactattatgtattgtgtcatggaggaccatgtggaaaaatattgggagtaattaacaatattgaatactgttgagaaattcaaattagttgagaactgaaaatgtcattcttgttttctcaatgtgtagtcactgatgactttcgtgaatgcagtgttggggtaatgggcctgcaaataacattgaagtgggtacaggattgagctgaagataacaaaatggcatcctcaagcaggcaatttttcttccaagtttagctgtggatgagagacacatcagattgtatgtagggggagtgaagggttaaatgagggttttctagttttggtttagttctttaatgggcgatactgagcggcttagagggggtagagataaactatgtagggaacctgagggaagagtgaaggaatgatagatattaagataccgaaagcaggagggaatgagtgccaaagcataaatgggagattaggactaatagattagatactaacagaaacagcacttacagtgctttgctattcagagtactccacagcttcttttgagagttacaggaaatgcagactctttgggtgtccttattaaatcagaacccgaagttcacaggaactcccaggtgattcaaatgtacataaagttggaggagcagttctctaccatagctggaggaaagaaggacagtgggtgagatatagtaggctactaaattttggatcagaaaaatgaaggagatgtaacaaagagggtattctagcatgagctacaaaagaacaattgtgttttgtggtcgatgatctttgttttaattttagaagagcataaagtgaaagtgatctgggaagtgacaacaaggaagtagatggacatccaccctgtatcctgtgataagagaaaataattaggcagtattggggagacctttaggaaagtgatagcctcagtaagccacctttcagtttaaggaaaaagatggagcaaattcccaaagaagacagtgtacactgggaaagtttgatgtttatgaattagcaattgcagaggcagaatcaaccatctctatttttcccttctctttcatttcttcatttatctgtgcttacttatagccattctatctaaaacgtgtaagtgtaaaagaataatttcctcctagctaggaactttaagggtgaaaaatttatatcaaaacataatttattgattctgtagcttataactcctcttcataaaagagatgtactaaatgcaatgaaccaatcttaatttagtgatttaaaaaaatcctaccctttttaaggttgttggctatttggtgcagtcattttctaccttattttgactttcatacccttatttttttatggttaagtttaggattattttcattatccagaagtcatatgctatattatgttacatagtcttagttaagtaacagatctttgcataattaagattaaaattgaatatcaacaaaattcccagaattcat

SEQ ID NO: 586125 - DNA, 4001 bp, Homo sapiens
ctttggaaaacaatttaatagagtggaaagccaggcgggccgctgagccagcagtcccattcattagtacataccccatgcctgctcctctgtataagagtattcactgcaggactgttcatagcaagttaaaatggaaaacaatccagtgtccctgagcaagcaggatggataagtatatggtggagagtcatgcaatagaacggtatagtacagagatgatgaatacttctgatattacaataaaatgactcctaaaataatatctacgaaaaagaagccagggctgggacccagtggctcatgtttgtaatcccagcactttgggaggctggggttagaggatcgcctgtggccaggagattgagaccaccttgggtctccataaccaccttttatgtagagatgtggtaagacctcatctctacattaaaaaaaaaaaaacacccagacacatcagactatacgctgtatgcttacctatatgaagactattgtttaggggccgggcacggtggctcacacctgtaatcccaacactttgggaggtcgaggcgggtggatctcttgaggtcaggagttcgagatcagcctggccaacatggtgaaaccccgtctctaccaaaaatagaaaaattagccgggtccagtggacagcgcctgtaatctcagctactcaggaggctgaggcagagaattgcttcaacctgggaggcagaggttgcagtgagctaaaatcacaccactgcactccagcctgggtgatagagtgagactccatctgaaaaaaacaaaaaaaaaaacaaaaaaccagactatattgtttagggataaatagttgacaaaataatagagacaagcaagacataattaccataaaaatcaggacctggggttgggggtggagagggaaggtttaagtggaaagaatggagtggtgacaatgtgtgtcaacctgggccatggtgaccctggggttcgctttgtaattcctcaaaatgagcatttatgtgctattcacttttcagagggtagaatctctgaaccaaaatgtttaagcaaccatatattaaaaaaagaaaaaatatggacagatttgtattttaattaaaacatttaaaaaatagagacaagggtctcgctatgttgctgagagtggtctcaaactcttgggattcaattgatcctcccgcctcagtctcccaaagcgctgagactccaggcgtgaaccaccgcgcccgacctggaaagatacatacatatatatatatatatattttttttttttttttttttttttttgagatagagtttagctcttgttgcccaggctcgagtgcaatggctcgatctcagctcactgcaaactccgcctccagggttcaaacgattctcctgcctcagcctcccgagtagctgggattacaggcgcctcaccacacccggccaatttctgtatttttagtagagacgaggttttaccatgttggccaggctagtctcgaactcctgacctcaggtgatccgcccgcctcggcctcccaaagtgctgggattacaggcgtgagccacggcgcccggcctggataaatcttttaaaacataaaagtctgagtgagtccctggccggccggcacagatgccggggtggggccgtgaaccggttgggacgcgctcgctccggcctggggggacccgggccagcagccggtcgccgcgcgtgcgcactgggcggggggccccgcgctcctacctgcacgtggccagcgcccggcgctgggccgtagctcctgccgtgcacgttggggagccggtacatgcaggtgggaagctccacacggagaggcgcgccgcccccgtgatagggctttacctggtacatcggcatggcagaaccaaagcaaaagggggtagcgcgtgccaaaggccaacgctcagaaaccgtcagaggtcacgacggagaccggccacctcccttctgaccctgctgcgggcgttcgggaaaacgcagtccggtgtgctctgattggcccaggctctttgacgtcacgaagtcgacctttgacagagccaataggcgaaaaggagagacgggaagtatttttgccgccccgcccggaaagggtggagcacaacgtcgaaagcagccaatgggagttcaggaggcggagcgcctgtgggagccctggagggaactttcccagtccccgaggcggatcgggtgttgcatccatggagcgagctgagagctcgaggtgagcggggctcgcagtcttccggtgtcccctctcgcgcgccctctttgagacccacggcattccaacctccctggaaatggggggaacatggccgaggcgcgtggcgaggcagccccctggaggccccggagtggcgacctcagtgttgcagcgatctcgtgccccttgggtgcgccttgaggccgaggcaagctccttcggggtcctgggctgcgggcaaaggattcggccctgtgaggagttgggttcggcctgtcccagacaggccttgcccacatcccatcacagggccgtggacttgaagcgggagcgtgaaatccccatagactgaatgcatttcctttctacctgttctctctccccttttatttttatttttatagtattttatttttaatttttttttgtagagacggggatttcgctgcgttgcccaggctggtctcgaacgcctgagctcaagcaatccgcccgccttggcccctcaaagtgctggaattaaaggcatgatgcaccgtgcctggcctttttaaaaaattaaggttattttggggacggtagagcgtccagacacatccttatttgcatagctgcgcagtttttaaaaatgcaatacgtttctacctgttaggatgtgtgatttctggctggtaagctacaccgaatcttggctagcacatttgcattccatgtcagatttgtaaacgcaaatttgctctctgcatttaaatatattagatatatttaggtaactacatttaaatgtattgagacatttaaataaatttggggtctgtgtctaaatgcgctccctcctcaaaataaatatctgaagtgggccgagagcggtgactcacgcctataatcccagcactttgggaggccaaggcgggtggatcatgaagtcaggagttcatgaccagcctggccaacatggtgaaatccgtttctactaaaaatacaaaaattaactgggcatgatggcgggagcctgtaatcctagctactttggaggctgaggcaggagaatcgctggaacccaggaggcggaggttgcagtgagctgagatcgtgccactgcagtccggcctgggcaacgcagcaagactcggtctcaaaaaaaaaaaaaaaaaaaaatcagaagtggacctgtagcctatagtgtgctgccaaataaacttatttttagagatacttctttccattttctgtgaggtcatctgcagtttcacatggtagacagacttaggtgagattcttagcaaggtggaatgaagagtaaagaggtttgtttatttcagaagggtttattaaaggcctacgatgtgttaaatgctgtaggaaatacccagtgatttctctttcatggaggtttcctgccttctcttaacaagttatcaattaaactgtttgctggaaattgctaagttaatgaacacacgggatacattctttgagcagacattgtttgggcagaggaggaagaggagagcggtttagacagagacctgcttatacactgtagtgtctcaaagagcttgtgatgttcaggacagttgttcactgtgctacaatataggggatggctggttgcggtcccctgtaatcctagcactttgggaggccgaggcaggcggatcacctgaggtcaggagttcgagaccagcctggccaacatggtgaaaccctatctcttctaaaaacacaaaaattagctgggtgtgatggtgggcgcctgtaatc

SEQ ID NO: 586126 - DNA, 4001 bp, Homo sapiens
atcttactggaaaaagggctaaattctaaaagaagataatcttttacaacaaaaattcaccttaaacaggtttttaccccatacatagaattctgaaagataaagaaacacacaaagaaactagaattgtattttgccacatcaactacaactgcaagcaatttaaataaatcctctattatgaaatgtgtatgtccaaagtaaaccatgttttgtaggactgcttcacatatattcaggaaagacatttctgggggcaggcaataaaaattgtgaggtaacagacaagtaagacatctaatcagatcttcaatgcttttggaggggcacacacttcacctccactacttccgtagatgcatagagcttgctcagcccctcagattgcacaagtgtaggctttggacttctaaagataccctgattcccctttcccaccatttatagattcgaaagtaaaaatttacctggctatatacaagcatttaaaccttgatcttaaatagagggagcttataggaaagtcaactatattttagaaatatgaagctagtttttatatatatattcatttaacaaacttgtgttgagcttctatcactgcatctctgcggtatggcccttcattgataataaatcactaacctggtttcctttgtttatgtgaggagaagagaaaggaagagaggaaaaacagttacctgtaatacaatttttgtccaagtatgactgctaacaattatctctaaaaataatataatccataaaagaagacttcattgaagggaggaagggggcttttgagcccagacaaaatatatgctcaaatatgtaatttttaaaagaaatatgctacgcagcttatattctgtatatgttaaatttctcatgaagcccaatgaacgatgcctgtgtataattgtgtattgtattgtttgctttacaggcttttccataaccgttcacacacacacacacacacacacacacacaaccaggattcgccagagagatatataacaactaaattatttaaagcaggaattctataggtgttggcatatggaacctttcggtcctcagaagttccattcacagactgcattaacattccataggacacaaaagcgcatgccatgacaaagaccttcaagtacaaacatacaaagacacgcttctaaaaacgcccctaaagccaagttcacagctggcacttgtggcacacacaagccactgctgagacagctgtcacaggccaatcacacacacccaagagtgccagcgtgctacctaaggaagacaagctgatgatcagcgcacaaatccccaacccaataaagaaaagccctaaatccccaccctggaaagcacaatgcctgcaccacccagaaaactccttaaaaaaatgaaagatcggaggtttagaagcaactaaacactagtttacagcaatacagtaaaaggggagttttatttggacattcacgagaaaggagccacaatattcaatcctcgcggaagtattatcagctagcacaaggctttgtcccccaactggaaaaaggggaaaggaggagggcgaggagagatgcagaccctaagaccctgcagcacctccctctcgggcagtgcactggggctgcggcgaactccgcttcccaggccccctcccaccccgtgctagccaccgcctcccaccgcaggcccggttgcctcgggctctcctaccttggctttgccggcctccagcttcttctgtctctcctcgtcctccatggcctctgcaaggaaggcaggggaaaacaggggttgaggggtggttggggatagaaaggaaaggtcgatttggacggaggtgggacggcaagctccacggcctagagagccgattcggtccggcgctcccccgcccgaagtggaagcagtctccgcgctcactggcggatcgtcctcagccgcacgggaagcgccgtcaccgccgccgccgccgccatcttcgtctccacgtaaacacacggcgaggcgggaggggctggaacgtctgtccgcgcagccgcctcgtgggcaggtgctcctggggtgccgccccggcccagccctccggggtcaacccttgccaggcctgggacctgcctcctaccagcgaggatcccgccgtagagagcgcccttcccgcacatcaacggctcacaggtggcggccgagctgaggggtaggagagacggagtgtgccagaggctcctggcctgacccccaccctccgtccgaggaatccactgctattaaaacatgagttttttttttccttcaggttacaaaactaacacacctaatggtgaaattggcgaacacctacaagctccaacggaaaagttccggtggggggtggtgggggggcggacgccaggttttctacctacattaactgcttgactcaagaattatgagagcagctaattgctcttattacttccttagcctgaaaagtccctccctcttccctccactggttcccactcaatctccggttcatccttatagtcccatcgcacacgctgcctccaaatggcttttctgacctcttgttccctccacggcaaccgagacacatccagtcaaaacttagtcccctcccccgactctttggggcttccctttaacagtagtgttctgaaaggagcctgagctttagaacctcggttagggacaatgccagactacactaactttctagcgttaatgacaagttacctatcctccctgagcctacctggaatttttggaagggttgttaatatatgtgactgccctgacatattaaaacgtcctgaataatgtcagctttatttctccttggacttcctttaagtaccctgcaccatattttaataatttgtgtgcgtcttagttcagctcatactcccagctccttgatgacagagactcatcataagtcttgctcatcttggctttactaaaatgaccagcacagagctctgcactcaataaacgctttttggattgaattgagcagtgtttataaatttaacattactatctttccttgtttccccgacatgtgctccctcagtcctttgtgttcgtctccctgccctccaatgctcacatccattcctggagtgaactacacattttaatgtctctggttgattactcagatttatcatgtttctccgttgctttgagctaggttggactgaaaaactagcagttgtgaacaaaaaataggctaaaatgagttcaagcgtagaagtggtgttaagtgaaaaattgaggttaaaaaacaaaaaaggagataataaagaccttaagtctaccacaaactgaagatgagttttaaatagccctcatttagaaatcttagctttaaaaaagatttttttcttaagctccgtaatgcatacattctgccaacttctaacagccaagtgcatattgtcctgttatctcaacctgaattaggaaccaggtaaaattagacattttatcatagggatgaaagaattgaggcaataagtgatttacttagtcacccatcaaattaagagtaaggactagaactaagtgttctaatagtgcagtgatttaaatactgcctggattgagggattatgagtgtagatgctgattgcctaggagggggaagccccagggtatccaaagctattcctgtttgttaaaggatactgctttctcggtgactaaataagtcagctgtttgtaggtgctgagaatgttcaagaataccttccaaagcaacaagattatttcaatgtttccttcactgatagcagccaatcatatacatgtctagtttacataatgggtgctcaatcaatgttgaaagttagatttgtgttaacttctattagaagagcaagcattgggcactagtgttctgactcttccttatggcacctattctgtcataacttgtcataccaatcattaattcatgtcatgtcattcacttactcagg

SEQ ID NO: 586127 - DNA, 4001 bp, Homo sapiens
aaaaaaaaaaaataaacttttactccttatttaccctagagtagtgattttcaaatgatgggtcacaaaactagcttctggaggtatgacaataatttttggaaaaatggaatagaaaaaaatattgaaatgcagcctacataggttaagtactgttaagtaatttttattccagttacatgtatatatctgtgcgttgcatcatgcttagaaagtatttgctattgccaagaaagcatccttctgcatccattccaagagcataacatgcaacagatggaaattagcttggtgtcatggttgtaattcaattacaaccttagagacaccactggagtttttggaggaaacaaatcacgtaccctgatcattctggccaagaaacactctccctgatgcaaatgacctttttcttaccttatatttactaattttcaacagcaggttttagggtacatgtaaactcttctgtcctatttcaaacatctcacagttcactcagttctttctgttgttttcttcccttgtctgtgtgtaaatatccaacgcccaggcccatattcaaattttaagagaaaaacctgggacgtgggcctgccagatggttcacacctgtagctttgggaggcgaggtgggaggagcgctttgagcccaggaattggagatcaccctaagcaacaagcggagactgtctctgcggggaagaaaaaagattagccaggtgtggtggtgagcgcctgtagtcccagctacccgcagtgctgaggcaggaggatcacttgagcccaggagttccaggctgcaatgaaccatgattgtgccactgcaccccagcttgggcaacgagaccctgtcacaaacaaacaagcaaacaacaaaaacagaaactgagaaacccaggttatggctgtggaatataatatgcaatacttagaaggttaaaaattctaggttttgcctcagctcccataccaccacctttgttgctcaattttcagataatcaggctcaggctattatttttggtttttcatatcatattatcatttttcatatcctatgatgtttcatgtcctattgtcattctcatccggctaggcacttctcggggacgctgtgtggtgttgaggttttacagggaaaatgctaaccttggcgcctcctgaattatcaactagctacggggtgcccagatttttctcccgagttccagacccagggcaccccgaggcggcgcctggccgaggagctccgcactgcgccttgttaacagctgggtccgggcaaactcgcgccacctaattctctgccctctaccggcttgagatgcttattcctcagggagggcaagaatcgaaacgattgagaccaactatttacaagtgaggcaaccgggctacaggtgcctcgagggaaaggaggctgggtctgcgctcccacaccttgccgacggctccacgtccctgtctgcgcccgaggtccaccggtctgtgaagcccactttccccgcctccctctcgcgttgtgccgcttggggcgcccgctaggacccaaaatgcggactggtgggccgcccatcaagggttgcccgcggtagggcgggggctcccgtgagctgctcccaaaccccactcgcaggatgctgccctgacgcccagggccaacccggggagccaaggcccccggtctctgcaaggccgaccccagcccgctggggaccctgcaagcccgcgcgtggctcccagcacgccgggcgtccgcggggcgagctgctcagggtcactcggggtccctcgccaatacaggccgcgcggagagtgtgaggcgagccccgggcccgcgcccccacgagcacctaccttccaggtacccaaccccaggatgggcatcttggcgccgttgttgagcaggagacggcttgccatggctgctgcgctccccagacccccgcccagtacggtgcggccttggccgcggcgcgtacctttaaatagcccgtgaggtcggcagaaagggcgcctgcggttggcgcgccgctgcgcgaaggagccttctgattggttgcgctgggggtgccgcggcggccttccccaagggtcggcggggatgcttcttccgcctggtcctagtggcagcggattctttccgcccccaacgctcgcccgcgccccgcgtggcagaaaggagttcctcagctgctgtatctggtgggaaagcgaatgctttagcgaaaataacaggcatcccataaatacatagactagaaataagttttggtttcattaagagcccagaagaatgcctttgttgtccaaccccagtttgatgctctttgggaatctgacgaataccttgtccttaatctatgtgaatcatactgactacacatatagtttaccgcactttgttcttagacaaaggtgcatgccagaaaaatggcttgcaatccttttgcaaagcaccttcacaaaatatgggtttgcccagactttttgtagccttctagatctctctttgcaccccactctaggtgttagctgtgtctgtgcatactaggtgtggttcagcaagccttccaccaaaagccagcatcctttgatgttcttgaggttagaaagccttgatgggcttgatccagaactctcagaagaatttggaaagtaaggctgtccattcagaatcagtaagacaaatttcatcagtctttggaaagtgagactctatcaaagcagtaagttccagtacagtaacttatcaaaactctctagaggaagaaaagtgaacagacagaaaaccacagaagaaaaagttgactctaatattgtagcttccagtatttcaaattagaaggtacaaaatagtaaattgatcaccctaattggcaggtagaaacacacatttttccaagatagcctaagaaaagtcacttgaagatccttgaagacaattttggtttctttccaacaacctctcttcatgatactctacctcaccccaactgctctttctgctccatcaccctccgatctttcccctaattatgcaagattgggaactccatctgcctggtagtgactcaagcaccaggtctctctaaactccatgccggtgattttccatttggtgctttctttaaaagtgctccctcctggaaaaatttatacagaacagactagcccagatatttttccatgtaacttttgtaaaaattgttgctattgggcaaattcatttgtccccaagtaatagaatttgaacttgagcctaaagctgggaacttgctttgtgtaaaacagcaagttccttcctccatgagagtcctcttgacttggaggttgctctgccaattgaacctcctgggtccaaatccaaagagctaatctcttgtgaaaatgatacaccttgagtggccaggttggtacacacagaagggtcgtctgttagggacatggactcaatatcagaggctttgttgttggtttgataataattgagtatacagcttgattgcatgaagttataactgtgtctaaagctggagtgatacctgtagtctcagcttctcaggaggctgaggtgggatgactgcttgagcccaggagttagagaccagcctggacaacatagcaagaccctgtctgtaaaataaataaataaacccagaatattttggctgggccatgcagacatgaaaagttgtatcagtggaatttctatagcaacaatagcactctagttgggacatgctattgtgatagccccctaacatcccccattgcctctgtaatctttgtaaaatgtacacataccaaaatttttgatctcaagatttttgatctcccatcttttgataagtatacatatcaaaattttgtttgaaaaagggaaaaaaaccttcaatggaatcctcctgagaaacactctagtaattggaatcttaacatgctctgaaccagtaatctcccatcatgggaatttttcctaaggaaataatttaaaa

SEQ ID NO: 586128 - DNA, 4001 bp, Homo sapiens
aacgagctgctgccaggcacccagaagcagccctgtgcccccaaccgctacgctacacccttcttcacctccactgctaagttcataatcctttagtctatcatccccacgtgttgaagacagctcccttcataattctttcattcaattccaaaattatgaaactgtctggtaaactcacccagggtgagtagattccctggagatctggaagtgattatttattctgtttatacaggattgaaggtctgattttgggcaaatcttgctattcaagcaagagacgctctgcatgaatcaagctggaagtgatctgttcctccagatacaccaagaatgtatcctgaggatgacccagtgctgcagcagagggtcctaacctctagcttgggacagaagagaagaaaaatcagggtgcacagaaggaaagagagccagaggcagaagtctcagcagggacattagccatgagggacaggagagaagaggaactccaaagactgcttctcatcactagttagggtagtgctatcatggatggaaatggcaaagaaggcagagggaggtggtgatggaacaacttgaaacttagcctaacagaggctcgggaacctgcctcactgagtcctggatgtgccttaccacattttgccagctgtcgttaacacagccgggtggtgctcacgactcccagcccaggctctctgcagccccagcatgttgcagatttcaatgtgtacaggaaccacgtagggatcttgttaaagtgcagatgcccattaggtagcctgggttggagcctgagactctgcattttgtttctctctgtctctctttctttctctctctctctttctctctttcttgctttcttggatctcactctgttgcccagactggagtgcagtggcacaatcactgctcattgcagccttgacccctcaggctcaacactcaatctccacctcagcctcccaagtggctgggactacaggtgcgtgccaccatgcccagaaaatttatttattttttgtagaaatggattcttgccatgttgcccaggctggtctccaactcctgggctcaagcaaccctcccgtctggatttcccaaagtgctgggattacagggataagccaccacacctggccagtttgcatttctagcaagtttccaggtcatagggatgctgctagcccaagtctcacaccgtgatctgcaaaggggtgccaaggacttcgggctctgcatcctctcctcaaccacccagcccacaacaaacccacagccaagacttgggggaaacgttgagcccaattaagtgtcctagaaccagagagagaaactgccctggaaaacagttttaagtccaacagctgcttgaaatttgatacttgctagagaagctctcatcactgctgggaaagccagccttggagctttgcagcctgaatcagctctgagaaaagaaagcaacctaagtcctggctccagggctgaatcttacctctccaacccctgcccgacctccaggctttcctggctgaatgcagaaagagaaaacacccaaacgcccctccagagaagaagggtgtgcaaagatttgcatatttaccttccaagtgcccaggcccacaatgggcatcttggctttggtactgagctccacaaacgtggccatggttggtgcagaaatgattctgagtgagcaggtagaagtctcacgtcctgctctctgttgctgtttttgagacagtcttgcactgttgccaaggctagagtgcagtggtgcgatctcagctcactacaacctctgtctcctgggttcaagcaattctcctgcctcagcctcccgagtagctgggattacaggcgcccaccgtgactcccagctaatttttatattgttagtagagacaggctggtctcaaactcctgagctcaggtgatccgcccacctcggccttccaaagtgctgggattacaggtgtgagctactgtgcccggccacaggctgcttaagaaggctgctgctatctacagtgggaggagttggagcctggccacagtagcttccctgccataaccaaacaggaaatccattccaggcttttgtgagattgaggattctgtgaatgaattattaaacatggcaaccttgtgcaaagttctctcttaggtgacagtatcattggagtttctgcttgttcaggatgagtcaacaaattcaacacagccaaaagttggaaggtagggagggagacagcaaggaagaaaagaagagttggaggagggagggaaagaagtctggccaacatagtgaaaccctgcctctactaaaaatacaaaaattagccgggcgtgggggcacgtatctgcaatcccagctacttgggaggctgagaaaggagaatcacttgaacctgggaggcggaggttgcaatgagcctagatcatgccactgcactccagcctgggcgacagacagtgagaccctgtctcaaaaaaaagaaagaaagaagggaaggcaggaaggaagaaaggaaagaaggaaggaaggaaggaaggaaggaaggagggagggagggagggagggaggaaggaaagaaagaaggaaggagagaaagaaagcaaagcaaagaaggaagaaaaaacaagggcttgctttccctgtgatggtttcctctgtgaaatagagtctagggaggagaggtgagaagcagcgtttcaattttaaaagttgcaattgcaggttcagtgcagagatggtcaaatcccgacctgattggagtcagctgtaactagttggtagtcagcaatctagggaacatgatataggcctgtgccatgctgtgacacgccatgacaggccagggccacgtcacagcatctgtttcagcctgccggtagtgggtttttctgtcttttacatgttcttgttgatgagttggctttggttgaatcttgaaatggaattgaatctctaggctgtggcttatgacagctcatagaaggcaattggcatgatattttgcaactatgagtgaaaaatcttatacttcattgatgtttgttaaattatctacttcaacattaataataatgcatgggccgggcatggtgtctcacacctgtaatcccagcactttgggaggccgaggcaggtagatcacttgagcttaggggtttgagaccagcctggccaacatggtgaaaccctgtctctgctaaaaatccaaaaattagcgaggcatgatggcacgtacctatagtccccgctgcttgggaggcctgagaatcccttgaacctgggaggtggagaatgcagtgagccaagatggtgccactgcactatagcctgggcgacagagacagactctgtcccaaaaataaataattaaatacatgcattcctcataatctggtggccacaaagtctcctggatatgcacttgcggcactttattttcccagtgtatactggatgacatgcagtgctagtattgttgaaatagtaaatccttagtgactgtcaacctaaataacagagagagggtccctacaagaaaaatatttctctgggaatagagcactgcaatgggaatatgcatgccacagtaaactatgtgtatatttggggaaataaaggaagacaaaacttttcaaggaaaaaatgaggattatctaattgctttgaaataattagccttggctccaaagatcaatcatgaaagtggtgttagtctgaggttggacacgcagttgttcagaggtccttgcagagtatgttttgtgttcagttgcaatggcctttgctcaaggttgtggttttcaccgtctttcatggtacttttggttttcaggtgtacaaccattagaaccctcttttcatggtcttcccagctgtatttgtcagagtcttctgtttgttttttaacattagtgactccattttgattctgaccattttcatgtgatgcacagaataaagaaatgtgtat

SEQ ID NO: 586129 - DNA, 4001 bp, Homo sapiens
cgagggagctgagggtggaggcaaaagtgaggtctggctaaaaaggaccttggaggtaggatcacgaatggctacagagttttatcacgagtggagccatgaaggagagctctggactaaatctagccattgatcaatgtagggaaactgatcggggtgaccgggagttccaacaacgacccaccacacagcctgaacagctgtgaagtgtagtgacccgtctgggggccacccagttccaaactttggccattctacttcgcagagtgtccagagtttgccttttttaaggcggaccccgtaatcatctgagaagcctagagagaaattctgcaacatacactggagaggactccaatctttatggggccgggaagaagagtttactattctggaggcaattaacaaggtttgaacaaaaatattaaacccagcatggacaaagatattcacggcctgggaggctatggtatcagaagaacagaagtattatagctagaagaagtaggaaaacaactatagccaatatttcttgccacataaggtctgtctcctcaagcttcgagatctatggagaggataagaggtgggtccaagggatcctcagccagtgggacttaggtgacccccccttcttgacttatatcccaaataactttggtgtctccacgactcgaaagcaaaatgttcaaactcggtcctttccttcacgggtttaaggagggagaacacagccaagtcttagagacgctggacttgctgcaacacaggaaaatgagatgtgcagggtaagggatggggatgaggaggaaaggggccacttggatttccctaaaggttggagagtagccaaaagaggtaaaataagagtccagacagagtagagcagtatgggtgtaggtttctctgcacagtgccttatttaagggcatgggaaaagttatgggatgacagaaaaggtgagtaaggaggtcagcagggtggctattttggatccaccactggtctaaggagaaggtggaccagtcgttggggcgtggggtatggcaatccaaacgccagcaatctttatggtgccagaaatcctaaacgggtgaatgtcttccacacccttccccataacaacacctaatttgtttctgacaggaaaggcaggactgggatggccagcccaaccgactaatgaggaatttgacctcctgggatagaaaatctgtactaaggaccttgaagaagtccttgcccagtcattttgggcagtatcgacgatccgacatatgaaatttagacagacactaaacaggacaataggcactggggtatataaacaagcatggcaatttttatagacagacaaggggagggggtcccgtgatgggatcagtcagatgccctcctggctgctcccctttcggggacttaggctcctcttggcattggcaggctggtataaacccctggcttggatcgagctatgcctgatgccgccctaagccttatgaggtcaccacggaaccacaggtgagggccttctcgaattccctagctttcaccctggagctacaaactggaaattcaagcgcaagcccttgaactccacattcactcactcactcactcactcagagtttattacaatttttatacccattctaaaacagagatctcccggagacctgaatgagagagggagaagagatagagagagagagagactagacttaacagagaatcctgacagaaaccaggactctgtcctccagtgtcctggagcatggacagagtctgagggaggaccttcgtcagggccgtttccctcccagagagacagagtcagatctgacttaccttcccgggactagagactgaggactcaggagttgaatttggctgggcgcaccggcagtcgatccgttcccctccagaagacagtggcctgtggagccctggaacgtcttcaggtggccctgtaagccagctgtctgtctggggaagcccggaatgagtcaggtcttcacccggtggcgaatctctctggggcttccaaatgtcgtaaccgagcaagtcatagagagaatgccacactctgagactaattcaggagtcctttattgctggcgactgagaaagagctagagcttgaaattctctcggtccggaagaagaggctagagttctttttataccttggcctaaagaggggagggggagtctagctgaagcaattttttacagaagcagaacaggaaaaaattaaaagataaatggttacagaaacagttacaggaaaataaacagttccaggtgcaggggcttaaagtatcccaaagtgataaaagcaggggctttggataccaccaaccaagtgtgctcccaggagctgctggtacagcttgcctcagtatcttatcaataagcgcattcttggatgtgcttggagtcagcttgcaccagttatgtccttaaggagggggacaaggggctgcaagcgaagaaaccaagctaagactctctcagctattgactctctcgatattgactctcaattgagtctcccaagctattgactctctcagctaagaaagagtcaatcaggataaaacaagatagggtatcacaatttgatctgcaagattatttcctggacttgtgaaaggcgagtcgttttggtgccctgggacatgtacaatagctatctcttctggcaattggagattgttgaggacacgagcatcagttctctatgaactaaatcttggcctctactattgataagagccctctccatccaaattttcccaaatgtgtgtgcctccccagagggatacttagagtcagtatagatagattttcttggttttgtaaatgtcctaaagcttggctgagtgcaaacagttcacacccttggacagaccaattattagacccccttcctgattttacttttttaacagtctttccattaatcactgaatacctattatgtctctttcttttaatcacctgggaggttccatctatgaataagtgccaccctgtcttgaagggagtttttcctaagtctggttgaactttcgtatggtaattaattcgatttaaacacgcgtgctctctcgttttacgtttggatcccccgttaaagagcctgctgaataaagtgaattattagtacttaatattaaatcacctttttcccagaaagatagcctcatattttaaaatttttgagttggtaatctccctccttgcgttttgatttaatatagttttaacttggtgggttgtggcctgaagcggctggggagtaacttgaaacctcagctgaagggacagcacaggctggggcgtggcctgaaacagctggggagtaacctgaaaccacagccggagggacctgagaggggaaccaaaggggcaggattgggggcgctgaaggaaggaaggtgatttagaggatcccatgtcttggtaggtatgggttgtctaggcatgggaactctttcctttttagaaaggttggtttctgattttctccctccagagtctaaagggtaaaggagaactggtccctgccgccagcagagggcgtaatcgatttttcctgggacacagggctcttactgttaacatatttgattaacagctgacaaattcgctcttcattagacttaaattttggccagaaaagtgagggcttaaggatgggttctcgaacttaaataaaacaacaatattctatcatctgctgtttttgtttatacttggttctcttattattttttcaatactttagcataagccccaaggggctatcagaaggaaattcatcactctctagactctttagttttcctgtcttacttgaaacgttccccatcttagggattatggggaggaggcccaacccctcctgtgagatttctaccctcccccttcctggaggcttactgaggctttggggaaaggctccaacccaacctgtttggatttctaccctcccc

SEQ ID NO: 586130 - DNA, 4001 bp, Homo sapiens
ccaagttttaactactcttgctatgggtagtttatttctcctcatctgccttccattctccatgctacaacctgagttttatctttcaaaaacacagatctagtgatgctctttctttgcttctaaactttagatgatgtctcattactatagaacgaagttccaactcctggctgagcatagtgtctcacgcctataattccagcactttgggaggctgaggcgggcggatcgcttgaacccaggagttcaagaccaacctgggcaatatgatgaaaccccttctctacaaaaaatacaaaaattagctgggcatggtggcacctgcctgtggtcccagctactcaggaggttgagtcagaatgattgcttgagtctgggagtcagaggttgcagtgagccaagattgcatcattgcactccagcctgggtgacagagtaagaccctgccttaaacaaacaaacagagttccaactccttagcatggtgttcaaggtccttggtaatccctgtcttaatctgcattttcagattcagctgccatcaccattaactccctgtgccaggcactatgggcttggcattcactggatatatcatatatccttctctgtctaactaaaatgtctctatacttcgtattgccaaaatgtcctgctttagctgtgcttctctgtctggtacattcatgctcagcttcaaatagttcattcatacatgaccactcaaatttcagtagcatttctacacatgtcactatttattctcgtaatcagcatttaatgttgaactgcaacaaggaacagatattctcataagctgaaactttactatgttttaaaggaagcccatttcaatcttcatggtcaaatttaattatttccatttctatgctgatatggtttggctgtgtcccctcccaaatcttatcttgaattgtagttcccattatccccacatgttgtgggagggaccgagggagaggtaattgaatcatggggaaggttacttccatgctgttctcaggatagtgagtgagttctcatgacatttgatggttttataaggggcttttcccctttggctcagcacttctccttgctgccatcttatgaagaaggacgtgttttctttcccttctgccatgattgtaagtttcttgaggcatcaccagccatgctgaactctgagtcaattaaacctctttcctttataaattacccagtctctagggtatgtctttaatagcagcatgagaatggaccaatacatatgctttcagagactgtttacagagagttctagaatagcattgatccttatcttggtcattctacaattagttgtcaagaatctgccccctctatttgatttttaatccctagataacagagacattgttttcctcatatatgacacttctatcgcctagtgcttagtgcatggcaagtattcactaggtgtttgttagactgaactaaaaattatctcatataaaaaaaacacaagtcataaacacacgaatttcatgtggctcagttcactctagtaatcagcatttagctaaatttcagtaaaggaagcagaaaattctccttctctaatccaaactaatttttaatcatgaattgatttagtttaacctttggctcaatacctattcagtaaatagtagtcctttcattattacaaattgaggttgcttccattactacaaaaagtaagtcaatgagatctgcttaaaataaattgcagattatgctataggcaaatgttaaaagaaacaaacaagcaagcaaagagagaaaaaataagcttaccgatttaggttctgagtaggtaccaagtccgatgatgggaatgctgtttccatcacttagaggtatgcggtgacttgcagcactgagatccattgtggagaacctgactgtaggagtgattctgaacaccacagggagtctttttagaaaggtgtcctagggcctattccatcaaagaaaggaaggccagagggaggagcagagggaagggagattaacacacctatttctcaacctgtttttttttccaggttgtcctggaaatcctaagcatggttgtcctttgaacttcatcagaggcttgtaaaacgtaacctattgagagtttatgcttacttcttcacaacaaaagattgaaaaaacaaaaagaaacaaatctgtctggcctctatcagttaggatgcttttgttggcaaataagagactgacatagtttggctgcgtcctcaaccaaatctcatcttgaattgtagctcccacaatccccaatgtcatgggagggactcagtgggaggtaattgaatcatgggggtgtttttttcccatgctgctcttgtgatagtgaataagtctcacaagatctgatggttttatgaaggacagttcccctgcacatgctctcttgcctcctgccatgtaagacatgcctttgctcctctttcaccttctgccatgattgtgaggcctccccagccatgtggaactgtgagcccattaaatctctttttctttgttaattacccagtcttggttgtctttattagcagtgtgagaatgaactaatacacacatctatcttaaattctcttaaactataatggaaatttattggttcatattcctcaaattctggcagtagggctagcttcaggggagactagacattttctaggacttcctgggagatttggatgcagcaggactggaaagggatctaggatctttatcacaagttaagcttatcaccagttaaactggactagaggaacaataacatggccaggaccaatttctcacttctcattcgtctctctgccttcctgttctctcaggaaactctctctctcagttcccttaacattgaaaagtgtttactgactgtccttggagtgacaaggtttccagctcaaacaacgaaaaagagattttactttctcagtagctcaaacagtagtcctgaaattgaaacttgttagccttgattgcctttcttggttcatggatccatcgtgaaatcaatcacagtggccaaaggaaataaaagacatttccttaaaaaaattagaagccatttccaaatttggagctgggggttgaaggaggcaggaaattccaccccaacatatggctccctggtataatgaagattttgaagtaaagacccttagagatcaacgggctctggaagagactttcccctgtctacataaagataggatggacccaccaaggaggacaattgttctttttcccctacctgttatctcatgatccattacaaaaaaagaagacaaagaatgtgttgggagtcagaaactgataccccaaaatatggcactttgacatactgaactggaaaagcctcaaggtccctctgacctctactccctaccacctctcccaaagtgaagttcctttatctgcctaagatccagacccaccaaaaggaacaattcgtttttcttcctctccctgtaagactaagaatgtaacctttcctgaacaaaccctttcacaaggtaatgtacaagttaatctctactccctgatccattcattctccctagtgatctcctcaacagaattcctcttttcccctctcccataacctgatttaccagtaaataagcttctaaaccctgttgtgggtgggtaatcactctgtggttctccctgtgtaaacatatagttaaataaaattgaataccttttctccaattaatctgccttttgtgagttgatttttcagtgaaacttcagaaggcaaagaggaagtttccctggcctgtacacttcacaggtcactgagtccacaatggttaaaatgtcctgaagttgaaactggccaaattgtcccatatttatggatttttgaataaacatagaaatgtgccctctgtcttaaaacttgaaacttatgtcttaactgagttttttcctcaggaaactgaccctcaggc

SEQ ID NO: 586131 - DNA, 4001 bp, Homo sapiens
atttgtcttctgtgactgcttccttaacttagcatcgtgtccccaaggttcgtccatgctgtaacatatgtcaaaatgtccttttttttttttttttttttgagacagggtctcactatgttgcccaagctggagtgcagtggcgtgatcacagctcactgcagccttgacctcccaggctcaagcaaccctcccacctcagcctcctgggtagctgggactacaggtacgtgtcaccatgtatggttaatttttttgtagaggtgggatttcaccatgttgcccatgctggtctcaaactcctgggctctggcaatctgcctgcctcggtctcccaaagtgctggaattacaggtgtgagccactgtgcccggcctgtccttcctttttaaggctgaatagtattctactatgtgtatgcaccacattttgtggatcaagtcatctctttttttttttttttttttttttttgagaaggagtcttgctctgtcacctgagctggagtgcagtggtgcgatcttggctcactgcaacctctgcctcctgggttcaagcgattctcctgcctcagcctcccgagtagctgggattacagatgtgcctcaccaagcccggcaagtttttgtaattttagtagaggcagggtttcgccatgttagccaggcaggtctcaaactcctgacctcaggtgatctgcccacctcagcctcccaaagtgctgggattacaggcgtgagccactgaacccggcccaggtatcttgatagatgcttggtttgcttccatctttgggctgtcatgaataatgtcgtgaatatgaacatgggtgtgcaaatatctcttccagaccctgcttttagttcctttggatatatacccagaagcaggattgcggatcatgggtaattctatgtttaattcatgaggcatgccatgctgtttccataggaccttgggcacttttaccatggacgttggggcagtcttcactggcttaccagcctccacaccttcatatctgcccgttcccttcccaggatctttctaaaattcacatttgacttcatcactcctttaaaacccttcaagagctctccagggcctttgggacaagtccagcctgctcagctgatgcaccggggagcatctgtgatcagacctccccccccccacaacctctccagcctcatctctctcacctgaggcatcaccaatccaccttcctaccccacgcagttttctgggttggaatgcccttgcaaccaaccacagtccttccatgccagcccaaaggcgctgagttctttttctttttttatttattttctttttgtgagacagagtctcgctctgtcgcccaggctgaagtgaggtggctcgatcatagctcactgcagcctccagctcctgggttgcagcgatccttgagttccttttcgttagttaactggaattcactgtctccttgcccattgcagtccacggccttcaggcaccgttggactggtattcagcaccctcgatcgaccctttccgtgtcatctccctgcaggcccgtgaagctcccagcgccagacccgagaggctacgtcgaggtttacaggcagatccccccagagtccccgaggtgacctgtaatcgaacccacccacgttccagctccttccccactcccaagcccgctccttaaagccctcatctcctcaccctgcatcacccctaccgtaagggtccctcacaggcttcgatcccggcccctatcatggccaagctggacctcagtttccccagatgcagagcgacgtttgtgggcgcggcccctctcccaccccttaccgctgggggcagctcccagggcgggtcactgccgcgctgccgctcgcagatcagacaggtccggatgcccttgcaaccgcattcccgaaggacttcgggggtctcggcggcagccgccgccatcgcgccgtccgcgtggccagtgcgcaggcgcggccgtgggggccgctgggagttgtagtccgcgccgggcgggggcacgaggcctgggttccgcttccttccggtcgttaacgcccacgggctcgcgcggcgccgcctcctgggctcagttaccgcggacgccagtgccgggctccaggagacgcagggcgacgccacacgccggggtggccgactgggtcagcgcgggctgcgcctcctcgccatgggccccctctcggcgcggctgctaatgcagcgcgggcgccccaagagcgaccggctggggaagatccggagtctggagtaagagccgggcagcgggtgaggctgtgtcctcggggccgggcggtcggggagaagagcggggaccctccccaacggcccgcttgtccccgttatcgccctctgggttcggcagagtggtccaaatgtcttcttgttgggagatcgtggccccacccgctcgccgggagccccgaggggcctcatcccctgaagggagcccggacagttaggggcacagcctgccgctatcgttagagggcctgggaagcacagacgagcccccgaaggatcaggaagagcatcctagagggggctaggatgcccccgagtcctaaagtagttgcagcttttttttttttttttttttttttttttttttttttgttaagtggtgtggagtcgggagtagtggcgcgcgcttctagtcccagctactcgagaggctgaggcgggaggatccctcagcccaggagttggaggcagctgtgagctatgatcgcgcctaggcgactgagtgacaccccgtctctaaaaataaagtaacggggggatgggcggggcggctacacttgtacgagaaatgtcaggtgaaaaagccttctgaggtacccggggcagattggtgtagggtgcaaagcctgcccgccccctaagccttctgcccccaactccagcctgtcaggattggagctgctttccgagcacctggaccccaaactcctgtgccgcctgacgcagctgcaggagcttgacctgtctaacaaccacctggagacgctgccggacaacctgggcctgtcccacctgcgtgtcctccgctgcgccaacaaccagctgggggatgttactgccttgtgccagttccccaagctcgaggaactcagcctggagggcaaccccttcctgacggtaagtgggagcctcccaccagcttcatacctggggccaggactctgttgggctcaggctcagcatctcctgagccactgctcttcaccctctcttccccaggtcaatgacaacctgaaagtctcctttctcctgcccacgctccgtaaggtcaatggcaaggatgcgtcctcaacttactctcaggtggagaacctgaatcgggagctgaccagcagggtaaggggatgagaggattattgtgtgcttaggagctgtgggggcattgggagaatgatagaattggacatcaggaggatgttgaggagggtgactgatagaggctctttgccccaacagcccctagcctgatgtgctactttatttatttatttattttttgagatggagtctcactccgtcgcccaggctggagtgcagtgatgcgatcttggctcattgcaacctctgcctcccaggttcaagtgattttcctgcctcagcctcccgagtaactaggattacaagcacctgccaccatgcccagctaattttttttgtatttttagtagagacagggtttcaccatgttggccaggctggcctcaaactcctggccttaggtgatctgcccgccttggcctcccaaagtgtcgggattacaggtatgagtcaccacacccggcctgactcttctaagtagctttttctggggtgtttcttttttacctttttttttttttttttttttttttttttttttttttagagacagggtctcgctctgctgcccatgttgaagtgcagtggtgtgatcgtatctcactgcagcctccaactcctgg

SEQ ID NO: 586132 - DNA, 4001 bp, Homo sapiens
atattaacagctggtgacctagattaagaaataattcaatatgtgaaaaggcagaccatatcactaaattccttcacagatggaaagtggattcagtgaaaagcctcagaccgaagagtcaagtaattacttggaaggcaggaggaggagtacctacaagtgggtaaaatgaagtgtggaaaaaggatgacaaaacctggcccagatcccaagccagcagatccctggctactttctgcacaagtaacccgggcctggaaggcagcaggcagccttgctaattcagctgcggagggagaggcaggaggaggatcactttagttcaggatgagcttgggtagatattaaaagaaatacaatcctcttactgcatggagagtgtgcatgtgtggagggagggactagaggcagccaccaagcctctgggcctggggacaaaagggatcagtgccccctctgctcagcaactcatggtcagccggaactgggaggcagcctgagattgagattgggtctgaagagggaaattcattgccatcctgagcaacatggcaaatctgacttccagtaaaacaggaaaacgctaaacaccccatatcctagggacggaaaatactgccacgtgaaagagaacacagttcaagtgataccaatcatggggctcattagccggtgttgattttcaagtacaatgctcaagctacaatataaaggaaatgtcctttgctcaggacacaaatgaagacctcagggccgtcatatacagcagtcaccagggaagccaggcaagcctggtgcctggtacaactcccctccacctgctttgggctgtgcttgctacggacctgggtttcattcatgcacgtctctggggaaaaaaaataaattactgtgcgcaatttactgagggacttgcaaaacaacagagaacccaatttgtgcaatctggattttttaaaatgcaataaaaggtccttctttgtgcagaaatatgcagaaaggaactattaggttcaggtcatatttatttttgaccttctaaagaaggacactggagtcaaaagggacacaaacatatagaccaaaattaaaagtgtgtatatctagatctctgttttgaactccagaactcaccagacagcactgtgtgatcacgatcctaccctattggtcctgggagatttttggtggcttctctgttaaatcgttcgtgtctgctgcacttaagtagccacaaaatcccccgcaagaaggaaggctgctgcaatctcccgccccgatctgcgggccgcgtccccgcgagctgcctgcgggcgcgctgggagccggcccggggagatgcgagcgcagggagatgcgctctgctccgggcgcagcgggcaagctgccgcacctcctacttctgttgcctggcttggggccaggagagcggcaacccggggccggctccggagctggacatatccggcgtctccggggccagggtctgcgggtccccggcgctgcgtcctcccgacccgctccccgcggcgcccgggtcgcgccttgcggcagtcaccgagctgagggcagggcgtcccagcgtccctggccccggccccgctccgcagcgcgccgcaccccgaggctcgggccccgcacagctgcagccggtgccctccggccaagcccccgcctggcgtccccggccccagccccggccgcccgccgctgaccttttcctgcgcgcggttgagtcgcttctggacgttcttggcgaagatgcccgtcttgatgtcggccatggctgcgggtccggggagctgcgaagagcagagcgcgcagcggggctggcggcggcgcggaggagcgggaggaggagcgggaggaggaggagagggccgagcaagggaggagcgggagaagcggcggggagccgcggagcgcggaggggtgagggcggggcgcggcggcgggaccagcttaaagcgacagagcgggggcgggatgcgtcgggactggctgtgacatggggagaaggggcgggggaagaaagagaaagaggccaagaaaaagagagggaaaagccagaagccagattgtctcctcgatgatagaagagtttcgagaggagaaagggaaccaagcctagcagaagtccctgggcccaggggcagctcgggggttcttttaatgcagtttgtatttggggagagtgaggggacctgattctttccagcaaaaaaagaaataggggagacaaaaaagggaagaaccctagggatgtggaagccagctggattggaactgctctgaagtggagctgatggggctggtcccttgctgctcccaaaagtttccagctaacagaggcccctccatacaccctgggtgttgcagaagaaggtatggaggtcgccctaccctcaggaggctcacagcccagtgaggggccctggctgggaaaccaacgaagtcagagctgcaggagagaggcgtgtggagagcaaagcggggagagaccatcgctgacacttgtttaaactttaaaacaagagttagcagggcggggaggtccgcgttgagaaaggtcagcttccggaagacaggcgatgtgttttggtcatctccaaaattcctgtgctgggcagaaaccttagaatagactactcttcaagaaatggtgcatggaacagtcaagtcccttatagcttcgcatcaaccatggaagacccagtcccccctaacttgttgcttccttggaaaccttttggcaaccttaacagggactcaccatccctattattcttattaatgcttgggagaagtacgaataatagggataaacctgccctacacctagagctcttgttggctctgaccagtggtcaaactattcatattccattctcactgagagtgtgaggagaagaagtcaggtggtgccctgcaaacagaggtcagaagtggtcactcacagtgaatcctatgagtccaggtgagcatcctactgtacctctgggggaaactgttacattggtagacctcagcgagctgccacctggtgttcactcttgtgtcaccctgtagtcccctcaccttgattctagaatgatgctatggccagctttaatcaataagatgtggtgaaagtgacgccatggtaattccagtcccccccccacccacccaacctagaaaccaggcaagttttgccctctggggattcctgtgacaccatataggaaattcagctaattcagctaccctgctgcaaaaataaaataaaataaaataacaaggagaggccatacagaaagggagaggccctgagattacgcagagagagagagagagagagagagcagccaagatgtcccagctgagcccattctccaatcagttcactggctggctgcagccacacaagcaaccatcagcaagaccagcagaagaaccactcagctaatcccagccagagtgcagaatgtgagcaaacaaaacagtttttatgagtcgatcacttttataatgctttattataaaacagtaggtacctggaacacctggtctatgtgcttggctcttatttccctaggataaatatctgccccagtttccttaggaattaaggaatttccaggacacaggactcttagtgctaacagtgggaaagttctgagcaaatttggatgagtcctacttataacactccaagtaaacagaggtttatttcagagagataaaaaaaaatccaccacttggtcaacattcaatgaaaaaggctatgctcagaaaccaggaatttgagtcacctccctcaaacaggggcctttggggctgtaatggttatactgagtgtcaacttgattgaattgaaggatacaaagtattgatcctgggtatgtctatgagggtgttgccgaaggagattaacatttgagtcagtgggcttagaaaggcagacccacccttaatctgggtgggcaccatctaatcagctgccagcgtgcctagaatat

SEQ ID NO: 586133 - DNA, 4001 bp, Homo sapiens
acacaaaaacacagccacctcctagtgcagactggagaatggtgtgacaggctccaagctaggaatgagaacgcttagctccctccatcccttaacacgggtacagctctcgggcatccagggcatgacgtctgcccacatactatttcctctcaagaagccttgtggccacattcgtcttcgtgggtcattcaggaaaaccccggtccccactgtcagctgccagctgagtccttccatcctgccaggtcatttctgcacaagaccactcctcacatagagccagagctgcatgtgagccctgggggtacccacggggagggagccgccttagtgggggtcagcttcgcagcaccctctggcactcaccaacccatccatgctccaaaaaggagacccccagatggaggtttctcgctgtcctttggaccctgtcacagtgtgtccccctcctctgctaactgcagtcatgacagcagccaacaggtctcatgcctgcgtcctccaagccacacacggagccgcaggtgccactgcggtgtttcaggtggggaaactgaggctcagacgttaagtgacttggccctggcgacacagctgggggccagcggggcctggtttcaaagccacgcttcacactggaaccccagctgctcctggagcagggatgttctgacggggacagggggtaggacgtctcctctcccagagcacccgagttccagccctgctgctattaataccatgggtaaactcagacgcttctccttcctcctccccttgcctttttttgtccaaagactggaaaagagcacgtccgcatcccccccccagggaggttctgccgctctaagcaacaagggccgccagactggcccagtaaccaggtatccaaggtcaggctgccctaaaccgcacagctccgggcactcatgctcccccatctgaccacgcagatgcctggcctttgggcaagaaaccatgctctgattctcgctattctgaatgcgctttgcaaaacctcccagcagctgcatcgagctattcattagctgacagcggagaccttcaggcagaaccagacggacggatggttttgggggtttctcacctctcagtttccattcgctaggagggaaaaccgggggcttagaccgcaggggtagtggcctccgggccagactcttggcttcctgttctctctcctcacctgcgaaccccaaactcctctgccaagtgtttccctcccgtgatgggggcagaaaggacccaggtccctgccctcccctgtcctttgtaaagtttgccatttctctgtcacccctcccttgcttttctggttttgagacctgtcttacatccctgcagggatcatatccacagccttctccctcagtctcctgggggaggaagccttctccctccccggctcatacacaggctgcggggagccctgggcacgacgagattctcggcgccctggaggttccccggggacgtcccgcacccacctggctcgccccagcccggaaacgccttctttcgggcgcttggccctggattcccgacccgtccccagtttgctcccatcgggaagcgcgcaggtcgccctggcctgggagaggatggcggggagggggcgcgtggcccttccctggcccggccttccctctgcaggacctgccggggctgtgcggaccccggcgcggcgctgcaccaaaccctcgccaagtgcgcccttcgcgtctccgcggtccccgcgcgcccgtagccgccgccgcccgggcgccctcgggacttggtgcgcgggccgggctggacccggagctgcccctacccacccgccccggcacggaggtccctctcggtccctgcgcccccgagtcttccccgcgcgcccccctacctcgcagtcccgcgcccgccggagccggcagaggccgcgccgggcaccgagccccgggcagcagcgtgggcagctcggcctgggccgggaggatcgggaggtcccggtgacgtcggcgcgcggggcagggaccgaggcgggcgggactggggccggtgtggggccgcgggcaggacaggagggccacacccctcccggcgctcagcgtcctgccccactccctccagctgcccgcggtggagctcacgtgggaccctccagcctcccagaaacacccgggcaggggggccccagagcctaaagccaaacaggtgagggaggtcagtcagcccgggccagttcgtgcctccccaggtgagaggagtaaacccggctactctgcaaggcgccaggtgaagaggtgaaccaggccaccagttaaggccccaggtgagaggggtgaaccagcgccacgaggtgaggaaggggaaccaggccaccaggagaggccccaggtgagaggggtgaaccaggctatcaggcaaggcgccaggtgagggggtgaacgaggccaccaggtgaggaggtgaaccaggcttatcagcgaagccccaggtgagaggggtgaaccaggcccctaggttagccctacagtcagtggccctgaggacgggcgccctgccctaccctggccagctgtgagtgcagccctggccctgtgccagccaccaggagatggaaaggactctaagtgcggaaggatgccgtgaaggccggcatgacggctccagacagagcccagaggccttttccataaactgcccttttcctctctgcaaaccctcccagcaccagcttccctcgggcagcctcccaccagctctgcttcaccgtgcagaaatgccccccacgccctcagcagcgccccacagatggctgagggattcgtcaccatcgtcccacaccagtgcaaagaatttttttttttttttagatggagtctcgctctgtcgcccaggctggagtgtaatggtgcaatctgggctcactgcaacctccacctccggggttcaagtcattcttctgcctcagccgcctgagtagtggggattataggtacccatcattgtgtccagctaatttttgtatttttaatagagatggggtttcaccttcttggccaggctggtatcaaactcttgacctcatgatacacccgcctcagcctctcaaagtgctgggagtacaggcgtgagccaccacacccagcctcaaagaatttttttaagccttaagaaataacacggctgggcgtggtggctcatgcctgtaatcccagcactttgggaggctgaggcagacagatcacaaggtcaggagttcaagaccggcctggccagtatggtcaaaccccgtctctattaaaaataaaaaaattagctgggcgtggtggctggtgcctatagtcccagctactcgggaggctgaagcaggagaatcacttgaacccgggaggcggaggttgcagtgagccgagattatgccactgcactccagcctgggtgacaaagcaagactttgtttcaaaaaaaaaagagagagagagaaaaacaacacaacactaggtgtccggtgtgcaaaatttggaaaattatgaaaaataaaaacaaaaagaagaccccataagccaactgtgtagaggtaacctctctcaccttcttgtcagacatccttctgatcgccttctcctccacattgaaatgtatttttaaaaagttttttttgagacaggatcttgctctattgcccaagctagaatgcactggtataaacgcgagtcactgtagcctcgacctcctagactccagcaatcctcctccctcagcctcctgagtagctgagactacaggtacgtgccatcacacctggctaattttgaaacttttatgtagagatgggatctcgctatgttgctcaagctggtctcaaactcctgggctcaaacaaccctcccagctcggcctcccaaaatgttgagatcacaggtatgagccaccgtgcccagcctaaatacatattttaagggattcacgtcacatactgcgttctgcaggcg

SEQ ID NO: 586134 - DNA, 4001 bp, Homo sapiens
ttgagagggcaaggcggatggatctctcgagccctggagtttgagagcagcctgggcaggatagcaagacacccccatctctacaaaaattaaaaaaaaattagccgggcgtggtggcatgcacctgggaggctgagatgggaggatcacctgagggcgtggtggcatgcacctaggaggctgaggtgggaggatcaccagaggccggggaggtcaaggctgcagtgagccatgattgcaccactgcactccagcctgggcaagagtgagaccccgtctcaaaaaataataatgaataacaaaagctgtgttgatgatgcccatggccaggcgcacgctagccaggctgacttggggctttcgggcctgagtggcaccgagctcagccatggccccgctccagccctgcatcctcaactctgaaacgtagttctaagatggatgggattggccacgagggggcatccgtgggcagggaagcaaacagtcggtgctcagcgtcctggaaggtttctgacctggaggccgccctgcccggcgcctgtgggtcagtaccccattggtggatgcggggatcccgaaggcctggtgtctggtgacttggccaggcgcctacccagggccacaccacggaccatggaaatctcctcggagtcctcagacacgcctggccccgggcttgaccagcagggtcgtcagggaggcccagcatccatcagggtcgtgccctgggaaggagcccccagtgagcgcatgggctgcgctgggcaggcctgtgaggcacgtgaggggccccaactctgtggccagcacgaggaggctgaacccacggcccagcggcttcgtccaagagaccagagctggcctgaagcagccaagaccttcctgagccatcacctccacctcccacatagtcggagctggggtcgggggtgaaaatgaggacggagcccctactccttgggcatctccagcaaccccagccacagaggggatctcaggtagcaaggaaagctggggtgccaaggacgtgcccggctccctcttgaggcttcgcggcccagggcggctgcatgtctgggctcctggaaacacctggagaagccctgcaggatccggggtctcccggggtctccagtgcctgctgggtgggctgcacacctgcccagcctggcagggctcggggagcctgtggggccggagacccaggcaggtccccagagagccgagtgcctgttaatgggggctccagaagcagccccctggtgagaccgccaccagcacccagaccttctcagcgcctcccatcccaggaaaccacatcatcccagccctgccctccttcttcaagtgccactgtcaccaaggagcatctagtcaacctccaaaatctctctcaactgcccgccccacccaggccggctatagactccccagcttccacacaccccctgccaagccacttgccccaacaggaagcctttcaaagaccacgtctcactaccgccagctgtgagctgcgtccctcagctctgtctgccccagcctcacatccctagttcctacctccggggtccctctgcctacgaggcacccttcacccccagctgggcctcctcaactcggatgaagccccaggatgaagctccttcagggctatggcccctcgccacctctcccgggctccagactctgtcctttcttccctggtctcctggcctttgcccaggctgtgccctctgcctggagcagcagcctggatgcctcccaccccacatttaggcttcaggccccacagctgcctcttcccagaaccctcccggcacgcacttcggtgactcttacaagtacctgttcagcgtcagccttcgcccaggagtgcaggctggggacgagggcagtggccacctctgccggtcctgtcagcacctagtgcaaagtccagcccaccgtgggcgctcaacgcaggcggctgtgctgccgcaggtcacagcaccaatcagacacccccatccccacacacaccctgcaccggcccacgcggccatcacactcggagcacacgcgctccgatgtggctgcactgttggcacacgcacaggcgcgcacacacccacacgcacgagcgcacacgtgggcgcacacacgccggggcgccctgacctccccgcacgccctcccgcagccgccccggcctctgtccccacgcgtgtcacacacggccgggtgtgctcgctcacgccgtcccgcgacgttgctccagccggcgcccggagctcgatcgggagagctgctgttggccgcctctgcctgccagcgtttgccaagcggtttccatggtgacacatcttggctccgacaggaaccaaggagtgtggggaagagggtccccacggaggggcgaggcgaggcaggaggtctctgcgtcttcaggctcccggcaggcatggggggctccacgagtgcagacaccccccagtcccaagccaggcttgcaccccgagaaggaggctctgggctggtccctctgggctgcctggcacaggggctgacttagtcagtcattcaacaaactttctggaagagccactctgtgctcacagccgggtctacgatgctgcccaagacgtggtctcgcaagaggctcggagtcgaatcctgaggctaaactgacgtcccgccaccctactgaaggccccatctagcaggttggtccgtggctgcgtaagcaccaaggcccaccgagcactttctcaaaggggggctcccctctgtggtagatcagttacaaacgtgtccccgatgccccactcctcccctgaatcaccacgccctttgccgtgtgactttgccccaactcctgtctagaggtggcgtctacttccccatccttcaatctgagcctgtcttatgacttgctgtggccaataaaacgtgacagcaatgacattcccagttctgagcttaagcctccagggacatgcgtgcctctgcctgctctccccgactcctgctatagcacgagaacgggctgggctgctttgctggaaggcaagagggccatggagcctgggtcaccctagctgaggccatcctggactagctagctcccagctgcccacagatgtgtgagtgagcccagctaggacttgccaggcctagcaatgagcagcagtaccaccaggccctttaatactaaggacatgtgaagtcatgtgtttggagctatttgttactcagcactagctacctgatacccctctctctagggccctggccagcagctgcccaacctcagttagcacaggccagaggctctaaaagttcccaggggtgctaagaaccaggccatggtgacagctggattccgctggctaacagtgccagagggtgccagggacagagcttgtgggagggggttcccaagtcaagtccatggcaggagctactgaagcagaagcacgagtctccactgcctttctttgcctcggtttttccccctgtgaaatgggcccatcaccctgtcctgtctcctggggacccctggtaaggtagcgtgtgtggcagctggaaacagacctactacgtgccagccccgggttgcaacctagggagagaggcccattgctgccttctaggttcccacaactgagaaggcagcgtcactaatcccagcttacagactggaaacagtggggagaggatgagtggcttgcccgaggcccaggacacacaggagcaggtgggcatggccacaagccccggctgggtctgagctggtggttatcttcatgtttttctccctgtggtcacctttttggaaatattgtacttcctaagctaactgcacttacgaggtaatgattggtgtgagtttatagtctcttttttgtttgtttgttttttgagacagagtctcattctgtcacccaggctggagtgcagtggcacaatcttggctcactgcaacctctgcctcccgggttcaagcgattctccta

SEQ ID NO: 586135 - DNA, 4001 bp, Homo sapiens
gtcaagggaacagtgaaataggaaaatatagttctatcttccccatcctaccccaaggaaaagagaatcaacaacattttttctaagacttctccaagatagcgcccatcacctcactatagcaccctactcttattcagaaactgaacaattttacagaaagcaaaagccacacccttaataatacactcaactctgcacagtgcttggcttctgtgctaagtacatttccagagacagagttggagctacatctcctgagcctacttcaaattaaaatctgtgaacagtgagaagttacaaatcagataatagcccaaaatcaactgctgaaaggaggttggggggaaaagtcattaaacacatccatctttcttaatgaaatgacaatgtttttcagcaacacaaaacaccaaagctaccagtctacactacacagtagtttgcagaatgacaacctgcagtacacagtaaaattattcttaaattatcgtttgcttcctatggtgctctgaaaagtagcaaatgcataaagtcatataagagctattgtccaatcactgacagcattaaaattatttttaaatctaatttctggaaagttctgcaggagcagtttgaaaagcaaatcaaattctaatgagaaaaaacgcctagttcaaaaatctgaaaatatactttgaagacattcacagtttaagcagcaggagggtcataggcaccaaggtgtgtaacatctgtgagtggctgatacaaaaaaagatttctctggaattaatgattgaaaataattatcaaatacaatctaatatgatctttaaacgtctgtctcaaaagcaacaaagcaaaagcttgtaacaaagcaaaaccttccaatacacagatttttacaccttacacatacccacatacttcacaaattaagaactagatgaaaattagaacactaaaatttaaaggtatctaaaatacactatttgaaacagcagactcttatctttacatttatctgtcagatctaccagtaaagctcttctgaaatggtcattccaatacaagattgttcgatatgccattccgtgtgaatagagcttgggagactaattctcaaaatctcctcaggagatgctttattacagctctagtttcaatttcctgcgactcaaacagctacgtacagaaaaacagctcatacatacggagaagaataagaatacaggggagcgctccattcttttgttttggtggcagaagctgcaaaaataaaggttcactggagccatctgcacctatccccacccatcacagccctgcagagcacttttacccatccgcttctcaagactctctctagcccccgaggtcggcagaacccgtggctttccacgtctcaaaggatgggggtgggggggaggctgcgaggaaggacacagatcctttgaggacagagggacaaggagatgcatccagatggggaggatgggacgcgtcacggagacccggaggcttgcaaattcgctgggagaaaagccctgtagggcagagaatgctgcctgttcagggatggggacagacagaacaacaatgctccaaaacaggcgacagacacactcctagtagatccgggagggtgtgaagtaggtagctctgaactcggagccacaaatgggtagaggcagcctcaaacacatctgtaccgcgaagctgagacttacggttacttctctcgctgagggtaagggtcggtggacccagcaactccgcagttccgcctccgccgcccctgcctctacagccgagctggtgacctcaggtacccagcccgccccacccacccggacggttgccccttcctcgccggcccgggtgcacccgccaggcggaggctgatgtggccgagggtgcgcactggcggcccgcgggaagcgctgcgtgagccgaaggcgcccgcggcgaggctcagactgggtgggcgccccccatccctctccggccgctgcgccgcctcactcgggggaggggaagagggggcggtggctcttgcctccgcctcgcggtcaagcccggctcatgttccagccttgcgcgctcgcagccccggccgccctcttcccctcccccgcctccggctccggctccggctcagccgctggcacccccaccgccaccaccctagtctcctagtcgcctgccaccagcccctgagagactgcaggtccagtgaaaaggagcaggaacggcagcagcccggccgccgacccggaagctctttcaccgccaaccgcgaggctgcaaagggtgtgaacccggaagcgatttcatagccacggtaacggcggggtggaaagctaaggcctttgaagacctgggaccccgtagtttcgggagagggtgaggggtgaatggtgctgaggtgcgaggagagggaaggacagtaaagagcaggtgggcaggagggtctccgactccagagacctgagcttttggggcgcgggtgggagcgcgggggaaccctcaagacggctttcttttggcgactgagggtttttctgccacaggaagctgggccgggctgctgtgcctgggaggagggaaggaggaatgagaaagcggtgacggtccctgccccccctcgccaggtgactgtcccacccatttagttgaatgtagcggccagagaggcactcgcggcagcccgtacgggtgggacctctcggtgtccttcgggaaacaggaggagcaagttcgactccagcgagggaaaacggaggtgggagactgaaccatctccacatctagttgccccaggcaaggagtttatttttcacatgtagttacagagaaaccatagccactttttgggtggaaactctttgagcaaagaggcttacgtttttccccagtagtggacgttgacgggtggtggcgcaggaaaaaacctcccaggcagagtgattacgtatttttgtcattgcagggaaagggattcacagcttgtcattctaactcacttctccccctgtaactcacttctcgcctctacacttttctccaccttttaaggtttttggctttcatcgctttttctacatgtttttagcctcaccagaagtctttcatctcggtggtccaactcaggatctcagcctcattattttcttacccttctggagtgcatatgtgcctttacagtttctgtttgcaaacgctgtctagcatactaagaggatgttagcaaacctgttccatggacactaaatggcagttgtacatctcccctcatcagtcatagtgacaaccagaaatgccctccatattttccagtgatcccaggtaggtgccacccccctaattaaggaccacttccactgctttatttataagatcttattacttagggagcatattatcatttgtgcctaacattttccagaatggagtgagccatataacaaaatgccacgtttcctgtacttattcacttgaaccctcatctcagactcagtctaaacatattgcaaactctagttatacctttcttgtattttagttcaagctactcattttctatcagtttgtctgtgtttctcccttagcagttttaccttcctatgttagttacttttgttattttcctgttaagcctttgtttccttctttcatgtcactggaagaatgtagattttaagtagtcaagtacgaatagttcttgaaaatgaattttaagaatattttggggatatggtaaaaaagtatttggtttaagaaaacaaaatactgttactgtcatagttatgtctttttaaaatcacatttgtttaccttttaaaagttcaggcttctgtgcagtattaattaaatattctagagaagtgatgagtattgacaaagtactttgctagtaaatgttttcttaacatgagttgaccaagacaggaattgatttgctttaaattgtctttagaaaagtaagagttacttgatttttcttttaggtcctt

SEQ ID NO: 586136 - DNA, 4001 bp, Homo sapiens
agagcagcctgggcaacatagggagacccccaccaccccatctctacaaaaaaaaaaaaaaaatctttctaaagtagccgggcatggtggctcgcacctgtagtcccagccactagggaggtggaggctgcagagagctgcaactccagcctgggtgaagagtgagatcctgtctcaaacaaacgagagagagagagaaagagacagcgagagcgagagagagagaggacatgtactagctctgtcctgcctaaaagaatttttgtccctggtggattgtgaattgatcctttgtctcctttttgcccagcacagtacctggcacacagctagaacttgcatgtttgcttaattgaatcccagagccatcaaaggcagggagaaattacctagagacaggaagaactgaaagactgaaatgccaaataggtcagcaagaaccatgcagtacaacaatctaaactctaacccaaatccccaaattccaggcaaagaacacatcattgatagatatagctgtgactgacttagaatagttgagatcagatcgggtgggctcagctcatcagcacctgttgagttcaaaccggaattttttctccttcgcatgtggagtttccttgtcgctatgaagaataaatctgccttattctctaggattccacatttcagcctggctactaagtaaataaaactggaaactgggaagccttatgctgcaatgactggcatctctgccattcgaggacaaacatggctatattattattgagtttaaaatcaccacattaattgcccggagtcgcacgcatcaccatccctgcaccgtgagggtgcagaagaagcatgcagtcacgctgatgtcacctgccaggtaacgggactcggcagggaactcctctgggacgtccactcggggactccggggaaatatggcttctggctcgtcctcggggctccccgctgggactcagcactgcggaagtggggcacgccttgggggagtggacaagaaagcgcgaaggagcgcgattagaaggtctcatctgtgcaacgtgggccgaggggtgggtgtggaggcctcgccaatttccttgtctctctagggttcctgaggctgtcggggcttctggaagccagggaggccctggatacggaagtctcaatgcagcaaattacagacctagttctgtacccttatgaagaacccctctccctaagggcgccctccactcccaagcgggggcggggatcggcaaaggatccagatcattcggcctgcggaagtctaaagggtcatttagacacccgcctaagaacctgaaactaccaggactgaccgcggtcaaaatccctcgggagcagtgaagaattcacacactggggtccacaccccgggaagctcgcattaacctaaggcggggcgtggaaatccgtacgtttccaaaagcggatttagaggccgagcctctgtaactacccctcttgtcccagcactgcttctgcctccccacctctccgcccctgcaacctttcccagaccaaagggagaaacgctctttcccggttccaggctgcaaaccttgcagaaccgcagccaaaggtcacccaggccaggagcgccccccgggctccgccacgccccccggccaggctggccgcggccgcgtcgcagcccagcacccgtacctttcccgatgacttccagtagctccttctcctcctgggtcagctcgcctttctttatgtgaaccattgctcccgccagcttgaaggttattccctttcttagggagtattaaaaaagaaacgatgcgtctgtattgggaacgccagccgcaatgaggcaacttgagaccaagacactgagtagccaaccgcggaaacgcttcgcttctctcctccctcccgcgggctggcggacagcgggcgagctcgggcgagccaggcggacggtctccgcaggccctgcggcggtcaccgcctgccgcctgtcattggccctgccgaggaggaggagccgcaggaggcggtagcgagagatcgccattggagcaacctgggaggacaaaaccaaatgcagaaagctggaggggggaattaaattcctcctacacgttccgctcccctatcctgtccggttcaaatatttcgccacatgtaatattgaaaattctacagctggcagttatgtgctcagcgacggctttctggggcatgcagaggccccaggttgtcgccgtacccccaccattcccccgggagtggcgcagtctgggcgggggcggtctaggagacgggggcggtacgggaggcggggctgcgccgggttccgtgtgtctatgtcaatgtgtctgtccttcactcctccattgtctgccgccactgctgctgctgctgctgctgccgctgctgctgcacgaatcgccgcagcccccagccttgcgcgtcgtcgctacctcctcggacaggtgagaagcagcccaggtgaggcaaggggcgccgtgagggttgcgagagtagcgactgccgccccgccggggtttccatcgggcaggagctggcggggaggaagcatgtgcctcctggggcggcttcctgcctcgcggtggagaagcccccgctccacctcatcatcacggcgcgtacggggtatcagtgccctgggatgaagacctccgactcgcaacgtttggccgcctcgggagaccctgggaccgcgggcgggcgggcgggggccagccacgcggtgggaagtggcgggtgcacatggtctcgtgcgtggcaccgccagatgcggctcccggggaggctggggccggggctctgggctaggtaggggtcgcaaggacagcgccccattactagcgagtcagtgagaacagactcgggagaaggtagtttttacgctggtgatcctcgccctccccactacttgtcatctctttggcctctgtggaagctgtagaagaaaacctgatcgcccaatgttgcttgttaaagatgtttggaaacaatttacacttgcactaatacttcgtttatgagagacagcctgtgggagggggaaggaagggcttctttgctctgctagagttctcggttctctttgtaactcagatcttgagatttatggaaatagggagtggagggtggggaggttggagagggcggagattaaattggtgttgctgcctatatatagccttagattagcctcttaatccaaccttcattcaactgtaatatgtagcctggagcttcgaccataggtagatgggggtaaatacaagtgtgtatttcagaataagatttgcttgctaaaatgcgggaatcagtcatttctccagggtgcagatttatatttacatcatcaatgaaagtttctttggaaattagtgtttatgttttactgttgtttccctacagagtagtattgatgtttctctcaatatgtgtgtcaaagagacgtgtatgtgtcaaagagaaatatttgagtaattatgtaggtggtttttgttaagcatccccaggaccactgtttcttctcatagcgccatacgaaaagcgaaatgcattttcctctggccttaggcatttattttgcgtgaagctttcactaacatctgaaatctcctggaatatgtttatcattatttcctgcctttagcaaaaatctttcctaaactccagctgtttttcccccctaaagcttcagcattaaagactgggacagatctgagccagaacatcttacatgaaaatggtttgaaattattcatctcagtgtataacaaagatacttttgttggatgatgctttaataatgatgtggctgttcaagcaagtagtaaggctcctgagagtgaccaatcttttgtaatgctgttagttcagagttacaattgatttataacatagtatcatgcggaagaaacccacaaacctaaaaaaacagttgagtggtaacctcctggaacatgtgatttagcatcttacca

SEQ ID NO: 586137 - DNA, 4001 bp, Homo sapiens
ggttcattcataagaacgaacaagtccaaacataagtggaaaaaatgtatgaactgaaaaaaaaatctatatcaggtatatcctcacttagaaatgattgtcagtgaagctgggtgctgtggctgagggctgttaatcccagcactttgggaggccgaggcaggtggatcacttgaggccaggagttcaagaccagcctggccaacatggtgaaaccctgtctctactaaaaatacaaatgttagctgggcatggtgacgcacacctgtaatcccagctactcgggaggctgaggtgggagaagctcttgaacccaggaagtagaggttgcagtgaggcgagattgtgccattgcactccagcctgggcaacagagcgagacccctgcctcaaaacaaaaaagaaaaaaaaagaaatgattttcggtggagttaacttacctgacttctgggtcagcaccgtgccgtaacaggcagagcagactctgggccttgtggtacttggcagccagatggatggggatgatagactctgtcggctttggagggaaaacaaaacacattacaagtggccctgtgtagttaaaaatactgtttgtgttagcttgccgtttcaaaggcaatacatttatttagtgtctcattggctcactctttttctggtatgtgcattgaaagtttcctttctactacctgttttaaatgatcaaaattcagtgaattccatcctataaaatctgtgtttcacagaaatgcacatttactgaggcaacagaaataacactcaaaagctttggaaatttttgaaagttgattcttcagaagagcctgtggtgtgatattaagggtacttgctatgaagtcacttattccttaaattaacccacagggtgatggacaagtaggtgctgtgtcgttgccaaagtcgtattatcagcagtaaaacctgaatcttcagggttttcaaatataacgcagcatatgttctgtctatgattagcagagctgtttgtgccagctcttaaaatacacacgtgtaagtagtggtttcacaccgtggctgcaagataagacagtagggtacaagggagggtgacttcctttttgaatttaattgtaaaagtaataatcattgtataaaaatttagaaaatgaaaatgtatatattaaaaagggaaaaactattttttgtttgtttgtttgagatggagtcttgctctgtcatccaggctagagagtgcagtggtacgatcttggctcactgcaacctctgcctcctgggttcaagcaattctcctgcctcagccgtccgagtagctgagattacaggctcctgccaccaagcccggctaatttttgtatttttagtagagacggggttttgccctgctggccaggctggtctcgaactcctgacctcaggtgatccacccacctcagccttccaaagtgctgggattacaggcatgagctactgcgtctggccaaaaaagggaaaaactaatttgaccacatggagatcatcactgtgggtatgtttgagagatgacatgaatggtcttccagtcacacagggtctggtgttttctcatgttggtttgtgtgtgacatgtgtaggggaggctttgcaggctttggggagcactgcagtgtgtgtggagtgagctggagtcgtgtctcattctcataagggccgtgagcttagtgggttcaccagctttagatcatgcttctttctaagcagcctgacttttttccagaagtgactgagcagaaaagagggtacctgggtcagaagtaatctgttgctggcggagttgggcagaatggtgatgggctggttgacagggtgatttctcaggagtacctcgatcgtagtgcagtcttctctcatgatggcttcatagagtttcgagtgaagtgctgcagatgggccatcttccagggacttggcactgtcaaccaccaggtctctgcttcctttcctggttatattccccatgagaaaaacttaagacttcaggggaaaatgttgttatggaattggtcagtttcagtctctttgtgatgattctttcagttcagttctagaactgttctagaatttgtcgagaattggatctgtgaaggcaatccatcagtttggaaccaagcgtccagactttgttccttgatcatagaatgtcaaatgtcagcagtttttagggttttctactctatcataaaaacatattcaagctatcatcttacacctttatttctgatttctctccagttcaagtgtagctgaaacaatgatcaaagctaaaacagaggaatttatacattaaaatacaaagttaaaattattacttttaaagtaagaaaacttttaaccttaagttattttttagtttttattataatagaatcttccctctccccattatgggttcagtttttctccggcataggaatagtttgggagatgttttgggtctgtactctttgcttaaataaagccatttagtgtgatctattagttcccaaccctggctaatacatatgagttatctgggagcttttaaaaaatatcaaagttggctgggtgcggtcgctcatgcctgtaatcccagcactttgagaggccagggcgggcagaacatgaggtcaagagatcaagaccatactggccaacatggtgaaaccctgtcgctactaaaaatacaaaaagtagctggctgtggtggcgtgcgcctgtagtcccagctactcaggaggttgaggcaggagaattgtttgaacctgagaggtggaggttacagtgagccgagatggcaccactgcactccagcctggcgacacagcaagactctgtcttaaagaaaaaaatcagttttttcgtagtgcgagaaacatgctcacccgtccaaacccaaagagtgaacttagaggcacaaagaacagtgaaagtgagacttttaatagccctcttgcaaggtcacgtgtctggtaggcaggtacacccagggcagttacaacaggtgatttatctcctagcatgcaagaccctacctcagttcctcactggtcaaggactacagggttacgatcttcccggacgtcgcctaagttgcattatccccttagaaggttataccctggtccctttcccgcttaagtttggatttcccagtaatgaaactttcttcccttttatgggctgactcctctacatcctgttcacttattgtgatcttccaggtggatgagccatgtggtttgttacatttgcaggctggctgccggtgcttagatttatcatgccttgaaaaagccatttaaaatgttttctcacacatagaaaatcacgtctctggactcgacaggacagtcgtttcttttcttttcttttttttgagacagagtctcactctgtttcccaggctggagtgcagtgatgcgatctcgtctcactgcaacctctgcctcccaggttcaagcaattctgcctcagcctcccgagtagctgggattacaggcatgcaccaccacacctggctaatttttgtatttttagtagagatggggtttcaccatgttggccagcctggtcttgaactcctgacctcaggcgatttgcccgcctcagcctcctaaagtgctgagattacaggtgtgagccaccgtgcccggccgaggacagtcatttctaagagcttcttgggtaatgatgtgcagtaagggttgggaagcacttgtgtacaaagcatgctctacattaatattctccaaatttagaatagccttgggacttttaataatactgatgcttgcgttcacccgcaggagttctgatgcagctggcctggggaatggttgaatgttgaggtttttttttttttgagacagggttttgctcttgttgcccaggctggagtgcaatgccacaatcttggttcactgcagcctctgactcctgggttcaagccattcttctgcctcagtctccctagtagcagg

SEQ ID NO: 586138 - DNA, 4001 bp, Homo sapiens
ccctcttcttcctcctcctccatctactcaatgtgaagaaaacaggatgaagaactttatgatgatccacttcaacttaacagtaaatatattttctcttccttataattttcctaataacatttttttcttttgctaactttattgtaagaatatagtggataacacatattacatacaaaatatatgttaactgtttatgctgttggtaacacttccaatcaatagtaggctatttatagttaagttctgggggagtcaaaagttattagcaaatttttacttcacagggggttgactccccaccccaacccctacattgttcaagggttaagtgtatatgctctctatgagaaactcactttagattaaagaagaatttgattaaacagcgagttcaaatgcctgttttgaagcagccattgtgctctcaagtatgccaagacagagcctaaaactacacttgttataaagctaaactgggtatgaagctatctggggagtccctctgcttgttaaccccagctcaacagcaactctgagtttggagattctcaaagtctcttttaaattgtaaccaaagtaaggacagtggtttaacagagttcatatagctgattgtgctgcatcaaggccccagggggctacaagggacctttgtgacttgacaagttcaatggtaatgagtgtggttaatgaatagtacggcttattcatcatattatcccagaatctgacacgtttatacagttgttacacatatttgcagcatatatttggtgagaaaatggaatcagatttaagaaaattggtgataagtaatgggtagcaatgaagggagaaaaaaaatcatcctctgtccaaataagtttgttaagtatcaataaactcagcaagcttcttcttcaaaaaatttaaaagttacttgttttgatgtttccaagtgttaaaatctaactaaccaatgttccagggggtcgtctctactcttttcctattctcccattagcaaaattgtacatcttagtgcctggggacgatctattaccaagaagcaaaacagtaaggtggggaaaagatggactgccagtggagactaagccagtcagaggagaggatggattcaggaagggtagaaaatattcaagcaagcaatttttttttttttttttgagatgagtcttgctctgttactcaggctggaatgcagtggcccgatctcggctcactgcaacctccgccttccgggttcaagtgattctcctacctcagcctcctgagtagctgggattacaggcgtccgccaccacgccccactaatttttgcatttttggttagagacggggtttcgccatgttggccaggctggtctcaaactcctgacctcaggagacccacccgcctcggcctcccagagtgctaggattacagacgtgagcaaccacgcccggcccagcattttttttttaaattaaataaaaagccgaaagttggagtgggaccctctgccaatggttaccagacaatctctcttctttgggaaacccggagtgacaatcagtgtcaaacagcccccacttgtcttatttctggttgaacgacccaggccccaacccgtcctcccgcgctggctcttcagtctggtcacctgtattttttgtcctgcatatttacatcatatttcttgatctgaaggtattccttcagcttcttcaaatccccgactgaagcagctctgtgaagtttctttaaatccttttctcgaaggttgtagccctggctgcgggtctcattcttcctcttccagaagctgaaaagcttattcatggcggtgcaggctgcagcctttccctcagaccaggatgtttcttgaactcctagccgtccgccctgcccctctgccctggcatccggccggcagccctctccagtacctgacgaaagtggaaatgctggaagggcctcgcgcagccggccgttatggcagttacggccgttatggctgttaaggtcgttatggtccggtcctaggggctcgcagacctgcattctcacctaggacttgggcctgacggccacacctgcagtcttcctattagatcatgaaccttggaatagaaacttaccagctttcttacaaatagcctcttctccttcaaaagcagatctaagggcttgaactcttgcaaactaatgcctaccttccttgtgatggggatggggaggggtggatctcttccagtgatcttccctccaacctactcccagcctctcacctccctggccacatgcgacaaattgtctttataataactgcaattcctcaataatctcaatttcatacacactttttaacaccacttctcatattccagctcactttgtctggtcacaaaactccaaaagtcctttgaaaatctaactcactgcacctacagtccattagtctcatatcctttccctggcctggacccccacaccctgtgtcctcacttcactacttaactaaattccacggtcaatcgtcataatcactcccatgcagataccttcactaagtttttccccattccttttcttacctatctgtgcctaaaccaaaaccctcattaaatctaaactctttgctctgccctaagccacaaaatgtgaccaaaggaaaaaacacagtcctgccatcatctttcatttccagttcaggaaaatccacctcaaaaggtctgttattcttcctctctcttcacacctccttggctcatggccctttttcctgatccattgagaaaaagatccaatcaaaagagaaactgtaccagctcccacgatatctacccacttacctgcaccttgaaaaaaaaaaaaaaaaaaaactttacctttctcttgttcatgtagatgatatgttcatgttcctagcaaaggccagcaccattcttgcatgtactagaccccatcctctctagcctatccaaaaacattattcagtaaatccttcttccctgctttcatatgtatctttaaagtttccctctctgttaaccaattcttactagcttaaatacatactagtatttgcctcctactaagaaaacaaacaggaagattgaccacatctccccctgaaaccatcaccgcaattgctctcttttgtggcaaaattcctcagtaggattgtctaaaatgttataatctctgctacaatttttctccctctgttctcacttaaagcagttcccatcatcacctttttgctcccatcactcaaatgacactacttttaagccagattgatgatgatgtctatcacatgaaagctaatggtcatttctgagttttcatgtaaatacagcagcatttgacacagctgaccattgctaactccttgaaacactttttatttttttggtttggcttccaagataccacacttgtctcgtttgattcctacctctttaaacatttttttcaatccaatttgttggctcctctttatcttcaattattggagagccccagaatcaatccaccaacagctttttttattctttataaatccttggaggcattctcaaattttatcttttatacctacattttgacagccagcaaatcctgtcaattgtaaatacaaaatatattcagaatttttttatcgtatctgtattccctgctgggttatcacagtcttatgactttaaatggcatctatatgctactgacactcaaattgagagttctagtctggttcctctcctgaactcccaactggtatgtccacttgcctattcaatacctgaatttgggttgtttatattatagactcaataaacatctcacccttaacatgtctaaactggtctcctcacattccactctcttactgtctttcctacttgagatcgagtaaccctattcttccagttgatcaaggcaaaagctttgatgtcatccttgactcttctctttctcaaaggccacatctaatcagttagcaaaccct

SEQ ID NO: 586139 - DNA, 4001 bp, Homo sapiens
tatgatagacttatttcctatgtttgtagggtggcattgaattatccttgggagaattgagaaaatagtctctcaattttcctgtgtaccatggttctgagaggaaaccctggttgagagagtcattttatactgactttcagttgatagacaactgtaccagtagctcatttcactgtgcaaatgttatgaatgctataattaagcacccaagagttggaatcaattcaagtagttcattcattacctattaaggaaaagacgtctaagctgtttttccaactgcaagtgatctaacttttcataatataaaccatacatatttctgagcacatcctaaaacgatctaaacaggtaaagtttctttcagttgagatttgtactaccttcagaatgacatttttaagtaaaatgaagtgcaattttcagccaacttaaaaatgctttgttcctgtctgttacttaggaagacacatagggctaatgttttaaggaatcgtattctagtttagataaaataaatacacgcttttcgacctcagtgtaagtgaaagatacttggtgcatgaccagccctattttaaggctaatacaaaaataggctctagatttttctattagaacctttaaggaaggtgaaaaaaattgatgtatttgtcccaagatgattaagaatttgaaacagaaaaatagattatgtcatgcttgaatataagtaaactctaattgctgaaatctgtaattaatatctcatacataacttatagaattataattacatctccccgaaagaattaccactcttcacagcatttaagtttttgaatcagtgtaaacagttttaggtccactttgcaacactcaaaaactaacagtttgaaatttgcacaacagcctaaagaaagaggaactgtcctggaataaaagagagtggacaactggcaacaaaacactcctgaatgtgacaacgcacattctccacaaaagctaaaactagagaaatcgacacaataaccatgtaacccatatgcaatctcaaaggaacaaaagatgaaataagtactgtaatgatatgccccagaaacaccgaaaagtttatttctttgctctaaaatcgtgagctgatagttttgctcggtacacttgcattgtttcaattaaaatggtcagtcccgggtatgaacttcttcgttagttagctgaacaatgggatctcaaggaactactggctttttatgaacgaatgcagtggtttctagcacctgcttattttaacgttttgctgtcatttcattagcatctcccctgcgggctgcgtgaactccgcaaatcacacatcctactgcctttcccggcggcagccgcactgagtcaccggccccggaccccgccctgcagggcattccagctgcttccagcaggacccgttccgcaggcctgcgcctcactcttgctgcgccaggactgcagagggacatggtaaaaacgggggctgaaagacctctcgcaacagccttttaggacagactcaaagccttcctccctgagttttatctgtaggaccgaaacaacaaaatctcagaggaacccaccaaccacagcaggccgcagccgcggcgaccccggcccgcacacactgcgcacgcgcgcacacacgcgccctccgcccggtgggggttcgcccagaggttgacagaggaaggtgggtgggggcctagagcggtgggtcatggctggctgcacccgcaaactcactcacctccgtaaacggatccatcgccccaggcgtcggactacgagacgatggaaacggtggttcaaattcaggaagagaaaagtgagtctcagctcagtgtgtctcctggaaaaaaccaggagtctgaggcgggggaactctcccacaaccagctgtcctctcctctcggcttccagtgacggactcggcctctgcagccgttcaaatttgaatttcagcgccgagccgcgagcatgcgcgctgggcggagccggggcgccctctccccgcccctgcgctcggtcacgtggccgcgccgggccgggtggttcccaggggcggccccgcctccttcccggccccctcccagccctcgccgcggggtggaggcgggcagcggggcgcttcctgctctccaacggcgtcgggttcctggctccacccccaacaaccacacattcccctcagctttaaggcgattgcttcacaccaaccgcgtttgggtgttcccgccttccttcattcctaaataaagtattaaggccgggagtagtggcgcatgcttataatcccagcatttggggaggctgaggctggaggatcgcttgagcccaggaggtcatggctgcagtgagctgcgatctcactactgcactccagcctgggcggcagagtgagaccctgcctcaaaaaagaaaaaaaaaggattaagagcccttgtgttggcaggacataatcccagcactgtgggaggccgaggcgggcagatcacgaggtcaggagttcaagaccagccttgccaacatggtgaaaccccgtctctactaaaaatacaaaaaaattagataggcatggtggcgcgtgcctctaatcccagctactcgggaggctgaggcaggagaattgcttgaactgggacccgggaggtggaggttgcagtgagcagagatcacaccactgcattccagcctgggctacagagccagacaaagagcccttgtgtttcaggtgctgctagcccgttggccttcagtagctttgtttcctaggtcacacccaactcctagtccccaaaagggggactgcaggcctggccctcagaaaagccagttccggtgggtccccgacactctaagccaatgaaataaagctaaaattaacagactgtgtgaagcgttcatgcacaattttttattttaaattccatccaactgtgtacagtgttagagcgggaggaattctgacaagccctctatctagttcaatccttccttttactgccgagagaagggacacccgaaaacgttaaagaaactggtccaaagaaatgaaaaccctgttctcagctcatgacccgttttccacactagctaaggctgtgtctcctgcttattctttgtagagtactccaaattgtaagataggttacataatttctgtatcagattcatttcttctataacaagtctgtgcaggtaaagatgacagttcttgatttgttcatctgaaaagttaagagtgactgtccatgagctgaacaaaacagaactattcctcccaactgagtggtttcaatatgtttaataatatgtccatcttagcagtcaatcaacattacaaaaagaatttactaatatttttaatttgaatttttgtatgataaattgtacgtgactgaaatcacggcaagaggtaagggaaatattgcttggggtcagggctccacccagttagccaaatcggttaacccatgggttttttttttttttaacctttgtggggagtcatggactcctttggaaatatgttaaaactgaccctctacctagaaaaatgaccatttaatcataaactatttaacaggattttgtgaagttcatggacaccaggacaagaacttctgatttagcctgtttgtattttagtttacttatctgtgtaacaggaataatcatctgccctgatttcctcagagttgttaggaggggcagatgaaaaatggagagacataatccaaaaatatttcataataagtaataagacactgtccgagtgtgtagtatatggaattattaatatttaacccagaatgtgttacttatgaacaaaggaaaaagatacttccatttttttcaagtgtgacaagaaaggtgtgtatgtatttggggcgtgtctgtgtgtgtatgcgtgttttaaacaacgttggaaaatgagtcattagaaatttatgtagccgttgtgccttctggctatcacttctatgagc

SEQ ID NO: 586140 - DNA, 4001 bp, Homo sapiens
ggatgatctcccaggcatggttcaaaggaccacacacctctgccttcaggtctctggaaaatagtcttggggaatctgggtcttaattaaaacaagactttggaggctgggcgcggtggctcatgcctgtaatcccagcactttgggagccaaggggggcggatcacgaggtcaggagttcgagaccagtgtggccaacatagggaaaccccatctctactaaaaatacaaaaaattagctgggtgtggtggtgtgcatctgtaatcccagctactccgaaggctgaggcaggagaattgtgtgaaccagggaggcagaggttgcagtgagctgagactgcaccattgtactccagcccaggtgacagtgcgataatccatctcagaaaaaaaaaaaaaaaaaaaaaaaaaaggactttggaagtagagatgcatctcctaacatgtacaatgacctgaggccatgattttgaggaagtaggacaaattcagatatatttccatattgtctccagaaacaattcctaagtgtcagaatctgtgtccagattttccatttgcagcatgtagccatcagacttatcctagagttattttcctggcttctcaagctaggattgtattttgaggtctgctcattgaacaattacttactactcagagttctgagtctatgtggctccatggactgtaccatctaaatgccaccactattatgagaattcccatgttatgagagctacaatgtgaatatcaaagatcttaccttacttcctgctctcatccaaaaaaaacaaacaaaaaaaacctcttggaaataaaacacttcattaacagatgagccaagaagccatatcaacgctcagcgtctccaggtgatcgccaaatctggattctctgagagacggaaggaagctaagatggttgagtccttactgtgtgcacatgccacagatttacatgcatggtcacaatttccatggtatccctatgagatgggtctcactcacttcagttcaccaataaggacacagaagcatggagagggttaagtacattgctccaggtttccacagccagtaggaaatgggagagaagggtaggaggagggcagtgattcaaactcagatgtgtttatatgaggtcaaagcccatgaaaagcagtaaaaatttcagactaaaatagcctgaaataatagttacctatacaagaagaaaaaattccaatcgccaatgaggtggaagagttttatgcccaatttaaactagtatgctttttattcacatagatgtatgtagtgtcaatgtctactcttagactccacatttctctgtgtcagtgaggttactggtgccttacctggaatcttacaattcttgatttaataaaatatgtgatttattacgcaagcaaagtactggatcccattgttatgtctacatagaaaatacaaaaatatttatttgcatacctacacaggtgtgcccattcgagaggctgggcctggactggtcatcgttggctggagaggccgaggactgaagagacaggagcaagaatagaggcgccaccgtaaggattttccagggggactgcatctccgagctatgcaccccaagtgatcacccggctttggaagctcccaactgagggatgctggagctgaggctgcagaatcaattgatctctctctccttctcttcctcactctctttgacacacacaccccaccctctcacatacacacttttcaataagtgtgaagtgaataaaagcacacataaacactcacagacccacagcttgctcttgttggaccctgagagagccacacacaaagagctggagggagtctgtggtgtgcggttctgctgaggtaaagactgcaggataaagaaaacccaagttgcacagtggcacaacttccgtgctccctggctcagtgaagttagtgtgcataaaccccgtgagcctcgaggcttgccggaactgatctgttgggttggttaggaggcccttcccctttcattcttgcaaaacaaaacaaaacgatactaaagccaaaactgagaagaaaaaagaaaaaaaaaactaatccacaagcacacaaccctttaacaatttgatcagcagcacccacatattgtagaaattctaattggttacattcagaacttacttagtcttgttttcaacagctttatatggtaaggttgtgatccttattttgttgtaaaaggatattctggtcaaataatatctttcctctggagaaattgggttattccttgaagggtcaaggccttttatttggtgtgcagaaaataaacagtacagaaaataatgggcagttagcatggtgggattttagacctaatgagaaaaaacatgggttagaattaatcaattcacagttgctaggctgtgcacaatgcatcttttttttctccagaatttcgaagtgcattttgtggatgatttgttaagagactgattttctgctctgaagaatagaactgaacactgtctttctgagggaaaaaaaaaatcggaaccagatcatagataaaagacatataatctaaatgtttctctctaaaataagataaaacaaaatcatatgccattctcagtcaagataagaggacagggccaaagtaccacagtctaggtaagtgtaggaggtcatgagattctgtttctctctgcttaggctctgagggagcttattacaaattttgaaatattatagaagctatctaaattgttagcaattaaaaaaaatagcatttggagtagcaggcaaagttttagagtagcatcctttccaggatgtaggaaataccagtttttatggttggaagatttcttgtgcagtcattagtcttacaagcaccgatggggctacaattcccaaacctgctgcagagatagcacaagtcagagtgtttccctaattacacttccagcccaatactgaggatatcgttaggcgtccatgggcctgtgacttcctctgactctaaggtgctgctgcttcagttcttcactctgtgactaaggggagctctggggtcactaggaccaccacaggggtgaggcctagagaagttccagagacttccaagggaggctaaataaaggactgattgattaggaactcagattgtgaagacagaaaggctcatgcttacgtctcatgtctactgtttattctgagtaatatattagaccagtgatgtaactttccccccttcagtgtcttgtttttgttgttgttgttgttgtttgtttgttttttgagacagggccttgctttttcatccaggctggagtgcagtggtgtgatcacagctcactgcagtgttgacctcctgggttcaagtgatcttcccacctcagcctcccaagtagctcatttctattgggataatggtaatatccgctccaatgcgctgctggaagcactcgaatacatgatgtatccaaacaacaaagcagcatggctggcaagaagtaagtgcttagtgcatctgtctatgactctagcaggagtgtgatgaaacctgcaccccagaccagcttcaagagaattccaagacgcccatggtagttgtaggccatcatgtcatacatgggaaatggtgaggacaggaaaagggaggatttattgaataccttccagctgtgctacagcactccaggagtgtgtggtctagtttgtctaatccataaatgggtgaggactctcctgagggcttctggaagagcatttgacacaggctttgggcctcttgaggctctcctggtctcaatgtatagctgcgagcaggtctggaaactcttagagtgagagggatttcttggtatgccggaaatgcaagttttgtgcccttcatcgcatgtatgtgggccaggcagtgccattcacaaccatcccagggatggtcggctctgaaactctctagtgtgctcaggcttcggggctggtcacagtggg

SEQ ID NO: 586141 - DNA, 4001 bp, Homo sapiens
ccccttagcactttgtatttaatttgtacacgatgggcagttcttgattcatagacaaatgaaaggtgttggctgggcctgttccatcacccgagggctctctagccctggaggccacggtaaaggctgatctgagatgtccttctctccctttcccatgcccctctccccgagggctctccccttgccctcgttttgctccatggtcatggcctctcatggggatgtccctctagttgccttgtcttgccctctggtgctggcagaagaccctggaacccacatgatcttgggctctcggaggccctgcttacctggagggagcaggtgaggcaggggctgcaggcggaacccagagccagcaggaaggatatgaggtgagttcttgtgttctcctattaaatattggccaggcctcttttttttcttctttaaatagactattttttctttttcctgagacagtcttgctctgtagcccaggctggagtgcagtgatgcgatcttggctcactgctacctctgcctcccaggttcaagcaattctcctgcctcagcctctggaatagttgggattacaggtgtgcaccaccatgcccggctaattttttgtttttagtagagatggtgtttcaccgtgttggtcaggctggtcttgaattcctgacctcaagtggtccacctgcctcagcctcccaaagtgctgggattacaggcatgagccaccaggcctggccccaaatagacttcttattagacttaaataaataaataaataaatatatatatatatatatatatatatatatatatatagtcaggatctcactatgttgcccaggctggtcttgaactcctgggctcaagtgatcctcctgcgttggcctcccaaagtgctgggattatagtagactttttttttaatagacttttaaaaatagactttaatagatttcttaatagactttataaagtctgttaaaagtctttaaaaagtctattaaaagtcttttaacaaactttataaagtctattaaagtcttttaaataggagtcttttaaagaggaattttaggttcatagcaaaattgagcgaaaggtactgagagtttctgtatactcacagcccctacacacgcagcctccccactatcaatatccacaccagagccatacatttgtggctgatgaacctgcacatcactctcacccagagcccacagtttacatcaggactcactcttgctgctgcatattctatgggttggacaaacggacaatgacatggatccaccattagaatatcacacagaatagttccacctcccccaaaatcttctgtgctccacctcttcctccgaaaccctagcaatcactgctctttttattgtctccatagttttgccttttccagaacgtcctgtatttggaatcttacagtctgcagccttttcagattggcttcttttgcttggcagtgtgcatttagggtacctccatgtcctttcacggctgggtctccttttttacaacctcttatacccacgtttctttttgcttttccaggaaggagaaagatgtggaagagacctttgctttccccaggacaaacctctgtccccatgtgcagtggcagtgggggtggtggctggtgagacctccaggcaggaacaggaagcaagccctctccctgctcaccctcctctctgagctttccccactccaccctggccggctgttgcctgccaccaagcacccgggcaccttctgtgatgtgctgggctcccgccctcacttcctggccctcctccctctgtgtcctgtttcttctgcccctcactctgtgccctccttccactgcttttctgtcctccaggtcagccccttcttgactctcccgaatacccatcagaacgcacctgtgtgctctgctcccagttcgctctgcttccagcctttgcccttaagctgatctctgactccttcttgaagtcaatcagaccccgccctgcagggagggacaaggtgaggcctgagctggcctaggaggggcctatggcttgggaggtgcctctgtgggcagctacagtggcgagagtgggtttgaggaagctggctgtgcagcacacttgtcctgagtctgtttccagacaagtgccgccttccacaagaatttgccttggcttctctgtgacgagccatgcaatgccacgatctgttaatttaggtggcatattttagaggcagagataaggacaaggggccatttcctagccggtagtcttacctgaagctgacagatggaccagggcaggggctgatagaggctggcacccacagcaaaacagagaattcaaccgctcctagaacaagacaccagaggcagaaccgtttgggaggagcagccactcaagacgagttgcaaactttggcggctttttaacgatctttgagaccctgaccagattcagaaaggaggaaggacttggctgggagaaagctggccagggtagctaaggctatggcacagagcggagaggggagaggacactggggcaggtagtgcccatgcagtgggcggacagtgctaacgcccacttagtcaggttgagaagggcgaacgtggtgaccggggtaactcctagttggaaaggaaagaatagagtcaggaaaagttcgtggctcaggagtgccaaggggtcatcatcccccattaccaaggtttggttgctcagggattgcacaccgctttgtggttataggggttttgtatttctcatcatcatccttcctgctgcccgcaatgcaagccatttcagtgtgcactggcagctagatgaaggaaggtgaacacacttagtcaacttgaagcttgcttgcaattccagaaggtctttggtgtttctgaggaaggggatttgccttccatgttaaaatgatgattgatacaaagacaatgaatgctaacgtctttcaccctcagtgttcaagaggactgtgagttatgtattctcagttatgggctcaccaactccgcagagaattggggggatttggattagaagagagtttcaggaacaacctgattttgaggactacaatctgtttccattccacaaaggaaactgcgacaaagttaatggagtgaggatggatcgagaaaagagacttgcaaagatttaaagggaaaggggccacatgcacatgatggagttagaccctttcacacacggaaacggactcgaaagggaccaaagacatacatgtaagagctaaaactgtaaaactcttaaaaagaaaacataggagtaaatctgcttgactttacatctaattcttggatgtgacctcaaagcacaaataaccaaagaaaaaaaaatagataaattgacatcatcagtattaaaagacttttatgcttcaaaggacacccacaggaaaatgaaaagacaaagcatagaatgggagaaaatattcacagattatatatctgataagaaaattatatctagaatgtaagaagaactcttccaattccataataagaggcaaataatccaattaaaaatgagccaaagatctgaatagatattcccctcacgaagatacacaaatggccaatatgcacatggaaagctgttcaatgtcattagtcatcaggggatgcaaatcaaaaccaccaggagataccactttatatccactaggatggctagaattcaaaagcaaggtaataacaggtggggccaggaggcagagaaactggaagcctcacaggcagttcatggtgagatgacgcagccacttcggaaaactgtctggctgttcctcaaatgacttaacgttgttatcatataacccagcaatcccactcctgggtatatgctcaagagaaaggaaagcctatgtccatggggaaacctgtaccagagtgtttactgcagtgttattcacaatagccaaacagtggagacgactcatatgtctctgcattgataaat

SEQ ID NO: 586142 - DNA, 4001 bp, Homo sapiens
caaggccttggcccaattactactgtaagtctctgggcctcagtttccttatgtgtaaaatggacattgtacctgccttgcacagttgttaggtgagactaaatgatttgatatatgcaagtccctagcacaggcaggcagtataacatgttagctattattattattatttttgagacagagtctctctctgtcgcccaggctggagtgcagtggcgcaatcactgttcagtgcaatctccgcctcccaagttccagcgattctcctgcctcagcctcctgagtagctgggattacagtcacgtgccatcacgcccggctaatatttgtatttttagtagagatgtggtttcaccatgttggccaggccctggtctcgaactcccgacctcaggtgatccacccacctaggcctcccaaagtgctggcattaaggcatgagccactgcgcccggccgttagttattactattattaccatgattccctgacctcttgctttctggtctgctttctaaaggtaagtaaaatgcctagcacagtgacaagacgacagtaaccgacgccaaagaaatgcctgttctcttccaccctctctctatccatcaccatgctgaaatctggtattttgtccctggagaagctacctcaattttccaccccatcatagccataagatcttaatgatctcccaaacatatcatcctccagtgccaggcctatgcccaggggtatcctcctctgtagtatgtatctccaacaccacacagggtatgcagatgcccaaatcctatcttcctctctgcaggcacccaggcatttggtcttcgacatttctctttaacttttcttccttttagggtgcctcctgctaagcgcccactcctccccagacaccaggtgaccaatttccctcagttagggccccgccacccagggggttcccctaaaagaatgtctgcagaacagacagcaagctgggtcaagtgggatggaagacagaaccctcactgcccagtgtaccccagcttcccagttccggggggtctgggccacatcctggagtcttctccttaccccagtagctcttctattcatggacatgcccaggcttggaatccctgggtgtgtggcactgtactagcttagtaagtgaaaaatcagaattcaggagaactgatttttttggtggaggggaaaagaggggcgctggggagcctcgtgcggcgctcaaataggggggtggggagcaagcaggaagacggaaggcctggattccggaaagagaatgggaaggggggcagagagccccggagcccgggatcccaaagcctgggtccctcggagaaaaaccacgagtccacttcgcttccctacctgggcccagcctctaggcaagcacggccacgaacgcagtagggcgctcccttttccgacccggaaactcccctcccacacccctctccccacccgggtccccgctcccgcctgtgcagcccgggaagggggtctcggtgactggtgacccccgctccctccctcagcaaagagactcccgcaaccctctgcttcgggcggcttccctgcagcggggatcgagggaccccaggggccaagaccagagcgcccctcccggctcgggacggccccgccgccccttcgtcagcccccgctcgccctgcaaatgcgccccctccccgcccctctcccgaatgccacctccccctcttcctcccgagcccggctcgcccacccgccgaggcaagggaggcctctgaggaccagagggaagacagggcggttcaccccgagggcggcccccgaggacccccgcaggtgcagcccacgcccctcgcttccccctcccctccctcttcgcacagcctaccatcctgcagcctccggctcggcgcgtcccacttcggccaccgtaggcgccagtcccactccctttcttatcctttctcctgctgccctccctctcgcccgaagccccgccccgtcccgcccaggctctgactcccggcgcgccacgcactgcgcaggcgccgacgccgcggggagcgcgggcggggctggaggcggagaagcggaaaccatggcaaccaggtccttgactgcagcttctaggagcccggtcgtcatggtaacgcggctgtcctgtgggctggttggaggatgggggaggaggacaataaggtcctcgcgctttggagccttgtggggcaaaaaggcgggaaaaggggtgagaggtgaatgggacgatcattggagttcgaagcagcaggcaggactcctggaaggggagtgggccgtgaaaagggagcagggtgggaattaagtgtaggggaggaggagtgacctggaaaacagaaagacaaagggtcatgagaaaagtatagaacccaagctgaatatctattgaaagcgtgatagatacacccctctagtttttttctttttagagacagggtctggccgcgtcacccaggttggagtgcagtggtgggatcgtgactctctgcagccttgaactcctggcctcaagcgatcctcccgcctcagcctcctgagtagctgggactacagacgcacaccgtcatgcccagctaatttttaatttttttttagtagagacgggggtcttactatgttgcccaggctggtctcgaactcttgggttcaagagaccctcccgcctcggtttcccaaactgctgggattacaggcgtgagccaccgcgcctggcttctgattttacagtaagagaaatgtgtagaaaaagaataaaagagaaaaggagaggctgctataaaaggcatgtaaggagaagggggaggaacgtgaactgaggcaaaaggggaagaaataaagagcgtcttaaaaggttaacttgggtcaaaactcaaaaagggacagatgtcacccaaatctcagtgtgaagatgaggtggatgtacgttgtaatatgggcttttaaactgaatgtgtgtgtgtgtctacatgttactggaaaaaggggtcccgatccagaccccaagagagaattcttggatctcatgcaggaaggaacccaaagcaagtcgtagagtgcgatgagaagagagagtttattgaaagctacacccttacggagtagggcgtcctcagaaagcaaacagaggaacacactgtcttaagtttttcttttctttctttctttttttttttcttctttttttgagacagggtcttactctgttgcccaggctggagtgtagtagcatgatcatagttcactgcagcctccacctcctgagctcaagcgatcctcccacttcagtctcccaagtagctaggactacaggcatgcaccaccacagccagctaatagttgtatgttttgtagacacagggtattgtcatgctacccaagctggtctgggactcctggactcaaggtatccacactcctcagcctcccaaagtgttgggattacaggtatgagccaccgcccctgacctttaagtttttcttatataggggtcttgtttttgtagagactaaactaagccgagtcaatgtgcagatgggccaatggcatgacaaaatttattattctgttaatttaactatccttgacattctagtaggtaagtacatcaaagcaaaacttaattatctttcttccttttttttttttcttgagacagagtcttgatctgttgcccaggctgtagtgcagtggcgtgatctcagctcactgcaacctccacctcctgggttcaagccattcttgtgtctcagcatccctaatagctggattacagctacatcctttcacctcagcctcccaagtagctgtgactgcaggcatgaaccagtgcatccaattaattaaaaaaatattttgttgtagagatggggtctcactactgggattgtaggcatgtgctacgacacccagctaatttttgtatctttagtagagagggggttttgcaatgttggccaggctgatc

SEQ ID NO: 586143 - DNA, 4001 bp, Homo sapiens
gctgaggtcaaagaggctgaagggcttgctgaccacagcttccgtctggatgaaattcctcagcatctccgtggatgtggtctgtacatagccatagtcctagtggtaaaggaaggacagtctgagtgatcagtggagggaaggggtaaagagggggagtggggccaggcatggtgactcactcctgtactctcagcgctttggaaggccgagacgtaggagaatggcttgaggccatgagttcaagaccagcctgggcaacacagtgagactctagtctctacaaaaaataaacaattagctaggcacaggggaggctggggcaggaggacggcttgagcccaggagttccaggctgcagtgagctataactgcaccactgcagtccagcctgggcaacagagcaagaccctgtctctaaaagcaaaaaaaaaaaaaaaaaaaaaggtagacttggcctcctaaccacggcatcccacagtagaagagcagatgtatcttcaggggaattgggtaggggccacagaaggggattgttgattctcaccagcacttcatccaggagttcgtataccagagccacattgcgggagatggtcccctcgcccagggagccacagtaatcgcccagaagggtggccaacctgaggaaacacttggagcgtgtattttctcctcctctcagacccctcctagctaccaggtgcccagcccaaccctcctcacctggagagcagttctaggaggctgaagggagaaacgttttctgaagttgtgaccaccaaatagaggccgctgtgtctgatgtgaatgaaatgacggccatggtgatgctgagacacaggcagggagaagagaggcgttaaaaaaagggaggtggagtgatcagaacccaggagacctgagctcggatcccgatgcctcttactagtcacaacagcagtgcctttgggagatacatgacatatgcctgggcccagcttcccaatgtggaaagggggttaattacactaactaccccgagttgctgaggatggagtcacgcagggagctgggcctggtgtgttgctggcgcccattgactctttttttttttttccccacccccacctaccccgagagggagtctcgctctgtctcccaggctggagtgcggtgtccggatctcggctcactgcaacctctgcctcttggattcaagcgattctcaagcctcagcttcccgagtagatgggattacaggcgcccgccaccacgcccagctatgttttttttttttttgtatttttagtagaggcggagtttcaccatgttggccaggctgatttcgaactcctgacctcaggtgatccgcccgcctcggtctcccaaagtgctgggattacaggcgtgagccaccgcgccgggcctcacgttagctttatttggcggaatgcaccccccaagtggaatctaccaatgaaccagtcctgggagggagctggcgcccacccggcccgacgggaccccgctcctcacccgcctcccgccactggttaccatgacaaccggggactcgtctcctggcagtcccgtcagcttccggtagaagagctcggccacatcccggccgccactgtccccgcggactggcgggtggaaggactcagtgaaggatcctgcgacacaggctggccctgggcgcccctcccgcccggcccctccgccccttcccagccccaagggtctaggatacagtctttgtagatgagcgggtcccccttggaggacagaatgaagaattgggaaatcatggccgttctggagagtagacaagaagacggcgaaagtcgggcctgccccgccctgcggccccggaacaaaagaacgcgtgtgcgctggccctttaagagcgattctcctccgcccgcgccagctcggaccgcgggaaacccggcgcctgcactaccccgcccggagattcccttccgacgcccgcaccgcctccccgtcactcattctaggcccgcacggtgattggcttgcggctagcgggaggtgaagaaggccgccttgtccgattggcccgcacgcagtggcgccggtcacgtggggggcgacgtttcgcgccaatttcggttggccggccacagtccaccgcgcggagattctcagcttccccaggagcaagacctctgagcccgccaagcgcggccgcacggccctcggcagcgatggcactgaaggactacgcgctagagaagggtacgggtctacgagcccgggagggcgtcctgcgcggggagcctcccggggaacacctgttggtgtgagctggggtcttgggggaccggggtcggcgggttctggggtgcgcgaggccagaggcagggtcgagctgcggcctggctaaggcccacggggcctgggaagcgtgcggggggccatcgatgttgaagaaaagctagtaatcccacctggtaaaggtgttagggtcgtggggttgggggcttgggggcgcgctaacccggctgggggctgcacagggaaaagtcgcgcccaggacctcaggagagtcttaagggctctgggctcccgtgcccgctttccttcgcgcttttgggcattcccaggttcccgcgccctccccaggcgcgcgtaggccccgggggcgggcaggccggggccgctgcgcgccgggattggccgtttgaggccgccctccgagcggaagtggagccgggcggaagtggcgcgaggaggctggagggagtgtcgtgtaaacagtgtccttccgcgcggcggccgcggagagagctgcggcccgggggggcgtgcctgggatccggagcttcgctcgggcccgggaaaggcggcagtgggctgggatcgcggtgtctctgggtgtgatggccaatggctggactggctcccgccctgggcggaggaatcccgagctgtgaagcggctggaatccgggcccatgtgcttctttgtttactaagagcggaagcgatggcgggagcgggggtggggtgcggtggcggggtgcggtggcggaggtcccggtgaaatcaggggctaaggggacccaaagaaggcgggggatcataggggtggaaagaaagctgagaaccttgagaccggagtgtgaggggccaacggggaagggcgctagaattttaaactaaagtagggaccggaattcccctggggagatgttggatggccctgtgcactgccacgggctctttattcttcgctggttagaaacagacttgtgaaaaagagttatgcccactttggggagacttcggtaggtttatttaaatgctcatattattaattagttcataggtcgtgttttaagcgaaaatgggtatctaagatttgtcttaaagtttgtgtcttacggttttacatttcatgttacagaaaaggttaagaagttcttacaagagttctaccaggatgatgaactcgggaagaagcagttcaagtatgggaaccagttggtaagtctaagattgggtaaagggaatggggagcggggtgcttaaggagccataagcagcagcttggcttgttttattaaagacataacaattagagggtttgagggctgaaaagcgagtatcgctctgtgtggcgctgcgttctcccctgtggatgcccagagcctgtgctgagttctcagtgatgcattttcacatatgaacactggtgagcaaagtgaatgtggctctgaggtgtttctgtctcttccccacttgaggttcggctggctcatcgggaacaggtggctctgtatgtggacctggacgacgtagccgaggatgaccccgagttggtggactcaatttgtgagaatgccaggcgctacgcgaagctctttgctgatgccgtacaagagctgctgcctcagtacaaggagagggaagtgagtggttagagaacaatggcaaacaaagggcgaggcgtttaagcttctgtagagaggctgctcagatactgatgttttc

SEQ ID NO: 586144 - DNA, 4001 bp, Homo sapiens
ggatcacctgaggtcaggaattcgagaccagcctggacaatgtggtgaaatcccatctctactaaagatacaaaaaatcagccgggtgtggtggcgggcgcctgtaatcccagctacttgggaggctgaggcaggagaattgcttgaacccaggaggcggaggttgcagtgaactgagattgcgccattgtactccagcctgggcgacagagggagactctgtctcaaaagagactctaataaaaataaataaataaataaataaataaataaataaagagggctcttccttttgtttttcatgtcacaagtttatgaccttgagcagaatgtgactgggaatgaagttctcagtgggtgtttttccttgtctcttggcaaggaccttgggattaacatgttacatgctgagatgccagtatttttcattttcatatagtccccacattcacatgaatgacatatctgtccaggattgaagggaaggttgcctatgttgagctgctgggagatggtgctgcatattcaccaagcctcttcctaatgagtggactcttaagggttattttgatcagagatttttgtcctgttcgggctttagaacttaacctgccttcaagacctcactcactataatcacagcaatttcaaccacccgaatctttcccaccaattggtctagctctgagtccaggtttgcttgtttgttttgacatggagtctcgttctgtcacccagactggagtccagtggtgcgatcttggctcactgcaccctcggcctcctgggttcatgcacttctcctgcttcggcctctcacctcaccaagtttgtttacgtttaccaaggggctgtagtgctggctgtattttctttactttttttcttttttcttttgagacggagtttcgctctgtcccccagcctggagtgcagtggcgccatctcagctcactgtaacctccacctcacaggttcaagcaatcctcctgcctcagcctcccgagtagctgggattacagtcacccaccaccacgcccggctaatttttttttttttttttttttttgtattttcagtagagacgtggtttcctcatgttgggcacgctggtctcgaactcctgacctcaggtgatccgcctgccttggcctcccaaagtggtgggattacaggcgtgagccaccacgcccggtcagcattttcttcttttaaacatgtagtatgaagtctttgcctgtttggtggaccgtgagtctgttcagtcctggcttacactgttttcccccatgactggttagttggtgaggaaggagctactcactcgttactgggagtccagacacagcctgaaaccagcctggagggtgatttctcagcctagctaatacatccgcgcaagagagatctttttaagtcacaaaaccctcccacggttccgcaaagccctcggatggcctccagctccccagcctggcacacagccttattccttagcaggcctccggacactgtgactttgcgttcttgactgtgaggcactgaaatctcccggctgcccgatttcctgccagacgcggagttctcaccgccaagcctttgactaaactgtcgactgggtcccaccccacttgctttcactcaccaagactctgctcaagtgtcacctcctccggggacccaccatgaccctccccgacctcctcaccccaagcctggccgccgtgttgccttacccgatccccaagtctcgagggcgagtccagtcgggttcctgcaaggctggcgcccaagcccctgccctgtgagacccacccccgtgtgcccctagggagagatgcaggaaggagggccggggccgcagctcccccgtacctggcctggtggagcaaactctccgctcctgccgagaacatcacgccgccgccaccagacgcgcacgaacctcggaaactccaggagctgcagcccaggagctccgcaccccggtcaacttccgggaccgcgtcacgtgagcgcagcggccttacgtggctgcgtcacgtgccgcatcacatgagcaggagggacaggttgccgaccaatgggctttggcgtggagcgactggggcggggcgtaggtgccgcggccgggggtccgggtcggcgcctgggagctgcggaatcgcgcgaccccggaacctcggcactctggagccccggcgcccttcgaccccggaaagcatttcggcggaaattgggcgcctggggctttgggagagggcattgctggccccaaagtgtcactgccccagttctggtttctgtttcgtaaacagctttgtcgtgcgggagtccctttgctaagtacgacctgaaaatctgatgcaaactccgacacttgtgggctgagcccagcagtgtccagcagtttgcaaggaatagccgcggctctgggcagttttggggattttttgagctcccatttattgagcacccatcccgcgctgttcctgctgcttgaaacgaaaaaatcccttattcaatccccacggtattcatgggatctcgcgatctctgttttacagatgaggccacaggctcggagaggggaagtttctgttcattctaacggatgtgttgggtgcccaaatgtgctgggccctggccataagtttgccatcctgcagacggccgagggacacagggcgacacgccagcgtcatgataaacgctatgacagcctgacctggttgggggtccaaccggaggaggaaggcttcggcgactgcggcctaagatgagcccagagggtgtccagaccaaggggtggggagggacgggcctagggtagcgatctgcttcctatggcttaaatgcaccccaggaggaaactgatctctggccgcaggggagataatggattgggaagctcctgagggagaaaggaggctggtgcagttgtggtccaggtaagggaggttgccccgaaagtaggcagattcagtaccatttagaggtaggatttgcaccacctgtgattgaggaatttgcaggcaggaggaagaaagtggaaaaatcaagggtaacttcatgtttgtggggtgtctgtctggggcagaaaaggacgaggaaatttgtgccaagagtcattcattaagtggacaagcgatgattgagtcctagctgcgctaggcactgctgaaggttctggggaatagggtaggggtgggaatcaatgttgcgtagatagggtgggtcaaggttaggccttgaagggataagccccgagaagacccctggatggaaggaaggaggaggaggagggagggcttcctgcaggagttccaaacatggctttgagatgccctagggcgcccagtgatgtctgagggcacctggtgcagagaatgaagagatgggaatcggtggatggtgagcggtggatgggagtcggtggagtgcggcgggtgcccctggagccgcaggttgaagactggcaaaggaaagctggtgacaggtagtctatggaaagcctactgccagtgtttaacgtttactagggtaaaacgtccacaccaaagcgcacaaatcttaaatgaactccactatttacatttctagaaatcggtggtaaatttgcaaatgtcttaagcctcggctccattggcgacggtggggagccgggggttgatttgtgtttgataatttctgtggtgtaaatgttcctgccatggtttgagttcaagacctagaccatttccagctccccagaggttccccgctgtggccccctcccagtcaacgcccactcccttcccccacaagtaactgctagtctctcttatcaccagagattagttttgcgtctttttatacttcatgcaaatggaatcgtaccgtacttagcttttcttgttcgtccatgaatatttggtcggtttccagattttgacaataacgaatagagctgcagtgcacaattgtatgtcttctggggttctgagagatgcacccctctt

SEQ ID NO: 586145 - DNA, 4001 bp, Homo sapiens
ttccggtgcccctcagaaccggcccaggccagagtacgtggtagggtcaactccttgcctctgtggggcccagctcaggcatgggcagtagcagccccttcttgaggaaggccactgcccccacactcccagctttggaagggccccagagaccattgtctaatgcaaagctggcctagcacatccacatccacaaccataagagctaaaatccactgagcgcctcctctgtgttgagctcagtttacagatggggagtgagccctttcctcttctcggccaccctgagaggtgggcaccaccatatccccctccgcagctcaggaaaccaaagctcaagcacactgcgcaaggtcatgctaaacccgaaagtggctgagccaggatttggagccccacttttaaccacgcagctgggaagacctggaggccaggcagcatggggcagggccgagctgggagggcagagactaggcctgaaagtgctggcagtgtgacccccagcctgcctctacatggcaggcctcagtttcctgatttcctgtcctctggctgtctcccagagcctccagaacaggaagggacactgtgagggtggggtcaggcttaccatgggacaccaaagcttcccaccccaccccccgtgggtctcctacccagtggttgctgaagttgtgtgtgatcaccgcggagccaaaggaccgagcagggttaatcccacagccagtgtagtcaatctgtgagggaaagaaacagagggaggggcgaaggcagagagtcataggtgaagagagagtgagaggagggagaggttggagggagaaagagaacaatcagggtgggggacaatgagacccagggaaagaggagtgctgaccccaagctgggcaggaggtccctgtgctcctctccagggcaggaccctgcccccagcccccagcgctgacccgccatcctccacccaatggcaagagccctgtcgggagtcccactggctgcccatggcagggcaccccaccagcccccgccctcccttcccccacctccatctgggagggcccctgactcacagccaggaggtgtccaagggctacagagaggccgatggcaaggggggctgagccaccaaggtcacggcgcctccggtcggtagtagccagcacgcatagcaccagctggagggtcccgatgatctcgatgcccaggccctggcccgagttcacaccatcagccagctgcaggggagagaggtggtgaggactggtgaggagggtaggcagggactgtgtcccaggaccccaaggatacccaggcctcccaggcccaggcatgaagggcggaccctcagatgggccttcagagcccatcacagggtcccaggcaagcctacacggcaggtagtggaaatcaggccttgaacccaccccctgtgttaatgaaactccagcccagcccctaatacctgcctagacccaggccccactctgcctagaagctggagaggcctggggtgagctggggcctttgcatccagctgcatccaggccagggtattctggggtaccaagaccagaggcaaggggcgagccccaggcatgaaggtgatggtcaggagcactcctaggagaagagatgcaaaaaggtgggaaggcccagcaggggacacggcttcatacccaaaagtccagaacattccaccccatgcccgactgcatctaaattccagggctgaggaggccttcggtgaggtcctggctccctccacccctctttctcctctgtgcctgcctccctattgtctccaccctctctctctccttctccaccccgtctctttccttggtccaaggcctgtctcccattgcttctggccctgccctccctgtctctccttctctcttcttcctccccactgctggcctcagcctcaccctccctctgcctggccagataggccccgccaccaccgtctggctgccacttactcctgggccacttttagaaacatgactcatggaaagagaagggaatggaagctgctgtgaggtcatgaaggccctccccatgcagctgcccccggaggacccctccccaggaagccccagcaccttccactatgctttgtggccgtcccaggggctaagtgcactcacacaggggagatggaccacatcagcaaaggctcacttgcaaagatgcccacttgaggccacttaggctgccttctcccaggcagggctggtgcacccaaacacttcccagctgggagacaaactacccagctcccatcctcaggatatgggagtgtctccaaggccatagagaattttgcaaaatccaaggtaggggggcacaccttggaggttttcccagccccaccctgaggccatcctacaagaacaattctcttcccgcctttgtctgcagccctgggttacagggaatgactcacatcccctcccctgccttgcagccccagctttgggcctttcctggcggaccccagggctacatcccttaggtccgccagccctctggccaatgcccagttccctttctgtcccaaggttgggccaaagaggcagaagccctgtgttcaggttctgactcttctactttctggcaccatgagcatggcctattccctctggtcttcagtcttcccatctgcaaaatggatctcattgtccgtgcctgctctccagagcagctgggaggttcaaaggccaaaggggccgtctcagggcttttggaaagagttgtcgacgcaggagggatggggcagtggtagtgactcttgttttggttcttctcattgtgtgtgcaggatctggggacaggcagaaggagtgacggcgggtggagctgctggcagaagcctgcccagagttaggacaggctgaatggggttgaggctggtgaggccagcccggctagtcctgatgcccacccacacttgcacctgtgaggcccctgtccctctgtatctgagccctcaggaagctcgtggctccttctattcctctctcttctgctctccagggttggcctaattgctagctggcagaagtcctgaaaccagcccttccccgatgattaatggagtcatcgctgtaagtggctcccgccttggagaaccctcccagccccatccctcacagatgtgaccagaaagagctcatctcctctggttcttaaccaggtgcgagagccccagcccctacccaaagacaacatgcttttcatgcaaagtgggcagagcagagggtgatagttccaggccctgtactctgagtccttgggaaggggaggggtcagccacctgccctgggaattctggaatgtgccttcgtgactgctgagaaccacatgggctgacagccttcctctccaatacccactaccactaccaccaggaagcctcccctgatagcttcaacatctactgacaaccttccttcaactatctaatacacttgcattatttacatctggaaacacttgataattcagaattggaaggggcactcaaaggcctgttgaaactcaatgtccaggaaagagcaggtaaaatacttcaaatgtacgttactgtttacaacccattaaatttgaaaacttgcttaaacaaggacagttcccattgtagtcacttgttttatatatatgtacatatatatttgcacatccccaggtagttttgcctggcccaggtcttattaaggcaaaaaaaaaaaaaaaaaagtaagaatcagaacaattctcaattctcaattctcaattgtcttcccgcttttgtctgcagccctgggttttgtgaatgcaagtattaccgaaagaataatccacacatttcttctgaagtgtcagaaagatacaagctctccattttgtgctaagcccttgtaagcccactactcaaggcccagttcagaccccaccagctcctagaagccttcccagatccctggctggaattaacttctgctcccacccaccat

SEQ ID NO: 586146 - DNA, 4001 bp, Homo sapiens
acagccagggctcccccgatgaatggccccacccagaaaatctaggaacagagcaggtgtgttcagagggctccactcaaaagcccctgggaagcgttccctaggttaccccacagcccaccaccccgttggacaggtttttcccacctgggatggaggcaggtaggagagccaaatcctaacatcatgattccggtgcccctcagaaccggcccaggccagagtacgtggtagggtcaactccttgcctctgtggggcccagctcaggcatgggcagtagcagccccttcttgaggaaggccactgcccccacactcccagctttggaagggccccagagaccattgtctaatgcaaagctggcctagcacatccacatccacaaccataagagctaaaatccactgagcgcctcctctgtgttgagctcagtttacagatggggagtgagccctttcctcttctcggccaccctgagaggtgggcaccaccatatccccctccgcagctcaggaaaccaaagctcaagcacactgcgcaaggtcatgctaaacccgaaagtggctgagccaggatttggagccccacttttaaccacgcagctgggaagacctggaggccaggcagcatggggcagggccgagctgggagggcagagactaggcctgaaagtgctggcagtgtgacccccagcctgcctctacatggcaggcctcagtttcctgatttcctgtcctctggctgtctcccagagcctccagaacaggaagggacactgtgagggtggggtcaggcttaccatgggacaccaaagcttcccaccccaccccccgtgggtctcctacccagtggttgctgaagttgtgtgtgatcaccgcggagccaaaggaccgagcagggttaatcccacagccagtgtagtcaatctgtgagggaaagaaacagagggaggggcgaaggcagagagtcataggtgaagagagagtgagaggagggagaggttggagggagaaagagaacaatcagggtgggggacaatgagacccagggaaagaggagtgctgaccccaagctgggcaggaggtccctgtgctcctctccagggcaggaccctgcccccagcccccagcgctgacccgccatcctccacccaatggcaagagccctgtcgggagtcccactggctgcccatggcagggcaccccaccagcccccgccctcccttcccccacctccatctgggagggcccctgactcacagccaggaggtgtccaagggctacagagaggccgatggcaaggggggctgagccaccaaggtcacggcgcctccggtcggtagtagccagcacgcatagcaccagctggagggtcccgatgatctcgatgcccaggccctggcccgagttcacaccatcagccagctgcaggggagagaggtggtgaggactggtgaggagggtaggcagggactgtgtcccaggaccccaaggatacccaggcctcccaggcccaggcatgaagggcggaccctcagatgggccttcagagcccatcacagggtcccaggcaagcctacacggcaggtagtggaaatcaggccttgaacccaccccctgtgttaatgaaactccagcccagcccctaatacctgcctagacccaggccccactctgcctagaagctggagaggcctggggtgagctggggcctttgcatccagctgcatccaggccagggtattctggggtaccaagaccagaggcaaggggcgagccccaggcatgaaggtgatggtcaggagcactcctaggagaagagatgcaaaaaggtgggaaggcccagcaggggacacggcttcatacccaaaagtccagaacattccaccccatgcccgactgcatctaaattccagggctgaggaggccttcggtgaggtcctggctccctccacccctctttctcctctgtgcctgcctccctattgtctccaccctctctctctccttctccaccccgtctctttccttggtccaaggcctgtctcccattgcttctggccctgccctccctgtctctccttctctcttcttcctccccactgctggcctcagcctcaccctccctctgcctggccagataggccccgccaccaccgtctggctgccacttactcctgggccacttttagaaacatgactcatggaaagagaagggaatggaagctgctgtgaggtcatgaaggccctccccatgcagctgcccccggaggacccctccccaggaagccccagcaccttccactatgctttgtggccgtcccaggggctaagtgcactcacacaggggagatggaccacatcagcaaaggctcacttgcaaagatgcccacttgaggccacttaggctgccttctcccaggcagggctggtgcacccaaacacttcccagctgggagacaaactacccagctcccatcctcaggatatgggagtgtctccaaggccatagagaattttgcaaaatccaaggtaggggggcacaccttggaggttttcccagccccaccctgaggccatcctacaagaacaattctcttcccgcctttgtctgcagccctgggttacagggaatgactcacatcccctcccctgccttgcagccccagctttgggcctttcctggcggaccccagggctacatcccttaggtccgccagccctctggccaatgcccagttccctttctgtcccaaggttgggccaaagaggcagaagccctgtgttcaggttctgactcttctactttctggcaccatgagcatggcctattccctctggtcttcagtcttcccatctgcaaaatggatctcattgtccgtgcctgctctccagagcagctgggaggttcaaaggccaaaggggccgtctcagggcttttggaaagagttgtcgacgcaggagggatggggcagtggtagtgactcttgttttggttcttctcattgtgtgtgcaggatctggggacaggcagaaggagtgacggcgggtggagctgctggcagaagcctgcccagagttaggacaggctgaatggggttgaggctggtgaggccagcccggctagtcctgatgcccacccacacttgcacctgtgaggcccctgtccctctgtatctgagccctcaggaagctcgtggctccttctattcctctctcttctgctctccagggttggcctaattgctagctggcagaagtcctgaaaccagcccttccccgatgattaatggagtcatcgctgtaagtggctcccgccttggagaaccctcccagccccatccctcacagatgtgaccagaaagagctcatctcctctggttcttaaccaggtgcgagagccccagcccctacccaaagacaacatgcttttcatgcaaagtgggcagagcagagggtgatagttccaggccctgtactctgagtccttgggaaggggaggggtcagccacctgccctgggaattctggaatgtgccttcgtgactgctgagaaccacatgggctgacagccttcctctccaatacccactaccactaccaccaggaagcctcccctgatagcttcaacatctactgacaaccttccttcaactatctaatacacttgcattatttacatctggaaacacttgataattcagaattggaaggggcactcaaaggcctgttgaaactcaatgtccaggaaagagcaggtaaaatacttcaaatgtacgttactgtttacaacccattaaatttgaaaacttgcttaaacaaggacagttcccattgtagtcacttgttttatatatatgtacatatatatttgcacatccccaggtagttttgcctggcccaggtcttattaaggcaaaaaaaaaaaaaaaaaagtaagaatcagaacaattctcaattctcaattctcaattgtcttcccgcttttgtctgcagccctgg

SEQ ID NO: 586147 - DNA, 4001 bp, Homo sapiens
agtcgtagatgagtacagccagggctcccccgatgaatggccccacccagaaaatctaggaacagagcaggtgtgttcagagggctccactcaaaagcccctgggaagcgttccctaggttaccccacagcccaccaccccgttggacaggtttttcccacctgggatggaggcaggtaggagagccaaatcctaacatcatgattccggtgcccctcagaaccggcccaggccagagtacgtggtagggtcaactccttgcctctgtggggcccagctcaggcatgggcagtagcagccccttcttgaggaaggccactgcccccacactcccagctttggaagggccccagagaccattgtctaatgcaaagctggcctagcacatccacatccacaaccataagagctaaaatccactgagcgcctcctctgtgttgagctcagtttacagatggggagtgagccctttcctcttctcggccaccctgagaggtgggcaccaccatatccccctccgcagctcaggaaaccaaagctcaagcacactgcgcaaggtcatgctaaacccgaaagtggctgagccaggatttggagccccacttttaaccacgcagctgggaagacctggaggccaggcagcatggggcagggccgagctgggagggcagagactaggcctgaaagtgctggcagtgtgacccccagcctgcctctacatggcaggcctcagtttcctgatttcctgtcctctggctgtctcccagagcctccagaacaggaagggacactgtgagggtggggtcaggcttaccatgggacaccaaagcttcccaccccaccccccgtgggtctcctacccagtggttgctgaagttgtgtgtgatcaccgcggagccaaaggaccgagcagggttaatcccacagccagtgtagtcaatctgtgagggaaagaaacagagggaggggcgaaggcagagagtcataggtgaagagagagtgagaggagggagaggttggagggagaaagagaacaatcagggtgggggacaatgagacccagggaaagaggagtgctgaccccaagctgggcaggaggtccctgtgctcctctccagggcaggaccctgcccccagcccccagcgctgacccgccatcctccacccaatggcaagagccctgtcgggagtcccactggctgcccatggcagggcaccccaccagcccccgccctcccttcccccacctccatctgggagggcccctgactcacagccaggaggtgtccaagggctacagagaggccgatggcaaggggggctgagccaccaaggtcacggcgcctccggtcggtagtagccagcacgcatagcaccagctggagggtcccgatgatctcgatgcccaggccctggcccgagttcacaccatcagccagctgcaggggagagaggtggtgaggactggtgaggagggtaggcagggactgtgtcccaggaccccaaggatacccaggcctcccaggcccaggcatgaagggcggaccctcagatgggccttcagagcccatcacagggtcccaggcaagcctacacggcaggtagtggaaatcaggccttgaacccaccccctgtgttaatgaaactccagcccagcccctaatacctgcctagacccaggccccactctgcctagaagctggagaggcctggggtgagctggggcctttgcatccagctgcatccaggccagggtattctggggtaccaagaccagaggcaaggggcgagccccaggcatgaaggtgatggtcaggagcactcctaggagaagagatgcaaaaaggtgggaaggcccagcaggggacacggcttcatacccaaaagtccagaacattccaccccatgcccgactgcatctaaattccagggctgaggaggccttcggtgaggtcctggctccctccacccctctttctcctctgtgcctgcctccctattgtctccaccctctctctctccttctccaccccgtctctttccttggtccaaggcctgtctcccattgcttctggccctgccctccctgtctctccttctctcttcttcctccccactgctggcctcagcctcaccctccctctgcctggccagataggccccgccaccaccgtctggctgccacttactcctgggccacttttagaaacatgactcatggaaagagaagggaatggaagctgctgtgaggtcatgaaggccctccccatgcagctgcccccggaggacccctccccaggaagccccagcaccttccactatgctttgtggccgtcccaggggctaagtgcactcacacaggggagatggaccacatcagcaaaggctcacttgcaaagatgcccacttgaggccacttaggctgccttctcccaggcagggctggtgcacccaaacacttcccagctgggagacaaactacccagctcccatcctcaggatatgggagtgtctccaaggccatagagaattttgcaaaatccaaggtaggggggcacaccttggaggttttcccagccccaccctgaggccatcctacaagaacaattctcttcccgcctttgtctgcagccctgggttacagggaatgactcacatcccctcccctgccttgcagccccagctttgggcctttcctggcggaccccagggctacatcccttaggtccgccagccctctggccaatgcccagttccctttctgtcccaaggttgggccaaagaggcagaagccctgtgttcaggttctgactcttctactttctggcaccatgagcatggcctattccctctggtcttcagtcttcccatctgcaaaatggatctcattgtccgtgcctgctctccagagcagctgggaggttcaaaggccaaaggggccgtctcagggcttttggaaagagttgtcgacgcaggagggatggggcagtggtagtgactcttgttttggttcttctcattgtgtgtgcaggatctggggacaggcagaaggagtgacggcgggtggagctgctggcagaagcctgcccagagttaggacaggctgaatggggttgaggctggtgaggccagcccggctagtcctgatgcccacccacacttgcacctgtgaggcccctgtccctctgtatctgagccctcaggaagctcgtggctccttctattcctctctcttctgctctccagggttggcctaattgctagctggcagaagtcctgaaaccagcccttccccgatgattaatggagtcatcgctgtaagtggctcccgccttggagaaccctcccagccccatccctcacagatgtgaccagaaagagctcatctcctctggttcttaaccaggtgcgagagccccagcccctacccaaagacaacatgcttttcatgcaaagtgggcagagcagagggtgatagttccaggccctgtactctgagtccttgggaaggggaggggtcagccacctgccctgggaattctggaatgtgccttcgtgactgctgagaaccacatgggctgacagccttcctctccaatacccactaccactaccaccaggaagcctcccctgatagcttcaacatctactgacaaccttccttcaactatctaatacacttgcattatttacatctggaaacacttgataattcagaattggaaggggcactcaaaggcctgttgaaactcaatgtccaggaaagagcaggtaaaatacttcaaatgtacgttactgtttacaacccattaaatttgaaaacttgcttaaacaaggacagttcccattgtagtcacttgttttatatatatgtacatatatatttgcacatccccaggtagttttgcctggcccaggtcttattaaggcaaaaaaaaaaaaaaaaaagtaagaatcagaacaattctcaattctcaattctcaattgtcttcccgctttt

SEQ ID NO: 586148 - DNA, 4001 bp, Homo sapiens
cgcggccacgtctaaactggctaaagtctaaactccagcccacggagctaatcttcaatcttgggcctagcagaggttggctgcagaggaggttgggtgaggtgtcaccgtgacacagaagtgctaagccccccatggccaggctgagccagctgccctctgcaccagaccttcacctagcctctcctgggctgccagccgcaggatctgaactttggctgggaagcgagaggacagctgctgtaatcactatctgccatctctgaggcgccctcagagatggcccacaccgtccccacacccacatgccctgcccacagccccgccagcctcatctctctagacgagtcctcctctctgctccttggcttctctccctccctgtaagggcacccccaggcctgctcacctgtcccttgggccctcagagacatcctccaagccttccccagtctctcaggccaaatcctcccctgctgtggcccaagcccggcctgagtttgcacttgtctgaggagctgggaaaggccgtgtctgggacagcaggcagctgccaccagggccaatttgccatgctaagcagcccaggagacattcttttccacagctgccacccagtcaccagcatctgcttgtcattagtgaccccagtccagaccccattcaagccaggagccatgggcacgtgttgcaaactcacccccacacacccttacacagcagcacaaacatgcacacagttgacacaagcacagagactcatgctggcaaacacatgcacacatacacaccttcacacacacacacgcacacgcacatgcacacacacgccacacctctcagtgcctagagaccatggagcccagcgcttgccccccagcccatactgtaatccaggaaaactgccttcaaacagccccagagagtgttttcactcccttatctttgtctaatctcaggggcaaaagagtggaagagggcctttctcttgattcctagaggtggtttatttggaaactagtgtgaatatggggggctccctgagggagtcctgctcacacacttgcagagccagctgcagacaggctgggcatttggttcagggtggctggggacagcgggcaaagtttccccagggtgcagggctgcaggaggagggagctggcggcacaggcaggactgagaagggccaaaaagctacagccaaggggcgaggaactgctggccaagcttattccccataatagatgccctgcaggggacattggcaagaccattattctctggatctcagcttcccacagtgcctggcagaaaacaggctttgggaggcatgcatagctgagttccagccccagctcttccccccagctctctacgtgacctccagcaacctcttgtcctctccgttcctcagtgtccccatctgcacaatgggcagaggatggaaccagtgcctttcagcatcattctagaacccccccaagcccagggacaccccactcacgtcattgcggccaagcgagttcccagtcagggaggaggtgatgcctgagaggatggcggtggcgacgatggcccccacgcactgggcgatgatgtacatgagggcacggaagatgctgatctggcagctgagcagcagccccagtgtgacagccgggttgaggtgggcgccgctgatgtggcccacactctgcgccagcgtggcgatgctcagcccgaaggccagcgacaccttcacgttgtcctggaccgccgtctggttgttccccaccgggtatttgaagcccagggcagaaccgatgctgatgaagacaaagagggtcgtggccaggaactcggccaccactgccctccagaagagcttcttcttgaactcgctggccatgctggcagggggcttggcctgagaccgctgccgggtgctcaattccctctgagagctgagccacagcctgggctgggcctatttatagggccggggggcggggggagcacaaagggaggaaggcctctcttcgctcctggcccgccccacaccacacagacctcctctggatggatgcagacacggctgtgctgtcggcctgccaactttttccttcctcctctccccctccctctctctctctctccctccgccctcagccctgcccagcccaaggaggcaggcaggaggcagccgttgctctaataggctttgggaaattcttccaagctggccccactcagggaaccagagaaatccaggtgtctcggccctgtgtgcaaagctcagggagttcctgagggcagagccaggtgctccggagtgggtggggtgggcgggctggactcagtgggtggacgttgccctccctggaggcaggtaccatgatcctgctggcctgacatccccatcccgacccagagaggcactggcctggagtccccgggcccagggctccagaggggcagtcaagtcctcccgcaccgccactgcatgccatgttagggatgtcccagagtccccagtcccccagagccagggctctgtggatgggggcacggaggcatcagaagttgcagagaggttgtctgtggctgccctgcatgctgcggttgagggcaggcccgagctaggcagagctgttagaaagcccccgccctgggagctcccaaacttctcgacagcgatttgaaccaatgatttgagggcaggctggtgaagatagggacagtttaggactttcctctcaaggcagtcacactggcgggtcactgggaaggtggaaggaatggcagccccacctggcattggaaggtgctggagaggagggagggagggagcaggagagaaaggcagagacagacagatgctggctgaggggaggagaagagacagacaaggagaaaggaaagacagtagcagggaaatagagcaaaagtggaagtgaaagagacagatcccccagccagagacagtgagacaagcagggctgagagagacagagagagcgcaaagggctaggaaaagacaaactgaaacaggggagataggactggacccagagccaagaagcagaaagggagagataaatgaggagaggcagagagcgggagggaccagacgagcccctgcagagggaggggccgaggccctgctgcagatccccgtgggccgcctgtgccccgggcatctccaatccagaggcctagcgccagccaacaaacaagaatctggactccagggccagcaagctgtcaggaacccctgggcctggccctcttgcctgctgcatggaacgtgctggaagaaccaggcccagaagggagggtccccctgcgtcccctagggaaggcctgggatgatctgggctctcctcccacctcctgcctgccccaccacagtcccactcgggcgtgttggcatcttcccatttataggtgggaaactgaggcccggtgagaggacttttctaagtgtgcctggggcagggcaaggatgagtgggtcttatgcctcttgtccaggggctatcctgcagagaatgacaccagctgttactggccacccctctgcccagctgtggcctggctcttggggtgaattgccagggaccagcctggtgtgtgtttgctggggctgcaggtggggaagattcattcccctaagtgcctgtacaggacggtggtggccagcaggccctgcctgctcagacagcccaggtggccgaaggtcataagtactttcttagctgtccaggagaggaaactggccccactgggctacttcctgggccctcctctacatcctttcctctgaggagccctggctcagcattccagtctctgggaggctccctcatgcccctggcccctggcccctggccccatgccctggcagggacactgacccacatgaggagctctctggtcagtttcaggggcgtccaaccagagctctctctgcagggctaggatcccctcaccttgaagttttggagggcaaactgtttc

SEQ ID NO: 586149 - DNA, 4001 bp, Homo sapiens
tttcaaaaaaaaaaaaagacaagacaatgcacagaaaaagtgaaaaagtcactcccatccaaaacagggtgagatacacaatgtgtctgtccacaaagaaaaacttatattcctggtcttcaatgcctgttgggggctccctgacttctataccactacagagatcactctgtccccaagctgagggctcagttcccagggctctgggtactcaccatcttctggagttcatcagcagattcttggacccgctcccggtcattactgtccaccacaaagatgaggccctgggcaggaaggaaggaagaaaggagaagcaatcacttctgcctgggacataccgtagtgtggccctttctgttttcttcccatttgtaattgtgtcaatccttctcatctagtaaactctacagaagtttacagaactctatagaagctctacaggagtcatggcacaaactagagaccccactgcaaagaggaagtagtttatccaaagatgtgcaaggaaataaagacatgttatgagggctaaatcaggcagcctggtcccagaatcctgcttctaaagagaagtccaagctggggaagactaaggtgagttctgaagagtgagtaggggatagccaaacagaaggggtagaagtggggaagggttttttccttggcctgggggcccagcctaggccaacaattctgttctcccagccctaacaccttttcccgtggggttagaaagtcccctcccaacactccacctgagtgttctggaagtagtgccgccacagaggccgaatcttgtcctggcctcccacgtcccagactgtgaaacagatgttcttatattccactgtttctacattgaagcctgcagataattggaaaaaaaagatgagaaaactcctgaaagaaaggaactcactaaaactacttagatttcagcagggacacaaaaccagaaggcaatgatcaaggcccaggggaacagaaccccagaactggcggtcaacagggcggggctaggtcacatccaccctgcctccggtatccacgtagagataccctgacccacttctcaaatagctgtatctggtgtcagggtcagctccagaaaagtggcagaactgggagcagaccccgcgagggcccgccgcggcgctcccgctccctgcttcgtccccgggctcacctatggttgggatggtggtgacaatctcccccaacttcagtttgtacaggattgtggtcttgccagccgcatccaagccaactgcaacggaaaggggcacagggatggagatgggagcgagggagccccctagagaccagggaaagggagaggccacaacagctgatggtgactggggcggagagcgggagcgcctccaggtgcgcgtcgttatctacctttgaggcctggagggcagtcgggtggcgtgagccaactccaaagagggcgcggagcgggagaggactgggaggcaaggggcacgggaggtaggccgcgctcgttttaaaagtcgtctccaagggcggaatcctcccttcttaccagccgggctggggcggagggagcttcaccccacccaggcccgcagctccgggtgtcaggccccggggtcggcgatgcagaccgggacccgcccgagagcagaggccccggggcgttatgaggtgggtgactcggggccagagacccaggtgagcggggctggagggacgcgggggcggaagggctgcgccggggccggcgccccggtccgggccgcgcgctcgatctgcctcacccatgagaatccgcatctgcttcttcccgaagatccgcgaaaagagcgcggacacggtgaggcccatggcggggcccggggaggggcgcgggcaccgacgcggggtgcgggctggaactggccggccgcggggggatggggcgcagcagcagcaggaggaggctccgccgccgcctccgcgcgtcgctgccctcccgacgtcaccgcgggcccgcccccgtccgggccccgcccccggctctcggccccgcctcccccggctctggctcctaggggagctgaagctccgcgagttgccgctgctggcctgggtcccgtgcggcccttacttgggaacgggtctaggtctctaacgcgcctgccaggcctgtggccgccgaaccggcagcccgagcgcggctgaggaaaggattcatcgctccgcagcggcccctgcccccattttcagtggccggccgctgggctttggtttgttgcgtccaggcccctaggggctccggttttagcccttgggaaccagtagcactgaacgtgtgcaccactctcctttggggagtggaagctgcgattaggggtcttggtcctccctttactgcctcatcttccaccgagggacttgcgcgtagtaggtggtcgtgtgaagagtgcgcgggaggtaggggaaggtgcccgagtgctagctagcttccatggttcctcaaaacgcctacttcctaattcccaatccgcagaaccagtgtaagattcccggccttgggcggcggggtcacagacccactcctgggctgttggagaagtccaccttcgtttggatcgccctgcgggccccgcctctcagtccaggcgctggccgctttgccgaagttcctcactttgccacagacttgtggacctggcttattcttgcacatccattcaggattttgtgaagatcttgactccgtagacccaaagagcttcacatgtcatttccctgcctcattttaacatctgagaggagaatagcaaaataggaatgaaattcttctgcggtggagactggctcattgccaggcattattaggcctaacaaatgcttgttcagttgaactggactgatagattctcaatggagcgagggtaggtgttatgtctactctggattcccagtgggcttctaggatcaattgtttatggactcgaggtaaactgagctgggaataaaaaaaccttcactcattcatttgctttttcagcagatatttactgagcacccaccacttgccagcacgtgatttcaggctttagttcaaatcttaattctgccatttcttgaggatttggcttcagcactcctcataactcttccgttatttcatcatctataaaatgagacttgttctaacttaaggggttatggtgaatcttaaaatgatttgataatgtgactgaatgttatgtataatacagcttgatgttatttgggccactgagaaacggggtctgaacagacctccagggcctgccccatcctgatctgcaaagtctgtaacaaggacagactttgggaaacaggtatgagtgagtgaatgactttccttttctcttcagtcatagacttgcatccctaagaaggcttttacgaggctgaagagtacattttagagagttccaatataataacagaactagtgttcaccaagttaggtcaattctacatttagctcttttatcagcctctttgcttccatctctgttgtcactaccttctgttccccatgactgaaagtctcctcacaggtttcctgccccttgttccctccaacatgtcatacaagtcttgatgacatcccacttttcagattaaaatccattagggccttactataacccaagataaaatttaaatgccataagttgggtccctacctattgtgccagcccctctgttgtcacctccttcacataccctaagctactgaatgctttctgggtgagtcaaactccgataccctacaggtctttgcatttttttccacctgcctggaatgctagtttccctgatctctggttaggtggacaatcacgactcatccttcaaatcccaaagtattattcccaagagccttccatgcctcacctagacaggcctctttcctcttaactttcataccactttgaatatacccagacatactggtgtgatagcaggacatatttgtatgtctggttcct

SEQ ID NO: 586150 - DNA, 4001 bp, Homo sapiens
tctaatgtctgaaaatgtcacaccaactgccttatagaccagatagtttatataagaacattattagtgtcaatgctgacttacactctacaatctcatctgtggtcctggtggcatccacacagataacattagtgtgagtgacgtgtttgtgtattaacatagaccttgagggtgactttgttccagtctaccttgcaggcactataagtgatcggctcctgcttactccacagacactgtgagtgacccagcccctgtctacactagagctgttggtcacctgtttgtctacaccactgacacttgagtaatgctgctcccgttgaacccaagaccctacgagtgactccattcctgtccataccacatagcgactgacctctccagacaccacaaatgacgtattcctgtctatcccacagacaccacgtgtaacgtggccacggaacctcagacagaccgcgttaagggcactgatacactctcaggacctctaatatatgaacactcttctctctattgagaatcactatattctgttgatgagagggattcctttgcactcctcctgatttctctctcctccccactaggaccatgacatacattcctcctgcatatcagtctcacccagaactgacacgccctcatcccatcttcccagctccccaggactccttcactagccatggcttcacttttaggcccacagattggttaacaaatgacacccattttgctaaggcctatgccaggaacttcttcatgctccaaatgtggataaaacaagacgtctgagacagaggccacatcaagagctttttagctggagctgggacctctggattaggcccaagatgcaaggccagacagtggagtgcagtaggggagcaagctagggaggaagctcgaaaggaaaaccaccctctctcatctgtttgacacacccttctctctcaaccagacaagagtcctggccagagttcacttctaggtagacaggagggcaaatctgtctttggaacccaagatccaggaagggaagaaagggactgagatctggaaatgacgtagtatcacaactggctctcctccggtagtcttgccggaaggcaactgcaaaagatgctcaggggttctagagctctgcgtccgcattctagcaccccaacgcctacctcagcccccaactctaaataacttctttccaccttgctaagaatgcaacgttgtgattcacatcaagctttaggaggctccccatatgtagggaactggggtgaggggcagggcaggattcactgttccaggttacggagctttggttaacacggagagaagctacacatagactcacacagtatgcaaatacctatggagatacataaggaaaggccccggcctggttaaggaaaaggagccgataaaacctctccaggtaaggaacagcctagaaagggaatctcagttattccttctgatatggcttagctttccccagggcgcctactttgaagaaagagccctgattattggcccggggaacgtctgggggcagggtgcccatttcctaggcgggacccgaccggaagcaaacttgtaggcaacaacatttcctctagttcctctcctcttccccaccagggtcctcagccacacaccccgagccctgcctgcgggcccagcccccccatttccggagcctgcgccccggacccagcgggggctgatccctgggaaaggcctggcttcctcttccttcctgtccctgccccacctccgccgggctccacagccgccgggagcccagggccgagacgggaggagggcacccacctggtcggtgtcacatgctgcttcggccccagcgtcccctccaggtcccggcgccggccgcagtccccagagccgtccccagcgcaggcccggccgccccacccgcggcccgcccctggccgcccgacgggagggagggatcgggttctcctaggaagtttcaggtgaggaaacagggacacaccttcccggaggaggggcagggcccctccgcgcgcgagccccattggtgtgaaagaagctcccgcgtcagagctgggaagtgccgggccggcggagaggggagcccgggcgcacgggccaggccgcgggctgtcccagggagccccgagggcgcggtgcgcgggcgcaggtcgggcgcaggcggggtgacccggggaaggggcgcgcacagagacagagggagccagccgggccccacggtgtcctcggacgcctccgaaatctccctgcgtgtttgtttcttcggagcttcaccggagcctgactctggaaccggcctgtctgcctgctgcagtctgtatgtgtttgtcttttgccttggccgtgcctctggaagtctgacatccgtggttgtacatgtgtctttatcttcaggcctcattggtttttggtttgttcgttgttgttgttgttgttgttttttctgagacggagtctcgccctgttgcccaggctggagtgcaatggcgcgatctcggctcactgcaacctccgtctccgggttcaagagattctcctgcctcagcctcccgagtagctgggattacaggtccgcgccaccatgcccggctaatttttgtattttttagtagaggccgggtttcgccatgttggccaggctggtctggaaactcctgacctcaggtgatgcacccgcctcggcctcccaaagtgctgggattacaggcgtgagccaccgcgcccggccaaggcctcagtgttgatttctcttccgtgatgtctcctcctatagaataaagagtgtctcctccatctcctcctccgcccccttcttcgtttctctctctctctccctccctcctcccccctccctgtccctctccctgcctcttcctctcccctcttccttctcctacttagggcctagaagtgtgcctctctgaaaggacatgcccgtgtccttctgtattcccgagtttattttagaatgagtgcgtatctcagggtgtatgttccttctagggcctgtgtgtgtgtgtgtgtgtgtgtgtgtgtgtgtgtgtatttaaatctctaagcccatgtttgtgtgttttcttatgcctgtattttttttttattctttcagggaaacgttttgttctgttagtcttggaggccaaggctgagtgggtttatctctgtgcccctccagtgacttcaaagaatgccaaaagtctctcgagtgtgcctgtgtgcacacacagacacacacaaagtaggaatcctttacctgggggacagagatttctgttatttttggttgaatctgaccactccccaaagccattcactactccaggggtttccatggtgacataagtcaagtgaaatattaatggactccttgcctatttagctcttaggaatgccatggtctacagcccaaacagcttggctagaccatttctagatcactgtgcccattggctgttgccaatgatcctggttgaacgtgttcactagttattttgaggtggctgtagaatagaatgtaattaaggaagtatagcctcttctgtaatagagtcctgaacagctttatgttaaaaaagtgtgctacttctgccatgttactctgaaggattaagtcttaaacagttcagcagttttcagcctactctaagctgccatggagtgtatgggaaactataggaaaaattgggattaagactcaaaaatctggattaagaagggcaggccttgcatgtgtcctaggctcagcaaaagggtaagaactgggagtacagaaaggcaaaaagttcaaactgggactggctctacttctaggctggaatacaaaactcattcccaggtatgagagggtccttgatttataccgagtgagcaaagtgagtaaacttctgatctagggcagaagctgttgacctctgggtcgggtgcggtggctcacaactgcaatcccagcacattgggag

SEQ ID NO: 586151 - DNA, 4001 bp, Homo sapiens
cattgcaggaaagtcccaccatgccagtgaaagctgtaatacacatttatctattctctaatgtctgaaaatgtcacaccaactgccttatagaccagatagtttatataagaacattattagtgtcaatgctgacttacactctacaatctcatctgtggtcctggtggcatacacacagataacattagtgtgagtgacgtgtttgtgtattaacacagaccttgagggtgactttgttccagtctaccttgcaggcactataagtgatcggctcctgcttactccacagacactgtgagtgacccagcccctgtctacactagagctgttggtcacctgtttgtctacaccactgacacttgagtaatgctgctcccgttgaacccaagaccctacgagtgactccattcctgtccataccacatagcgactgacctctccagacaccacaaatgacgtattcctgtctatcccacagacaccacgtgtaacgtggccacggaacctcagacagaccgcgttaagggcactgatacactctcaggacctctaatatatgaacactcttctctctattgagaatcactatattctgttgatgagagggattcctttgcactcctcctgatttctctctcctccccactaggaccatgacatacattcctcctgcatatcagtctcacccagaactgacacgccctcatcccatcttcccagctccccaggactccttcactagccatggcttcacttttaggcccacagattggttaacaaatgacacccattttgctaaggcctatgccaggaacttcttcatgctccaaatgtggataaaacaagacgtctgagacagaggccacatcaagagctttttagctggagctgggacctctggattaggcccaagatgcaaggccagacagtggagtgcagtaggggagcaagctagggaggaagctcgaaaggaaaaccaccctctctcatctgtttgacacacccttctctctcaaccagacaagagtcctggccagagttcacttctaggtagacaggagggcaaatctgtctttggaacccaagatccaggaagggaagaaagggactgagatctggaaatgacgtagtatcacaactggctctcctccggtagtcttgccggaaggcaactgcaaaagatgctcaggggttctagagctctgcgtccgcattctagcaccccaacgcctacctcagcccccaactctaaataacttctttccaccttgctaagaatgcaacgttgtgattcacatcaagctttaggaggctccccatatgtagggaactggggtgaggggcagggcaggattcactgttccaggttacggagctttggttaacacggagagaagctacacatagactcacacagtatgcaaatacctatggagatacataaggaaaggccccggcctggttaaggaaaaggagccgataaaacctctccaggtaaggaacagcctagaaagggaatctcagttattccttctgatatggcttagctttccccagggcgcctactttgaagaaagagccctgattattggcccggggaacgtctgggggcagggtgcccatttcctaggcgggacccgaccggaagcaaacttgtaggcaacaacatttcctctagttcctctcctcttccccaccagggtcctcagccacacaccccgagccctgcctgcgggcccagcccccccatttccggagcctgcgccccggacccagcgggggctgatccctgggaaaggcctggcttcctcttccttcctgtccctgccccacctccgccgggctccacagccgccgggagcccagggccgagacgggaggagggcacccacctggtcggtgtcacatgctgcttcggccccagcgtcccctccaggtcccggcgccggccgcagtccccagagccgtccccagcgcaggcccggccgccccacccgcggcccgcccctggccgcccgacgggagggagggatcgggttctcctaggaagtttcaggtgaggaaacagggacacaccttcccggaggaggggcagggcccctccgcgcgcgagccccattggtgtgaaagaagctcccgcgtcagagctgggaagtgccgggccggcggggaggggagcccgggcgcacgggccaggccgcgggctgtcccagggagccccgagggcgcggtgcgcgggcgcaggtcgggcgcaggcggggtgacccggggaaggggcgcgcacagagacagagggagccagccgggccccacggtgtcctcggacgcctccgaaatctccctgcgtgtttgtttcttcggagcttcaccggagcctgactctggaaccggcctgtctgcctgctgcagtctgtatgtgtttgtcttttgccttggccgtgcctctggaagtctgacatccgtggttgtacatgtgtctttatcttcaggcctcattggtttttggtttgttcgttgttgttgttgttgttgttgatgttgttgttgttgttgttgttgttgttgtttctgagacggagtctcgccctgttgcccaggctggagtgcaatggcgcgatctcggctcactgcaacctccgtctccgggttcaagagattctcctgcctcagcctcccgagtagctgggattacaggtccgcgccaccatgcccggctaatttttgtattttttagtagaggccgggtttcgccatgttggccaggctggtctggaaactcctgacctcaggtgatgcacccgcctcggcctcccaaagtgctgggattacaggcgtgagccaccgcgcccggccaaggcctcagtgttgatttctcttccgtgatgtctcctcctatagaataaagagtgtctcctccatctcctcctccgcccccttcttcgtttctctctctctctccctccctcctcccccctccctgtccctctccctgcctcttcctctcccctcttccttctcctacttagggcctagaagtgtgcctctctgaaaggacatgcccgtgtccttctgtattcccgagtttattttagaatgagtgcgtatctcagggtgtatgttccttctagggcctgtgtgtgtgtgtgtgtgtgtgtgtgtgtgtgtgtatttaaatctctaagcccatgtttgtgtgttttcttatgcctgtatttttttttttattctttcagggaaacgttgtgttctgttagtcttggaggccaaggctgagtgggtttatctctgtgcccctccagtgacttcaaagaatgccaaaagtctctcgagtgtgcctgtgtgcacacacagacacacacaaagtaggaatcctttacctgggggacagagatttctgttatttttggttgaatctgaccactccccaaagccattcactactccaggggtttccatggtgacataagtcaagtgaaatattaatggactccttgcctattttgctcttaggaatgccatggtctacagcccaaacagcttggctagaccatttccagatcactgtgcccattggctgttgccaatgatcctggttgaacgtgttcactagttattttgaggtggctgtagaatagaatgtaattaaggaagtatagcctcttctgtaatagagtcctgaacagctttatgttaaaaaagtgtgctacttctgccatgttactctgaaggattaagtcttaaacagttcagcagttttcagcctactctaagctgccatggagtgtatgggaaactataggaaaaattgggattaagactcaaaaatctggattaagaagggcaggccttgcatgtgtcctaggctcagcaaaagggtaagaactgggagtacagaaaggcaaaaagttcaaactgggactggctctacttctaggctggaatacaaaactcattcccaggtatgagagggtccttgatttataccgagtgagcaaagt

SEQ ID NO: 586152 - DNA, 4001 bp, Homo sapiens
ttttcttcttttaatgatcatatcatgtagtttctcaagtccttcctttaggccatctcctatgattgcacaggtaggctgcaaatgccaaggagttgatgagctcagttcacccattgctaacaatttctcaatttctgaaagtgacaatgagttcctcaaatcttgtttgttagcaactataagtacagggactccctgattttctgatatcctagttattttgtgaagttcagttttggcttcttccatcctttcgacatcaacagagtccacaacaaatacaatgccatctgtgcatctggtatatgacttccacagtggccttaatttctcctgaccacctacatcccagaagtgaaaagtgactgttttagaatttcccaaggttaccttaattttctcagtgttaaatcctttggtaggtacggtatttacaaattcattgaactgcagcctgtataagacagttgtctttccagcacagtccaaacccagaataacaatgtggaaagactgaaatgaaggcaggttggacaggatagaagtctggtctgacagcccattccccatttccaggtgcaaataaatgtcccaaattgaaatgcttttctcttcttggtttacaacttctcttggtagctgatccagctataagactgctgggagacggaagaaggaataagttattctcccgaaataatacattaaaacaggtttgctctactttgctaaaataaacaacacgaagaacttactataacttgctgcgctaaacaaaccagacgagatatgaaacgtacatgaaaacacacacagtccaagacaaacgatggaataacagtgattgaaattatctggtttacttaaattgcagtaatatgtacgtttttctcctgggtccccaaacctcaaagacctcattctggaaagaacccagtcaccagtatctggtctaagtggccgtaaccacaaagtgcctatctggcagaaaactcatagcagatagtcctatcttcggaatctaattccacatgcttaacagcatacccaagatcactattacctcctaccccttgcaaaataacaacgttctcacctcccgatctggagtctgggtccaaatgagaaagcattggcaggcgtttctacgcagggataagcacccttccagcttagctctccaagcagctctggcagttgccgcacgagaaaccttggactcagactccgaccacgcccactcctcccggtccactcatgatcccaaatcccattggtcacccgcatcagggaagccatgcaactcccgcccccgctccctaattggtgagggtaactgccgctcccagcgcggcggagctgagctctctctcggtccaccggcaccacctgttgcccttaagttagaaaaggcggcgttcccagagggagccgagcagccgctgcaggtgaaggggagcctcgggcggtcaggtcgccgccaggctgccggctccgttcggcccggcgcacctgcagcgcagccagggcgtcaagccaaggctctcacatccggggcccgcagtcactgccaacgcgttaaccctttgtccgcgggcccgagggtgccggctgttgccgcgcgggcccctgaggcgctagagatcccacctggcgcgcccgccgggataagcccatcctccccgaagtgggatcccttcaccctgtccctccgcacacgaccggctcttctccctcggcagggcgtggccgccccggccgcccaccccgccgcggctcacctgactaaccgtccttccctcttcttcattcagcgtctctcccagccgctggggaggcgcgctgatacctgttccctggcaccagggaggcgtgggcgatggcagaggactgggcgcctggcgggcgccgcgcgccaggctgccctaacggtgctcgcccggcagctccacgcgacagtccccgccccctgcccgcgcgccgcccgggcgccggcctgtagggggcgcgcaggagccgcgtctcctagcaacgccaaaacaaggtcgagttcgaatcggcctagcgctggctgcccgcgaggtcggatgggacttccggcctcacccctgaacggttgctccgggtagctctgtctgcggcggcccgccagcctggcacaggccccgcccggcaccgccttccctcacgtcgtctagggcgtccgcggggcagcagccacgtgattcgcggttagggattccatagttcacgggttacggcacacacgcgttacgtatatatcgaggtgacgtggaagtcccccagtagttgaccttaaacagcctgggttgactggcctggtaactgcgccttcattcgctttttgtagagcaaatgaacgcgctgtctcacgtgtttctagcagcatcccggggaactggccacagatagaaatattccagtttgacacataaggaaatacactctgaaagatgaaagggatgtttctttttttcttttctttcaaattgctcacacaattttaattgcaatagatataatttccaatataccattcaactacaccatttgtatgtgctggagtgagacaggagtattttgattgagtgtccagttctctttaaaactagcgtttgcagttaacgacttggaaaatacaacacaaaaagccatctagccttttttttttttttaatctctatttatcccttcaaaattccctttgtggccatatacatactaggtggctctacctgcagaaagctgcattttccaagcagcgggagagtttaattcttaactttcctgtactccagcctctgctggctcccttgcatttttgtttccatcctcttctttgtcttctgtgcctttcgttctaggttaatctgcgcaagctcttcacttttgtctgaatgtattttagcggtgaattactccttctggctaagagcttcacatcttcagtgttaatggtggtggttttcgcatgtcttgcacacatttctagatcttgcactgtcgaaaagtcagctccgaaattgctgcaatgataagtttgctgaactgcatctctgcccaatgccacttcctcgcaaagacaacccacagtgtagtccactgctgcctcctttggcctctgttggtaagaaaatggctaagaaaatcgctgctgctcctccacctccacctcctcctccatcagaacggcgaggcaaacgcgcagaacagaaaggggctgtggggcagcggccagattggattttctctccgcagccccaaagggatgtttctaatgacccaaggaaaattagtggtggtcctggaactgttcatctaagtctactagtcatcaaatgcaaaatgcttttcattggatgattctgactaaattttgtctttgatcaataagttcacaaatatttattgaacacctaataggcagtagacacaattctgtgtgcttggggataaaatggtgagcaaaatacactgtccctgcccttgtggaatattggagtctctatggatgactaaatttataaaatgttttcagcggtaatttcagggtgcttatgacaacctgcaaaagaagtaatgacttgaagttgtaggaaagctttaatcgacaaacatctttttggtgaaggctgtaagactgtaacttggaagaacctatatggtacacttttttaaaagtgtgctttttttctttttaaatatggattggagtttcctcaagaaatatcctagtttttctcaagaccgctattgccagtgatatttatttcttttatgactagcacaggaacatgcatacttgtcataccggattctttaaaaagtcgagaccaacctggccaacgtggggaaaccccatctctacgaaaaacacaaaaaattagccaggcgtggtggcgggcgcctgtaatcacagctactcaggagactgaagcaggagaatcgctcgagcccgggaggcggaggttgccgag

SEQ ID NO: 586153 - DNA, 4001 bp, Homo sapiens
atctaccttaacatttccatcgattagcacttgatcgttacaaagccttgtatgcaattttcttgcaaaggcttccccccgaaagatgtaagcacaaaacactaggcagacactctttaaagttttatttcactaacttcagaccaaattcccacaactgtgttctggtcaatttactatccttgcttggcttccccaaatggtagtaccaaaagatttgtggggtagggagaagagaccactttaagaagcactgcatttactcatcttccacaaggcaacagagttgggcatctgattgttcaacaaaacaaagctttaatagcatccaggagggcagacaggcaaaccacgctgtagacactcttctatttgtcaaaatcagaccagagaaaacctactccacacagatataataggtattgatattcatcttttctttttctgttgccgcaacatttttcttcttttaatgatcatatcatgtagtttctcaagtccttcctttaggccatctcctatgattgcacaggtaggctgcaaatgccaaggagttgatgagctcagttcacccattgctaacaatttctcaatttctgaaagtgacaatgagttcctcaaatcttgtttgttagcaactataagtacagggactccctgattttctgatatcctagttattttgtgaagttcagttttggcttcttccatcctttcgacatcaacagagtccacaacaaatacaatgccatctgtgcatctggtatatgacttccacagtggccttaatttctcctgaccacctacatcccagaagtgaaaagtgactgttttagaatttcccaaggttaccttaattttctcagtgttaaatcctttggtaggtacggtatttacaaattcattgaactgcagcctgtataagacagttgtctttccagcacagtccaaacccagaataacaatgtggaaagactgaaatgaaggcaggttggacaggatagaagtctggtctgacagcccattccccatttccaggtgcaaataaatgtcccaaattgaaatgcttttctcttcttggtttacaacttctcttggtagctgatccagctataagactgctgggagacggaagaaggaataagttattctcccgaaataatacattaaaacaggtttgctctactttgctaaaataaacaacacgaagaacttactataacttgctgcgctaaacaaaccagacgagatatgaaacgtacatgaaaacacacacagtccaagacaaacgatggaataacagtgattgaaattatctggtttacttaaattgcagtaatatgtacgtttttctcctgggtccccaaacctcaaagacctcattctggaaagaacccagtcaccagtatctggtctaagtggccgtaaccacaaagtgcctatctggcagaaaactcatagcagatagtcctatcttcggaatctaattccacatgcttaacagcatacccaagatcactattacctcctaccccttgcaaaataacaacgttctcacctcccgatctggagtctgggtccaaatgagaaagcattggcaggcgtttctacgcagggataagcacccttccagcttagctctccaagcagctctggcagttgccgcacgagaaaccttggactcagactccgaccacgcccactcctcccggtccactcatgatcccaaatcccattggtcacccgcatcagggaagccatgcaactcccgcccccgctccctaattggtgagggtaactgccgctcccagcgcggcggagctgagctctctctcggtccaccggcaccacctgttgcccttaagttagaaaaggcggcgttcccagagggagccgagcagccgctgcaggtgaaggggagcctcgggcggtcaggtcgccgccaggctgccggctccgttcggcccggcgcacctgcagcgcagccagggcgtcaagccaaggctctcacatccggggcccgcagtcactgccaacgcgttaaccctttgtccgcgggcccgagggtgccggctgttgccgcgcgggcccctgaggcgctagagatcccacctggcgcgcccgccgggataagcccatcctccccgaagtgggatcccttcaccctgtccctccgcacacgaccggctcttctccctcggcagggcgtggccgccccggccgcccaccccgccgcggctcacctgactaaccgtccttccctcttcttcattcagcgtctctcccagccgctggggaggcgcgctgatacctgttccctggcaccagggaggcgtgggcgatggcagaggactgggcgcctggcgggcgccgcgcgccaggctgccctaacggtgctcgcccggcagctccacgcgacagtccccgccccctgcccgcgcgccgcccgggcgccggcctgtagggggcgcgcaggagccgcgtctcctagcaacgccaaaacaaggtcgagttcgaatcggcctagcgctggctgcccgcgaggtcggatgggacttccggcctcacccctgaacggttgctccgggtagctctgtctgcggcggcccgccagcctggcacaggccccgcccggcaccgccttccctcacgtcgtctagggcgtccgcggggcagcagccacgtgattcgcggttagggattccatagttcacgggttacggcacacacgcgttacgtatatatcgaggtgacgtggaagtcccccagtagttgaccttaaacagcctgggttgactggcctggtaactgcgccttcattcgctttttgtagagcaaatgaacgcgctgtctcacgtgtttctagcagcatcccggggaactggccacagatagaaatattccagtttgacacataaggaaatacactctgaaagatgaaagggatgtttctttttttcttttctttcaaattgctcacacaattttaattgcaatagatataatttccaatataccattcaactacaccatttgtatgtgctggagtgagacaggagtattttgattgagtgtccagttctctttaaaactagcgtttgcagttaacgacttggaaaatacaacacaaaaagccatctagccttttttttttttttaatctctatttatcccttcaaaattccctttgtggccatatacatactaggtggctctacctgcagaaagctgcattttccaagcagcgggagagtttaattcttaactttcctgtactccagcctctgctggctcccttgcatttttgtttccatcctcttctttgtcttctgtgcctttcgttctaggttaatctgcgcaagctcttcacttttgtctgaatgtattttagcggtgaattactccttctggctaagagcttcacatcttcagtgttaatggtggtggttttcgcatgtcttgcacacatttctagatcttgcactgtcgaaaagtcagctccgaaattgctgcaatgataagtttgctgaactgcatctctgcccaatgccacttcctcgcaaagacaacccacagtgtagtccactgctgcctcctttggcctctgttggtaagaaaatggctaagaaaatcgctgctgctcctccacctccacctcctcctccatcagaacggcgaggcaaacgcgcagaacagaaaggggctgtggggcagcggccagattggattttctctccgcagccccaaagggatgtttctaatgacccaaggaaaattagtggtggtcctggaactgttcatctaagtctactagtcatcaaatgcaaaatgcttttcattggatgattctgactaaattttgtctttgatcaataagttcacaaatatttattgaacacctaataggcagtagacacaattctgtgtgcttggggataaaatggtgagcaaaatacactgtccctgcccttgtggaatattggagtctctatggatgacta

SEQ ID NO: 586154 - DNA, 4001 bp, Homo sapiens
gcttctttgatacaaatgtaaatctttttgtttgttttttgttttttgagacagaatcttgctctgtcgcacaagctggagtgcaatggtgcaatcttggcacactgcaacctctgcctcctgggttcaagtgattctcctgcctcagcctcctgagtagctgggattacaggcacccaccgccaagcccggctaatttttgtatttttagtagagatggggcttccccatgttggtcaagctggtcttgaactcctgaccacatgatccgcctgccttggcctcccagagtgctgggattacaggtgtgagccaccacacccagcctgtaaatctttttaaaagtgaaataagcatttggccagttttacagcccaagaaagactttcttaaaagctttggagcctactgttcgaaagcgtactctttgaaacctactcttccaggaagatagatccccaatctccccaactctgtgagtttttagcctgggcacctggttccacatcataaagatatttttatttttcctctggataaaggcaattagataacaaccaccccaattaccagtaaattcaggataaactacatgtagcaaatggtactgtcaagtcctcttacctaaggacaaattattttttatcttgagaacacgtatgtaatatgaaatcggttctatctgtccagctacatttaaaggaattagaattcttcctgctatcccattagcaaattgcccgtgatgtgtgaggcaatttagtttgtgcttattcaacaatgaagctgtttagctctcttctacaattgtggacaggagtttcttggatggcagatatgatattttaaattatttccctaacagcttccatgatgtgaaacatgcctttggagggttttaatgtaccgatcaacttttggacagaaaccgaatcatgcatttgtccgctgggagggtgtgtctcgcgcagacaactgttcccatttccaaaacacacaccaggctgcgaggtcttggaccactgtgactcccaggtacctcccgtctgaggccgggccgagcgcccgcacaactgaccctctgacgtcccttcttccagggcacctgcaagcagagattgacctatggctctgggcccctcaacagcccttccacaatcgggagaatccctttagttacacaaaggcccggagcaagctttaaaatgagaggccatcaacaggtttttaagaaatctaatcctccgctgtgacgcggagctcaggcaggaaagccagggcaagttttcataccagtatagtcagcaaaggggcggcgggggcggcgcagcaccctgcactcacacaagtactgcctctccctctagctcggctcctcattttaccccgagcacacgcaagccaccaccccggcctggggagcccccctgcccagtccccgcccacctgccggaaaccccggggtcccacctgcggacttcgaagagcgtatcccgagctcgcggtcgccccgccgccgaccccgggtcagcctgtaaatgcagtagcaggcgcccgcgccgagcagcaggcccgccgccacccagcccgcgccccgggggccacccatgctgccgccgcggcagagccgcagcgccgggccagggcaggaggctcgcgggggccagcgcggaggtctccagcgcacgcgggcctagccgccacagcaaacgccacctgacctggatgtggagaaaggaaatggggtctgagctccgcctcccggaaacggcctagctcaaagcctataaccgcccactccagcccggcgcgtcccggcggcttctcccaggcgaggcggggcggtgcggggcgctgcacaccgggaggggggggtcggacggtgcgccccacgcggagacgccggggcccgcaacccagagccgagcttcccgtctcttcccccggggcgtgaagcaaccattcctccctcccgcccctggcagcggagcgcggggcggtgccacgcccagccccgccccctggttgccgggacaacgcccgcacgcgcccggcccctagtcccagcgcggggagggtactatcgcagcttctccgtcaggccttgggccatggcctcgctacgcaatgccaacccgaggctgaagaactacttcaaggagaactacattcctcaggtctgcgaggtactggacacgcgtggcagcggacacagaccgtcggtggggagttagaagggggaggagtcaggaaagacttcccggaggagggactaggtttcgggattggggaggagtggagggaaggcggggcagaatgcgagaaagtgaagtcaaattcggacttgtaggcgatcagggctgaagacgctgattagagagaaaacagagggtgatggtggctgcacgtggggaatgggtgacatctcccagggggaatgagcacaaggcccagatcggaaaccccaaactcagattttaaggtttggacaagaagtacctgaggagtggaggagtgagaaagaagtgccagagagcctgaggaggaaaatcagcagactggcattatgaagaatgttgtcagaagtagggagtaggcactagtcacctaagataaggagctggattctgcccaaggtgagcctgaggtttccatggagccgtgagggcagaaaatagatggaggttagcggagggaagagtggaagctgagacctttggtcagtgtagtcagccctttgtgaaggtaaggaccctctcaaccaggattgcctttagacaacaggaaggactgccctcctactgccgttataagagtagggaaggaagacaggaaggggatagacattaggttttgtaggtttgggggtaggaagctgagaacatttgcctttgttgacctctttttttctctacaaatagttggtgagatatttaccaagaatgtgcgtgtttgagtggggatggggatgttggtgcagtaggaggttcgagcaaagatacgttatgtggagaatgagggagagagatgtctagggaaagaaagaggaggtcctacctgagggtagtaacgctcctaggcggttgggagggcaatttggtagagaccccccacccgtctcttttttggatggtaattgagaaatatttattaagatgttaaatacatgtaccctttaaccaagcatttctacttctagggatctactttagagaaatacttgcacatgtgttcaggaggatgtacaaggatattcattataactttgtttcatagtaaaaatagtaaatgacctagagtgactaagcgaatgaggcattatgtagaataaagtatatctgtacctactaagaagaaatgtcctccaagacatattattattatcatcattattattgagacacggggtgttggtctgccacccaggctagggtgtagtggctccatcctagctcactgcagcctcaaactcctgggctcaattgatcctcccacctcatcctcccaagtagctaggactacaggcatacaccacatggctggctcccaacacatattattaagtaaaaaagaaaaagtgcaagttgcttagcaactgtccattctgctctagctgtccatttgatttcatatatgttgtatatgtgtttatgtacatatatgtgtatatatctagctttaagacaatagtgcatgcatagaacctatgccaaactgttaataacagatgtcttgtggaatggttttgggggaaaagatggagaattctaactttttactctgtccatagctgtattgttttaatttattacagtgagttttgtgttgtacctctatacaattgtgcttgaaaatatgtagggagaatggtacccatcttcccggttgtgtgattttctcaagtagcagtcagtaaatcagatgtaggtacagagataaccaagttgacttcgtctgggataggaatttgccaggcatatattaatagaatggaaaggcag

SEQ ID NO: 586155 - DNA, 4001 bp, Homo sapiens
tactccaacaaggtcaccacaccctcctcaacattcagacaggctccagtccaggcaccagcctcaccagcagaccattttaaacttctttatataggatttgtttcagcattggatgagacaactagatcaaagtatcaccactccgcgtccaaaataggagttttccgaaatggtcccttcctttaactgtgattaacagatgaactccagaagatctctgaatactttgtgggagaaaatagccatataagctgggtgtggtgtctcacacccaaaatcccagcactttgggaggtcgaggtgggaggatagcttgagcttaggagctccagaccagcttgggccacatatggagaccctgtctttacaaaaaatacaaaaaaaaaaaaaaaattagccaggcgcagtggctcatgcctgtagtcacagctactcgggaggctgaggcaggagaatcgcttgaacccaggaggtggaggttgcagtgagccaagatcacaccactgcactccagtctgggtgacagagtgagactctatctccaaaaataagtaaataaaaataaatgaaaattagcccagtgtggtggcacacgcctgtagtcccagctactcaggaggctgaggtgggaggatctgttaagcccaggaggtcgaggctgcaggaaaaaaaaaaaaaaggaagacaacaaccacagttacccactccctaacaggacaaaaacaccttcctgactgatgcccctcctctgtttttagatacctgaaaacccaggccctatgtgaaaccacaagactagataaaattgaggagagagggcagaactaagataatctcggcaatttaagctacgagttgacatagacagaaggttccaaagctgcaggagaacagatggctttataatcaaagattctaagctataactgattaagtgcctatcatgttcccagcagtgttgtaaataccgggatggggctagaaacataaataaggctgacaccattctggtcttcaagtctggagggttggtgtttggggagagtggaggagatagaaaaggaaaggaagacggatatgcatagaatgcccagaagcagtaataatagctaatatttattgatcacctactctcggccaggaactattctaagcaatttatgcaaataagctcacttgattcttagcaaaacggtaagaatctttttattgcagatgaggaaacaggcgcagagaagcatcttcccaggatcactcaacaaagtggtggtgccaggactggcataaaagattccactaaatgaataagagcgccgagaagggtgcaattttgacttgggggaaggcggtactcatgcagggaaatcttaaaagaactcgggagaaggtttttctcgagatcgagaaggttccccattaaccgaaggattgagggctgccctagagagcaggcaaacatcctatgggcgcctactgtatgcagggatcgactctagacactaaagagatgaatagtcccgcgggtcgctcgattacgggagatcctcctacttgacacaattttagagacggtgacaaatgcccccagcagaggtgcaagtaggaccctgggggcgcagaaggggccgttaattcgggcatcggaggcggctaggagctcgaacatcctgagaaaagctgcaggggatccacggagaaaggggatccccgccccctcaggaggccccggcagggagacccggccgcgcctcagcctcggggccccgcggcctgagcccccgtctcactgcccccgcggcaagtccggcgccaggcctggacaagagaggccgacagggtgagacgctcgcccctgctggccgttacctgggatcgggggagtccggacgggctcggagcggaggattcgcggactctgggcagtcgacgcgaacaggctccgtcgggcgcgggcggaggacggaagcccagagggagcggctgacagatcccggaagtggacacggcgcctgcgcgttgcgaccgcgcggacggtccgcgcatgcgcacagctcgggcgcgcagtccggggttaggcaggctgcagtggaggagggtacgccgttccattggcgtggtactgtcggcggcccttcagaggagatgctgccccacggaacgcctggcaagtgctggcgaagcggcatgggcgtcccactccgttcctcaaccaatttcctcacaatcgcgagccgaagtgtggcgctttggcagtttcgcaaggtcttttgtcaggagatgagttactgaggattgggggtctttggagctcttggacctgaagaacgattaagtttttctcccttcagagagccaaggtcagagccagtctacctcagcgctgctccctgcagggagcctccgcccccgccgtgctccctctgtggaaagcccctgaagccccccaggaactttctcgacccttcctgggacagaatcccctgctcccaagcagttccctgctcccaagatggcgcagcagggataaaagggttgggggaacttggcaaggcccccaattcacagaggacagagcctgccccgcagatgcagcctccaagaaatgccctgatccccacctgcaatcaggctgctgcccttgaaccctagaaattctggagcatccccagcccccacagatggggctaatcgagagcttttcttttttctttttttttagacaggttctcaacctgtagcccaggctggagtgcagtggcgcgatcatagctaactgcagcctggaacccctgggctcaagcgatcctcccgcctcagccccccgtggagctgggactacaagtgcacaccaccacgcctggctaatttttattttttggtagagacagggtcttgctgtgttgcttaggctggtcttgaactcctgggctcaagcgatcgtccctctttggcctctcaaagccctcagattacaggtgtgagccactgtgcctggctaatttttatattttttgtaaagatgaggttttcctatgttgtccaggctggtcttgaacccctgggctcaagcaatcctctagcctctgcttcccaaagcgatgtgagctcccccccgccgccgcccagcgccatgccaggccaaccaagggcttgtctccttccctttggtattgtaaggtgaggtttatgtaggtatacttgtcaaactctcaatttcagacccgctgtgatctttttgagacggagcctttctctgtcgcccaagctggagtgcagtggcgcgatctcggctcactgtaacctccgcctcccgggttcaagcgattctcctgcctcagcctcccgagtagctgggactacagctgcgcgccaccatgcccggctaatttttgtatttttagtatagacggggttttgcaatgttggcgacgctggtgtcgaactcctgacttcaggtgatcccgcctgcctcagcctcccaaagtgctagggttacaggcgtgagccaccatgccctgccagacccgctatgttctttggagttagtgcagagttccccaactccttggctgctgacgggtgttggtctgttgcctgttaggaacccattggcacatgaggtgagcagggcgagccaacgaagtgtcatctgtatttacagccgctccccatctctggcattacggcctgagctctgcctcctgtccaatcagtgggggcattagagtctcataggaaagtgaaccctattgtgaactgcatatgcgagggatctaggttgcatgctcattatgagaatctaatgcctgatgatctaaaaccaccccacccctctcccctagcccctgcccccttttccgtggaaaaattgtcttccatgaaaccggtcactgctgccaaaaagattggggaccactgagttagtgaatccagctgttcatggaacatcgcttcactgaaattctgattttaactctgacctgtggttacaaagtctt

SEQ ID NO: 586156 - DNA, 4001 bp, Homo sapiens
tggtctcgaactcccgacctcaggtaatctgcctgcctcggcctcccaaagtgctggaattacaggcgtgagccaccgcgcccagcctgtttgctttttaccttcagtttgtacaggaggaaacccaggctcagacaaaagcaacgatttgttcaaagtcactcggcttctactaaatgacgcagcttgggactctgaccccaaatcttggaggccaggaagttaggttcacctgggggaacactatgatcaaggtgagcaacaaacgcacgtttatactgtcagcgcctgacacgctgccaggtgtcttgcagtattgcatttcagcctcccagtctttaaggttcccattttccagataaggaaagttgaggctggcaggagttgggtggcttaccagtcactggccagtgaagggagaagctggcactcctacctaggtccctaagattttatttatttatttagagacggagtctggctctgttgccaaggctgcagtgcagtggtacagtcttggctcactgccaaggcaggttcaagcaattctcttgcctcatcctcctaagtagctgggattacaggcatgttacgtggcttttttttttttttttgagacggagtcttgctctgttgcccaggctggagtgcaatggcgtgatctcggctcactgcaacctctgcctcccgggttcaagcaattctcctgcctcagcctcctgagtagctgggattacaggtgcgtgccaccatgcctgggtaatttttgtatttttagtagagacagggtttcaccatgtcggtcaggctagtctcgaactcctgacctcaagtgatccgtccacctcgactcccaaagtgttgggattacaggcatgagccacagcgcctggctacattttatttatttattttaatagagaaagggtctcgcaatgctgtccatgctggcctccaactcctggcctcaagcgatcctcccgcctgggcctctcaaaatgctaggattctatgtgtgagccaccgcgcccggccgggatgggtggtggtagcctccgggctgcattggcagaggaggcagggggaggtctgactccccaggcttgcactcctgatcccttcactgcccgcgggtgcagcccggccccgccccgccctaggcggcctggctgctctcccagcgcctccggaaagggaggggctgctcggatctgccctggccgcggagccctgcagctgagggggtgcgttccgggaccccgccagccaggcccgccccgtacgggacccctcggacctggcccgggggaggcgggtgggagcagcgggagcggccaggagggcaggggcggggcggcaggagacgccagctcatttcccggcggctgcaacccggaaggctccggggatggaggggaagtgactgggtgtggggccccgccggcccgaagtaacggggctacaccgaccgaccgcggggcaaggctggggatgggggccggggagcaggggcggaaggcacgaggcggaagcttggggccgggggctggggacgccccgagggcgcccggtgcgctgggagcccgcgtttccacagtctggccctgcggccacccccgcgccccctccaatcccagggctccctctcctttccgtgagcccctcgtccccgcgccccctcctctccatgtgcccccactcatccccgtgcccctattgggcggcgccccacatctatgcgtcctcacttccaggcgccccccggtcccctccttgcaccccctctcatccctccagtcccgctcactcccaggcggcgccccacatctacgcgcccccccacctccaggtggctcccctgacccccacctccgggcgcccccacggccctcacctcccgcgccccggccgcggactctgggcagtcgacgcgccgaaccggctctgggctccgcgccggagcagcagccacttcctcgtgggcggggggcggggcctgccgacctcagcccggtagggcccgggggcggggacctggggcagcggtcgcgagatccaggtcccgccctcccttcggggtgggggtgctgccggtacccgcgcagacgtcggagcccaaggctctgtccgcagaagccgtccgcaaccaccgtcaatgctttaccaatggggaaactgaggctgggagccaggcgcgcagcctgagccgccgctgggctggacctccgagcctgggccgggcgcacggcccccggggactgccgggcgcagggtcggggagtcacgtcctctgagcccggacggcgggtactgcgggctccgcgctcacacgcaggtgagcggctagcgagccctgcagccccgtcggcagccagcgaggagctcccttcacgctgatgccggtgggcgccaactgtgcaggccctgggcggggagcaggcggtccgggcgtggccagggcagcccggccccgcccccttggccctccgtgtcctcgccacgaaacaggggtgctgtccccgggcagggtgacactggccgcccctgctgacgctggccggccagttaacttctttcctttctgttttacgtcaatcggcttcacttctttaagttacccggttagccttgcagagccgcctgattgcgggtcttgggctaggtggtccccggagtcttcccatcctgaccctctgcctcttcagtggatacgtggcctggcggccaggcagatggaagagaccccagtgaaaaccttacctcggccggtcgcggtggctcacgcctgtaatctcagcactttgggaggccgaggcgggaggatcacgagctcagatcgagaccatcctggctatcacggtgaaacctcgtctctactaaacaatacaaaaattagccaggcgtggtggcgcatgcctgtaatcccagctactcgggaggctgaggtagaagaatcgcttgaatctaggaggcagaggttgcagtgagccgagatcgcgccattacactccagcctgggcgacagagtgagactctgtttcaaaaaaaaaaaaaattagctgcaaggagccccatggcgtgatggagcgctgctgtaatcccagctactcgggaggctgaggcacgagaattgcttgaaccccgggggcagaggctgcagtgagccaagatggggcccctgcacgccagcctggcaacagagcgagacttcctctcaaacaacaacaaaaaccttccctcctcttctctccttcagacccctctctctagtatttgtgcagggtcttcctggatctctggagatccgaggccagactcccaccctgtcaggcttagaggctttgacactcgctgttccttctgcctggaacactattcccaccctgtcctcacctgccgacattggtttgtcctgcagtatgtggctgggggtctcaggtcgctttgccccgacaccctccccattggaggtgcccttagccgccgctctcttttccactgaattcgaccccctagggtagttgggaggattaaatgtgtccaggtgtgtgaatcgggtcatacagtgtgcacacaggaagtgctcgaacttttctgagcccccccaaccttgctgctcctgcgtattttctcagacagatgtcggcaacctcagcaaacacaggcggtggttttagttcaagcagatacaaagcttcaaggggtctgtaccggcagccctcttcccacagggacaagtgtagggtaactgaggtgaccctgttgctgcttccctggcttccatcctactcttctgccgctttgtagatgcccagggaatgaccccaagtggccctgagtggtctaaatcagctcacggtgttccctgtcctgctgcacttgtgacctaagatgacccaatcaaagcaaagcccaggacttcagctgatgatccagcgcacaaagccccttctgagcgagctgcaggaatctggactcgtaagtggaacgcggaagtggaa

SEQ ID NO: 586157 - DNA, 4001 bp, Homo sapiens
tacaggtgtgagccaccgtgcccggccatttgtcattttttttatagggctgctagaacactgtaaattgcatatatggctcacattaggtttccactgggccacgctagtaaagaacacatcttcaaccatagtatgattaagcctgtggaatcctctagaggctgatgagattaacaagaaggagagggtccatgaaaggagaaccccagggtcaataatttggcacctttcagaggcaagagacaagacctgcaggtgtgcagtcagtagagagagggcctctataggatgtagagttagttcacaaaattgtaattgggatcccatcctacaacgttccttacacttgggttgcaattatttatgtcactgcaaaggactattccctacaataaatgatacattggcacatttgggtgtattcatcagtttcttgggagtttagttagtgagagtcccttgagcccatgatctgagggtgccctaccaatatggagattctagacctgtcttggaaaaccagaccctacccagagggacccaggcaggtcctcactggggccaccatcctctactccctgtctggatcactggacagtaagctccctgagggcagggcctcagggacttagttgctgttgtgcttagcacagtgcctggaacataggataagctcagaaagtgttttcaaaaattttaagcaacaccacctccccataatggagccaggcaatttcccaatgcgggccatgcaactgcacccctgccacagcctccctccacccctgggagaccagaaaactgtccaaagtccaggccactccaaagttcatggggtcaacgggtggatggcttgggaagtaattgcaccctgacccgcgccccaagcctggactgctctgtcccaggtccctgacattttcccccatcctccctgagaaggcctctttgcttcccttcagagtggaactgggggttggggtgaggggtcactcactcaagggtgccaggcccccggcagagatgcagggggcgtttcccatcctggtcagcgatgttggggtcggctcctgccaccagcagcacatgaacacaggcagtgtggcctgcagcacaggcctcgtgcagggcggtgcggcccccaggggcactgtctggccttgctcgccgcctcagcagcagccgcaggacttccgtgtggccacggctggctgccacatgcagtggggtggtcagctcctcttcgtatgtcagagaccagagtcctagggaggggagacgtgggcctcagatccccagggaaggcagagaccttccagccaatggggtgaggtgggcagaggcaggaagagggagcccagagctccatctgcagcctcccctctctcccactgagagcccccagtgccccggcccgtactcagagcacggatgttgaagcggaaatccctccatcgctctgggtcgctggtatcaaagacggaatcaggagccaggccagtactggagtccgcgaggatgcgggagacacagcccacgtccccagccagcactgcctgccagaaggcaagggcaggtcctgaggctgtgcgggtgacgatgggtcccgggccagacttgaggtgctcctcagaccctctgctgggcttctccaccagcctggcacagagggggtgtctgtcatcgaggggctctccctgccccttgcactcttctggagaccaactcatgagcatgtgggcagggaaaggggagtggggaggaggagaggtatatgccaaaggcagagagagagagagagagcaggagggaaatacagacagacagaaggcccctgtgtcccacgctccgaggctgacctggccacgcatccagcaggagctattctgggctccacatgactgtgttcttgggccaaggtgtaggctattgggcaagctttgaggtcggggagaaacagccgggggcttctcctttcactcaagcccttaggacctctgtggccgaggcagtcagcccagccccctggttctcagcaacccccagatgcccctcacccctctggtggctgctccagcgaggctctgcggcccggctctccagcagcaggtcggctgtgctgtgcggggggaacagctcctgcaaccttgccaggtccccggtgtagagggcattctgcagggccatgtcttggcagagcagtggtgatggccgagggggctcccaggctgggcgggagtggggcctccagatccggcaggccggggcggagggaaggcaccccagatggtgtccccagtggggagaggagttctttccccagggcatggcttgttctgggagagccaaagcagcacgactcccagcgatgttgctggtggactgggcaggtgggtgctgggcccgagctgggtggggcccagcatgggaggcgcaggggagcacaacatcaggcaaagccataaatagccctgactggcccagctgtcagtcaggccgggtgggggaattagggaggggcaggagaacaagtgaggcctgagcccgccaaccctgagcttcaccccagggctgtatgacctcagggtggaaagggaccacccggaccatgctgcccagtccgtcatctcggcattaaagggaagtgaatttcccaagatcacgcagagagcttgttgcagagccaggactggaacccagggccttgagctctttcttgttcaccaaatcggcctccagctgcctgggctctgatcccactgggaaggcctgtgggtgccagataatatttcctgcccttccaaatgtcatctgttagccctgcaccttcccactcccaaaccaagggaggagttcacagtagtgacacagattgccctcgctgtgtgaggcacccctcagggggctcccttagacagacgtgtgcctgagtaacagagcgtaacccacaggcaagccacagaaactccccatgctcgtccttgatgccaacccccccatctccctggatgaccttgggtggcatctctcccctgctgtggttacatggggtctcttcactagagagtgagaaaggagaaatgtctctgtgtactcaggcactgacttttgtttgggggccgggtggatcaaaaggaaaaaaagagagaaagaagatgagaaaccaggccctcgggctcagctctgacccaccactgcccaccatgggcttgaggtgctccagccccattggtcttgcccctttggctcacgctggcttaaaaaaatttttttaaatcaattgctttttaaaaagtttcatttttaattgacaaataattgtatatatttatggggctataatattttgatacatgtatataatgtgtaatcatatcagggtaattatcacatctatcaaatgatatttaccatttatctgtggtgagaacatttaaaatcctcttttagccattttgaaatgtacatcattattcactacagtcgccttgctgtgcaatagaacacctgaacttatcctatttacctgtaacatcatacccactgaccaatgtcttccctttccctttccctgtccacctccctcgagcccccagcctctgggaatcaccattctaccctttacttctatgagtttgacttttttagattccacaataagcaagatcatgcggtatttgtctttctgcacctggcttatttcacttagcacaatgtcctccagatacaccacatttaaaaatccattcatctattgatggacaccagttgtttccatctcttggcgattgtgagtagtgctgcagtggacgtgggggtgcaaacccctcttctgcatgctgatttcaattcctttgggtatatacccagtagtgggattgctgaatcataaggtaattctagttttagttttttgaggaaccttcattctatttttcaaaatggtactaatttacaacaccaccaaccatgcagagtccccttttctccgtatcctt

SEQ ID NO: 586158 - DNA, 4001 bp, Homo sapiens
agtttagttagtgagagtcccttgagcccatgatctgagggtgccctaccaatatggagattctagacctgtcttggaaaaccagaccctacccagagggacccaggcaggtcctcactggggccaccatcctctactccctgtctggatcactggacagtaagctccctgagggcagggcctcagggacttagttgctgttgtgcttagcacagtgcctggaacataggataagctcagaaagtgttttcaaaaattttaagcaacaccacctccccataatggagccaggcaatttcccaatgcgggccatgcaactgcacccctgccacagcctccctccacccctgggagaccagaaaactgtccaaagtccaggccactccaaagttcatggggtcaacgggtggatggcttgggaagtaattgcaccctgacccgcgccccaagcctggactgctctgtcccaggtccctgacattttcccccatcctccctgagaaggcctctttgcttcccttcagagtggaactgggggttggggtgaggggtcactcactcaagggtgccaggcccccggcagagatgcagggggcgtttcccatcctggtcagcgatgttggggtcggctcctgccaccagcagcacatgaacacaggcagtgtggcctgcagcacaggcctcgtgcagggcggtgcggcccccaggggcactgtctggccttgctcgccgcctcagcagcagccgcaggacttccgtgtggccacggctggctgccacatgcagtggggtggtcagctcctcttcgtatgtcagagaccagagtcctagggaggggagacgtgggcctcagatccccagggaaggcagagaccttccagccaatggggtgaggtgggcagaggcaggaagagggagcccagagctccatctgcagcctcccctctctcccactgagagcccccagtgccccggcccgtactcagagcacggatgttgaagcggaaatccctccatcgctctgggtcgctggtatcaaagacggaatcaggagccaggccagtactggagtccgcgaggatgcgggagacacagcccacgtccccagccagcactgcctgccagaaggcaagggcaggtcctgaggctgtgcgggtgacgatgggtcccgggccagacttgaggtgctcctcagaccctctgctgggcttctccaccagcctggcacagagggggtgtctgtcatcgaggggctctccctgccccttgcactcttctggagaccaactcatgagcatgtgggcagggaaaggggagtggggaggaggagaggtatatgccaaaggcagagagagagagagagagcaggagggaaatacagacagacagaaggcccctgtgtcccacgctccgaggctgacctggccacgcatccagcaggagctattctgggctccacatgactgtgttcttgggccaaggtgtaggctattgggcaagctttgaggtcggggagaaacagccgggggcttctcctttcactcaagcccttaggacctctgtggccgaggcagtcagcccagccccctggttctcagcaacccccagatgcccctcacccctctggtggctgctccagcgaggctctgcggcccggctctccagcagcaggtcggctgtgctgtgcggggggaacagctcctgcaaccttgccaggtccccggtgtagagggcattctgcagggccatgtcttggcagagcagtggtgatggccgagggggctcccaggctgggcgggagtggggcctccagatccggcaggccggggcggagggaaggcaccccagatggtgtccccagtggggagaggagttctttccccagggcatggcttgttctgggagagccaaagcagcacgactcccagcgatgttgctggtggactgggcaggtgggtgctgggcccgagctgggtggggcccagcatgggaggcgcaggggagcacaacatcaggcaaagccataaatagccctgactggcccagctgtcagtcaggccgggtgggggaattagggaggggcaggagaacaagtgaggcctgagcccgccaaccctgagcttcaccccagggctgtatgacctcagggtggaaagggaccacccggaccatgctgcccagtccgtcatctcggcattaaagggaagtgaatttcccaagatcacgcagagagcttgttgcagagccaggactggaacccagggccttgagctctttcttgttcaccaaatcggcctccagctgcctgggctctgatcccactgggaaggcctgtgggtgccagataatatttcctgcccttccaaatgtcatctgttagccctgcaccttcccactcccaaaccaagggaggagttcacagtagtgacacagattgccctcgctgtgtgaggcacccctcagggggctcccttagacagacgtgtgcctgagtaacagagcgtaacccacaggcaagccacagaaactccccatgctcgtccttgatgccaacccccccatctccctggatgaccttgggtggcatctctcccctgctgtggttacatggggtctcttcactagagagtgagaaaggagaaatgtctctgtgtactcaggcactgacttttgtttgggggccgggtggatcaaaaggaaaaaaagagagaaagaagatgagaaaccaggccctcgggctcagctctgacccaccactgcccaccatgggcttgaggtgctccagccccattggtcttgcccctttggctcacgctggcttaaaaaaatttttttaaatcaattgctttttaaaaagtttcatttttaattgacaaataattgtatatatttatggggctataatattttgatacatgtatataatgtgtaatcatatcagggtaattatcacatctatcaaatgatatttaccatttatctgtggtgagaacatttaaaatcctcttttagccattttgaaatgtacatcattattcactacagtcgccttgctgtgcaatagaacacctgaacttatcctatttacctgtaacatcatacccactgaccaatgtcttccctttccctttccctgtccacctccctcgagcccccagcctctgggaatcaccattctaccctttacttctatgagtttgacttttttagattccacaataagcaagatcatgcggtatttgtctttctgcacctggcttatttcacttagcacaatgtcctccagatacaccacatttaaaaatccattcatctattgatggacaccagttgtttccatctcttggcgattgtgagtagtgctgcagtggacgtgggggtgcaaacccctcttctgcatgctgatttcaattcctttgggtatatacccagtagtgggattgctgaatcataaggtaattctagttttagttttttgaggaaccttcattctatttttcaaaatggtactaatttacaacaccaccaaccatgcagagtccccttttctccgtatccttgccaacacttatctttcatttttcaataatagccagtctaacaggtgtgagataatatctcattatggtttttgattcacatttctctgattactaatgttgaacatattttccaatatatgttggccatttgtatgtcttcttttgagaagtgtctgttcaagtcctttgttcattttttaatggggtattttgttgttgttgttgttatttagtagtttgagttccttgtgtagtttggatattcaccccttatccgatgtttgatttgcaaatatttttttcccagtctgtagattgtttctccactctgtcatttcctctgctgtgcagaaaccttttagtctggtacaatcccattcatctacttttgctttcattgcctgtgcttttgaggtcatatccaagaaatctctgcccagaccaatatcatggagcttt

SEQ ID NO: 586159 - DNA, 4001 bp, Homo sapiens
ctattatgttacagacttgatttagaccccagtatcccaaagatctacaagtcgtatgttttccccacgttgttttctgtgcaattgtatgcaggaccctattggactctatttattcctattacattttatattttttcaatttggcctttatttccttctgctaaaattgaatgcattttctatctctccaagtattgttttatttgctgacttaataagcatgccttctatatgtccttaagctccactgataaagataaatgttgaaaagaaattggcaaaggacagaggcctctatgttgacattgatccattattttgcaccctcccagaaaaggtgtttatccagctacaaaccctcttaaagacaccaccacctagtattaatgtctcctttttgataataagaccatcatcaaggaatattgtcaaataccttgttgtaatacaaatgcacagttatctatgatactacattcctttgctctgctaatcaaaaagacaaaggaaaagaattaacccaccaattcttagtgattatttttttcctaaggatgttcagactatcctatttgtccatgcaaaaatatacattcaacgtctgttgtgttccaggcacagggctagacacatatatatgggatccatgccctcagagagttttctgcctttaaataatgtattttagatttttctccagaaataataccaatttctctttaaggtttagcacacagtaaagcacatagcatagcaagtctttaataagtatttttatattgagtttaataattattataactaatatctattgagtgtttacctgtgatagggattacactaagtgcattaaatggatgtcacttaacgtctatgacataattctcccccactttacagatgagaaaactgaagcacagagtcattaggtaacttacctaagcccacatatctagtgggcagtggagagtgggatatagcccagtcatctgacaatggaggccacacacgcttaaccagtatactctaactatgactcagctactttgaatgaattaatgaaaagagggtcttattttgtaacctaaaaattcataaacctgagaaaaagttttctcaaaaagtttaagcaactacctaacaaattcatcgaacaactccaggggaaatataaaacttgtaggcaaatttctatttgaagataaaatattctcataaaataactgaagtgtaaaattataatttttatcacaataaattaataatctcagcacaaagcagtgataagatttttcttgtccacatcactgctttacttcgtggaagtcaaatcattttagatatagaaagctccttagaagttaactgtgcatttaagaacaatatgagtgacgatatcagataaattttaaggactttccaacctttagattttgtgatataatttgcaggagtaaatttccaattctattcggtttattttttaaaaaatctaactaatttaaagaaatgtttcaatctgggcagaaagcattcatctttttcaacaagtgatgaaaaagccttaaaagatttattttatttattcacaaaaattatttaattttttttattagaaaccaagaggtgagctgagacccttctgggattctatagtaaatatattgacatgttctataaggatactcattcttaatctgtttttctcatgatacaattttttatgcttagtaattatgcaattgagttgatattctataagcaaacaaattctagctttagtctctaattaaaaaggctctaaacaggtaagcccgtaggtgatcaagtggaaagaaagtaatgagtagctactataatttgtatttcaatctgtttaaaatattaccaataatgaactattcaataagctagttggtgaggtacagatcaaatatttcataatctcaccttttggaatgatcatcttgtcattcttatccagggacttgccttcctaaatcagaggaagtgccctggagccaatgtgtgcttctgtgtatctaaaattaagtatccagttggtggttaaattaagacctgaccttgtacaactgaaacataagcggtctctggcacacggtaaagtattacccatgacttctctagactctcatcaaaagaaacgcaagcctacagaggtataataagattatctctgtcctgattggttcaaagaactcttatgaaaacaaaggacctgccaattcagctgcagggagtgttgctactgatggaacaaaaccaaaccacttggaattaacgcacaatttaaaggtatttgttcaagagacaaatctgtaagtctttgtgttgtcagagcctaatccacttttgacatattttaatacacactatttttctttctccatctttcagattcaggtcaaatttcattaaatacaatcttcttgtcatactaatttgctgtctttgatttttgtttaataattgctagtctgatatacagacggagatagggcagtcagtgacatctaatctgatcaagaatttttaggtcaagttattgagcatatatagtctaaaaaaatgagtagcaaatgtattaataaaacaagcaaaaaaattgggatttttaattgaggaaggttgttttcttttaaaaaaccaattaagtttattgtcttactgattttccaatgaaaatagtctgccttaaatttgttttgacacagctatccttggattaactcaggccaccatcggcactcacaaagccatctggcctctatcccctacacccccctactaaaacaactcgttttgcaggtctcagtgacctctttctgacttacattagaaactcatttcatattttatattcattttcatttcttattttacaaaccctcattggatttgctgccagtgattcttccctttttcctgaaactctctacttcttaagctactgggagcactacacgcttttgtttttcgtctcatctctgacattttctttgtactcagtgttaatgaatataaatacgtggattgtagtgaatttgccagttttatttcaaaaattgagaaaccgtaaatgtgaaatgagaggtcctaactcctctttaactgtgataaaagaaggtgcgtttcagtcatcttcaaagcaaactgagaagtattttatgtttaaaccactattaactgtgtattgcaatagtcaagggtaaaagttagatcattgcatacattgtctacattttatcattattaatctaatttggaatttttcaatgaagaattcttgtgaaaagcaatcagcattgtgaaacactttaattttatacaacttttttttacttacaatattagaaattcatataaagctttagagtataatgcaaatgtgtgggaaaatgtgcacctaacactttaaagtgtggcttgacacattgcagtgacttttctgctcttaaactaatgatggtatgcctgttttatccgtttatataatagttgttatagatctacctataccatacaacatttaaaataatgcatataatgatagaaaagccaaaataagatcatgtggtaaaataaatgagagcctgttactgaagacatagtcctgtgaacacgtcttgctttaccacttactgtttctgtagatgcattatttacatttttgagattatttatctgtagtatgggagtgatgatgatgatgatgatacaatgaccatggcaccaccattttaatgaggcctattcctcaagtagttagtcatctatgcacacacaataagacatactttgagtaactcatatatttgaaagaatgatctattcataatgctagtaatcgcttccacatttgcctctatgaaagctggcttttcctgtgggttttctcaaaggggaaacaaaatgagtcctagcttttcaaacagtgcctctagttttgtctggtgagaatgagtttcagggagggg

SEQ ID NO: 586160 - DNA, 4001 bp, Homo sapiens
gcaacctcccgcctgctgggttcgagtgattctcctgccttagcctcccgagtagctgggattataggcaccggccaccatgcctggctaatttttgtatttttagtagagatgggcccccgcaatgtgctaggattacaggcatgagccaccatgcctggcctagagaaactgactcttaataataatttgccatttaacattcaatcttgttctagagaagaccacaagataaatcatttgttctccataagtagctgatttacaaagtaactgatgcaatcatattgtacaatcagcctcttcatttaaagcactggttaaccttgcttagggtcatgaaaacatttgataaaagctatggattctccctccagagggacacatgtccactcaaaattttgcatgcgattttagggaacttatggaatctcagaggttttttcatgttctcctggtaaaaaaccactgaattaaggattcctaaatgctaaatgccaaatatattcctcagatatcaataagttttagtttattttacagataggctatgttaaatccttaattcagatagtgagaaaagggaactttggtgatcatgtaaattttttgatacatttggcaatagtaataataaccataaattatcaagtgcttgctttgtttcaagcactgtgcaaagcattttgcatatattaccttgttttaaattctcattccaattctatattgtaggtattatagattcaagaggttaaatgacccaccaaatgtcccagagctaataagtagagtctggaccgagcaggaaataccttcacttttaaggtctttcagaagttagaggaaaatatctcacagtctgttgcctttaaaagaaaacactgtgatcttgcttttaacagccagcatttgatgacaatcacttccaaaaataaaaaatagcttccagggacacataaatctttttctttggctccatgcaataaggctttatgttacttagggtggtctgaggttcctaagcttgccttcattctgtactttttgccttggagtctaaacatcatggtccaaacaacaggatcgacataccagttggtgcctgactgaaatggtgaggaggttggtaatgttgaaaaatatgatgcaggagtgaacatgaatatatgacacctttttgcatcagttttgctaaactgcctccaaaccatgatcagagctaatgccttcctgtaaaggcagctgataaatttttgacacctgtcagagcttcctttgaaatacagtagctcccacagcacggaaccaaggttctccctttccctgaaaaaggacgaatacaactttcttcctcatgtattgtttagttggtttactcctgcttacatgcagatctgttttccccacctaccctcacactctgtcttgggcataacaaaattgaaaccatctctatgagtcctaaacaaggctggccttgagactaagcagagtggacagttgcttccatggtgcaaggaagggctctgtgtctataaataacacactgcccccagcacctgtcacatcagtgtcattctattgcatcagcaagagattctgtcctttagggcttattgttccatcttccagtgtcccttttaaaatttagatagcaacatactggcccctagtttagaaccaagatgtcttgggatagttactggagtaccatgaggctgggaagatggcagaaagtttaaggctaggatctagtaggaagtgatacgaagggacaacaaaagggtcaatagaatacaatttggttttctttacaattttatccaaggccagcccaaatagaaaccctggggttctgagggagatgcaggtttcggctgtgtggaatgggggacactgattccctgggaatttttcttttaccttgaagctgcaatgattctcgagtgttgagctaatctactagaggtccctgagagaatcatcaggatttatcctatcagaggaagggcaagagttaaaagacattttcttttttttttttttttttggtacggtaaaaaaaatacagttgttatataccaaacaatacgaattctcatttttatgcactttgatcatttgtatgcatacttttaaagatgtggagaaatcaatataaatacaattctgttataactttgctttttatttggtggctgaatgcttatttttaaagaattgcatagcacaaagtggcaaatcacatgaatggattcgttaggatgatttaaacaacagaatcaactagttccccaaaaatttcagatagaagtgtaactgtcagaattgggttttaccccacagtcacaggtaattttacttacaagcaataagttacagcgattccttctttatggtatttgccttttctactgaagagaaatcctaagcatgatggggagaactaaatcagtttaaatagcatctttcttaacagcaaagtatgttcttctgataccttgaaaacatgcacacacacaaacaatcttagtccaaaaaacaaatgctacttttatgttacttcgaagaaacacaactcaacattttagaaaaagatataaaaggcaaaatgatctgtagaaactaaacatgatatctggcatgggataaaaactcagcatttactaaatgaatgaataattgtataattaaatacacacaactcttaaaattagccttgtgtttctttataggtcacagatatatttttgccgaattctcttcaaattttggggctttactgattgatgcttaatttctatgcaaatatactaacgatagaacccgtttagtagttttatctccagtttcatattacaaaagtaaaaaattttaatgaaattagtatgaggactagataaaaaaataaaataagaacaagaaaaaatagagaaaaaagaaagttttactctttactattgatttccaagtcaaatttaattataacagaaatgtgggaagatgcatgttagcttttgaggactacactcataacagtttaggaaggagctttagactcacaaactcacaggtttctaggggaatataaacttacagaatagcaaagagttaaagaaagataagcccatgaaaagacaacttattagtagacgtgccctgatcacaagctaatgtgatataatgatttttaaaagccctatccttcttctgtaattctatgtctaggaagaaggccgggcctggtggctcatgcctgtaatccgaggactttgggaggctgagataggtggattgcctgagctcaggagtttgagaccagcctgggcaacatggtgaaacctcatctctacaacaaatacaaaaactaattggatgtggtggtaggcacctgtagtatcagctacttggggggctgaggtgggaggattgcttgagcctagaaggtcgaggctgcagtgagccatgttcatgccacttcactccagtttgggtgataaaacaagactctgtctcaaaaactaaataagtaaataaataaaagaaataatcagagatgtaaaaaaagatgtgcatgtgagaatgtttatctcagctgtgtttaaattgccaaaacattagaaacaacataaatgtcccaaaataggaaatttgtataagacattattgtacacataaaaatggaatactacacagttattaaaattcatatacttgaagaatatttaacattatatgtaaagtgttagtttaagtatgatgtttatttaaccagatatgactaaccacttttaaggaactatgatggatttttcccccaactttattgaagtatagttgacaatttaaaattatatgtatttaccatgtacaacttgataattcgacatatgtatacattgtgaaatattcaccactatcaagctaagtaaactatccattctggcacatagtttatcttttttgggggtatagctattttaaaaaacagtacaaag

SEQ ID NO: 586161 - DNA, 4001 bp, Homo sapiens
cctaaaagtaagaccacaaattttactagttctgtgcaagcatccacttggcatacataagaatggaactgttcttttccttttccagagggtgtaatttgctatctccctaattgaaagccacatcccacagtcctaacactatgaaaacacctcaattcgtgggaatgaaaatttagctctatgaggaccataggagtcagctcatattgacaagaagaatttaaaatgtattttcttttccttcaaggaagatgacaccggtggaagtaggagaaccaaccccacctctcccctccacttccctagagcctgcacctaaaacttggtttcttatatcctcagaaacttcccacaatctgtgcaacttggcctgctcagatgagagaagacagtctttgcaactcagggtcaaataacttacccactgacttgaacctgagttatttcaccctaggcacaaatataagctttttaaaaacatcttaaaaattagtttagcattcagacattctatcactgaacaaaattataagatgaaagcaatctgattatatagtatacaaattttctaacagaccccataaactttttaaaaaatagatcccttctttgtcttcccatcaaaatattaatgccattaatgccaaaatattataaagcccttgagtaaaaatcataaacatagtaactagcctgagctcttctatatgtccctcagaactgacaatcggaggacagtaaattaatgaagaaatatatactgtaccattagcatttgtatctggaaatgtattatactgatgatttatagatggccagaaatcatttttaaacattaaaataatgactgtctctaaatgctatacacaagaccttagcatctatattgtattaaacattagtgatgttgagcagcatgtttgcagtatgctcgccagatgatctaactactcacgttcccccaattaaccagttgatttgggaaatcagaatcagtggaactctaattcatttctgatttattaagcatgggttccagaaaattccttggtaaaaaaaaattggtctaatttttgttttccttaggtcgttataagacagatattctgtattaaacacatctacaattttgaacaattattgtagtccaggaaaaaagttaactttttggttttgctgaattcagcttttgtgcctgaactgaaaactcattaaaatgaagaagaccatgaaggtgcctgtggcaccgctttatccatttattaaccctccaaatgttggggagattcctctttttcatccacatggacatagagaggatatatctttaagtagctgttaatggagaattagcagcgtgttcttaaaccaggtacattgtctaagatagggtttcaacaatctgcttagccataatctaaaaatgttttcttccttctatatcatcatagtcagaagaaaagttaaaaacagagagagtgcattgctaaaaatgattgtctgggatttcaagtcctaggcccaagggtgggaaaagaaaaggagagacacgacttatacatatatatcagcccacaatgtgttttagtttaaaaagaaagaaaatatcaatttagaaatattttttaaatgaatacttaaagaaacaataaaaactactgtttagagtggataactgacactgtgcatttttttaaatcattttctaacagttctacaataacacctatatgtttttaccttgtttataagatgccaaaaccatattctcatcttcgacttcaaaaacagtgtccacatctatttgcctttggatcaaaatagccttcaattttccgaagtcattggactttagcgcctcaaggaaatttctcttaactaacttggcagctccagatttagtgacaggggcagtggtgccgtccatccttcctctccctctggaagctttgttgtgatttatcgagagaacagcaccgagcaaacaggcgcatgctggagagtccacaaactgtcggctaattttatcccaaagttatgctgatccgttctatttatatagggatcatttcaaacttcaaaatatccttcttggctgtcactacattttcaggtcctttaaactggttatatattaactgatccattcagtaatatatagtgtcaatatgaacgaaagcccccgtgatacatttccaggcatgaaatgtcacaattatttcttatatgatcaaagtaataatataagatttaaaagctcttaatgctctttttttcccctcaataaaaacatctggtgcctggctggagatccagcgtcttgctctgacaagccaatatccaaaaatgaaaatctgttacagttgtggatacatttgcttctaaaaacctgtaataattttgcaatatgagcttgtaaaatcaaccattgtcatacatatctgaagacaaacaggaggttttcaagtgacctagacttgaaaaattttaatatgaaaagctgggaagggaggaggtggggagacggtccggggcagggactcttttaggtaaaaaagaaactgaagagataaaacatttaaatgcaacatgtgaatgaactttattgaatcctgttttttaatcagctagaaaagacagtattgtggaactataaatgtggactagatattacttgacaatatagaagtgtaatgataaatgtggttatgtaaaaaaaattcttactcttaagtgatacattaagggataaattgtcatgatgtctaaaacttctttaaaaatagctcagaaatgcagacagataaatagatgtgtgtgtatgtgtatatacatatatatacatatatacacatatatatacatatatacatatatacacatatatacacacacatatatacatatatacacatatatacatatatacacacatatatatatgtgtgtgtaaatagaaacagagagatagcaagtgtggcaaaaacttaaagacttggtgaatctagtaagggatatattggtatccattacattattctttcagcttttctgtaagtttgaaatttttcaaataaaaagttggagagaaaagtatacacttaatttttcttacataaaatcattaaaaattaggaaaattataatagcaagttctaaagagaatgcaaataaattgcatttttatatgtcgtttgtggaagtcaaaactggtgcaaactttctgcagaataattaaaaacatgaatttttaaaaacttacaatgatactatttgattcttagaatttacttaagcatgtaaatgatgcaaatcacaacataattttaaacttattttattgatgtgtaatataaatgcaagaaattggcaagttacaggtatacagcttgtcaaatttttagtgaacaaactcatgtaatcaacattgaggttaaaccatagactagttcaagtttacctgaagccccctttatgtcctcttctaatcaaaacacctgcctcaaagagataacaataaatcttaacttctaatactatagattagttttgtttgttatttttttttgagacaggatctcactctgtcaccagactggagcacagtggtgtgatctgggctcactgcaacctttgcctctcaggctcaagccatcctcccacctcagcctctggagtagttaggactataggcatgcaaccagcacatctggctaaattttgtgtgtttttttgaagagacagggttttgccatgttcccccggctgatctccgactcctaagtttaagcgaacctcctgcctcagccatccaaagcgctgggattacagccatgagccactatgcctgacaattttttttttttttttttactttttaatgttaaacattttacaatttttgaagattttaaattatataatttttgaaaaatagcaacaacaaaaagagccatatatggaaatacttcctcaaccaagggattggctcccaactg

SEQ ID NO: 586162 - DNA, 4001 bp, Homo sapiens
cgtgccctcccccagcctcatttgtgtgctccctaccattgtccctccacacaggtagatattcctcctgctgcacgtccagcatgatgtccagcccattgcccatgccacccctagtagtggtgagcagctctgccccatcagcgccagagttaaatgtgtagcactttcccatccgggtgaagatctggggcgggcagacagggtgatggccatctcccccaggcaggcacatggtcatgggacctctccccacctcatggtatgtttgcgtctcttctttgaatactgaagcccgcatctcaatgcccccagccccacgctccagtgggcacatgttgcaggacgctcttgggagcccatcaactcagctcctccaccccgccaatccccaccaaagcccagggcacagcctacaggtttttctgtgtttctctgggaactgcaggaaaaggaaatgggcccctgtggctgtcctccggggctggcagtatgttgaaaaggcagagggaaagcaagccccccccacctcctggcagagataggggtcttctgccccagaatggtcccaccatggaggacccccagccccaggagcagggcctccctgggccagacctcaggcctagggccagccggggtcagtgtggcctcacatgctcccctcgggctgggagacagagaaagccccaaggaggacagcttcctgggctgcacggagtggcactggggggtggggagtccatggctggtaggaaggaagaggtcccctggctttgggggagcctgtgctggctagggaattgtgggtgctgggcagggactggtcggctctctgggtccctggcaggataggtagggaggtcagctcaccgtggtgaagttctcaggcccacaaggttggccacggaagcgacagtccagcagcatgtcatccagggagtgcccagcacgggcatagagttgcgccatgtcaaaggtgggactgggcatgaagccgggcggtgcagggggccggcccagggcgcgcaggaaggcggcgtgctctgcgggatccaggcccagcagcgcagacccagcccagtgcaggtcgttgggcgttaggcgcgagcggcgcagtgggttgatgttgcacagggtgacagccgggaagatgagccggtggctttctcgctcatccagggcagtctggtggtggaactccctgtagtagcgcaccctctcagccacctggtagaggaaggtggccactgacaggaccacggccgctgcccacatcccccggcgcaggctcaggctgcctggcccgaagacgtggcccagcccgtgcatcgagcagttgctggcgaacacgcggatgtccgaggctggccgccgggcctcctctgggcctgaggtgggcttcatggccagaacccaggagcggaaccagctacagaggcttggaagaagcgagagagagtcagtcagggggctaaggaggctaagataggattcaggaggccaggcaaggagaggagaagagagggtgggagacagccaaggttggaaggcagggaggcactagcctggcaggattggaggaggtgatctggccggtcaggtcccactgttccttcccgaggaacaggcggtggctccactgggctaggcactgggctggggactccgcagcagaccaggtgggacgtagctgaccgtggcaggcaggggctgcggagcggtgctgagccggcggtgctgagccggcgctgctgcagaggattgggtttcagcagtaggggggaaagggggccgacagagcagtctggggggtaggagaggtccctagggccccaggctgagccattagtgcagcatggaggggggcatggctgtccaagacgagaggcgccaggaggaaaccgcagtaatcctagggagagcttgagaaaagcccagaggtagattgggcctggagatgccttggggccccctaggctcccagttgcaacccctgtacactggccgcgagggtcagtcgctgacccctggcctagctcctctctccttttgcctctgcggccttccctctagcttcacccaggatctgttccttcacgaataccagagctggctcttggccaagctgggaaatggttggaaggctggcatcagcagatctcttctttctgtgcccctagcatctcagcctacactggatggccagggcactcttcatgtcccacttccagggcccgtctgtttcctaagtgtccctctctccctagggagtcaaagcctacctccccacactcaggcctctgaggatgttggcctctacaatggttatgggctcacctgccaccccaggtagaacatgggtgccccacctgccaccctcccgggtaccacgggtaccccacctgccatctcaggcacaacatgggtattctgtgatttcccatcttacgctgctatatccaggacctggaaaacctacatttttccaaagggctgcataccacccattatgtgcacataccatagtttatttaatgactcccccactgatgggcactgggggtgtccagtctttccattacaaacaatgttgccgtatcatcacacagatgtgaactcccaggactttggtgggctttttttgaccatgagtggtagaaacatggttccaccagccaaacgtgtgcacacaccatgctgcaactgctgggccacctgtctgtcctcccaacaggacacaagcttcatgggggcagggactgtcctcattccccatcgtgggctcaatggcacatgacaggtgcttgattaataaacactttggaaggactgagtaccatggttacagcacaggcgtaccagctccccagagccacagtgccatgctttgcaagtatttactgtagatgatcccactcacactctcaaaacaggcattcagcatcaagcacagctaggctcccactctccactgtggagcgaaggccgaggcgaggttaggaagacggcgcggctcctgcggtctagctcttccagctggactagccaaggggtttcactgcttctctagggggcgggtgaagggctggatttaaagaagccgcccagaagatataaatctggtgtcagaggcattttgggcagcctgaggctgatgactgagtgggtgaagcaggaaccaccttggctggctgcctggtgagggaggggtcaggccaacaagcagggccccagcagggcttgtggacttgccagctgaggccctactctgggctgccctaaggaggggtttagctgtgaaccagccccaggctctgctcctggacctccactgcttaaagacacagcctctgatctgtcaggaagtgggatatcaaatcagggtggatgtgggcctggggtttttggatggcttgtccccaaagcaccatctagttctaaaccacacccacaagagcccgtgggtcccactctggctcctgcacgcaaacttgagccactgctgcctcttccaggctggcctcccagcagcaccagctgctccatcaatgcactgtatcacacccctgaaagagggtaccacccttctttacacagggtaaatccagaatgcttgcctggctgtgaaggtgcattgcaggtaccacctcttctcctgcccaggggaacagggcaccgtgtagtcccacagcctggatgtggctggataggggaaggatcccagtaggaagtgacagcggcaccaacatggggagggctgatgcatctgcagcagtgcagggacacgaggtcctgctggggcaccagttcagccaaggacctacttgtgtgcctttccaggcccctcagaagccagctggagcctagccccctcatccacagtctcagggccacaggcgcccatcactcaggatgtctgccttcccctttcaaggtgcgcctcccagaacctgctggggatgctggcctgtccacagccgcaccctcctggaccgatt

SEQ ID NO: 586163 - DNA, 4001 bp, Homo sapiens
cgaatgtacatgggaaataccagttttggttttgggacttgtgggttttttttctttttttgaggtggagtcttgctttgtcgcccaggctggagtgcagtggtgcgatctcagctcactgcaacctccgcctcccgagttcaagcgattctcctgcctcagcctcccgaatagctgggactacaggcacccaccactacacccagctaatttttgcatttttagtagagacggggtttcaccatgttggccaggctggtctcaaactcctgacctcaggtgatctgcccacctcgacctcccaaagtgctgggattacaggtgtgagccaccatgcctgccaggtttttttatttttatttttttgaaactggatctcactctgttgcctgggctggagtgcagtggtgagatcatgctcactgcagtctcaaactcctgggctcaagcaatcctcatgcctccgcctcctgtgagactacaggtgtacgccaccacacctgggtaattttcaaaatctttttgtagagacagggtctcattacattgccctggctggtctggaattcctgggcttcagcagtcctcccgcctcggcctcccaaagtagaaatatcagtattgttgtggttagccaccatttattgagcacctactgttgctcagccctgtgctagggatttcacatatgttattacggccttttatgaggtgggcaatattacccctatttcacaaatgaggaaagaggtttaaagggctcaagtgactggtacagaaaccaagtctgtttggctccaaagtccaggccctacccccctgccatgacccagaagcttgcagggcactgagcttgcagggcattgagaaagaggaagtgaattgctagctaatgaaggccaaaagggcctggaacccagacctcctgcttcccggagttcccttcatcaagcatcaggcgaacagcccctctcacctgaagggtccaaagcaatggcctcataatctagtgccttacagagtgaggccgacagctattattacccccattgccagataaatcaactatggcccaaggaaggaaaacctctgcctgggaatccagcatctcagtggtcaggaggagaggccaggagccactgaccctaagaggcagggtccagtgagacaggaagggaccaggcaccagggttgctggagccacgaggcgacgtcccctttttcctggctctttccacatgccacagtcaaggacaagaacacttaggggctgagctttattctataaacagggacaattgctctagcaggagaagggatgtggtgtggggtgggacctgacaggaggacacgtggtaagaaggaaggaagagttggaaggctgaaggcttgggagccacttttcctggccaggcaggcatcactgtgaggtgagggcagagccactctacccctagtagtgtgggttggtgggtttgccacaagggctgcctgcggatactggtgagtcctggtaaaggtgactgctgggctccagatgatgcgcccgggagggctgggggtgcaggcttcctaggtaattttcaaaattgcttcctggagggcgattcccagcagggtggcccgaggcaggtctggcgcccccactctctcctttggaggctaggaggaccggagtccccgaggtcccactcacctccgaggccatgttgggcggttcctcgtcgtccggaagcttcggtcctccgggtctggaagacaagaccggactgacgacctccttggccagcagggtcccccgggccgggctggctccgagttctgggcactgcgcttgagggagcgcagcccttggggacgcggacgtgagcgcgcgccacggtgctcggcgtcctccacgcccgtcccgcccatccggccgccgcgcactcacctccgcctggccgcacggatagtgtcgcgcccgccactggccagggcttttctggccgggatggcgtcagcagccgccggtcctgtccccacccctggcgacggccgcgccaataggaggccgcccggcggggtgggcgttgcctccatcctccaatcctggccgtgggcggggatacctcccgctgagctggaggctaagcggccccggggcggggaagcgggcggggaaagggttggggggaccccgacggggaaggggcctgggctggggttgaggagggtagtgcgctggcgttcgtgctgtggtcagcagacacgcaggggactggagactcgggccaggggtagaggctatgacatcaggcccgggcctggcaggttcacaagatatataaggtgaaatggcatgttcgctcattcactcattcattcattcattcaacaaacacgtaccaggcacctctatgtgccaggtacagagaaaggcatcaaggaaaaaggaaggaccatcagaaatgaagcctgtgccaggcgcggtggctcacagctgtaatcccagcactttgggaggccgaggtgggaggatcgcttgaggctacgagttggagaccagcctgggcaatacaacaagatcccgtctctacaaaaaaattaataataataaaaaaaaagccgggcgtggtggtgcacgcctgcagtcctagctactcaggaggctgaggcgggaggagcacttgagcccaggagttcgaagctgcagtgagctattgtgccacggcactccagcctgactcctctaaaaaagaaaagaaacgcggccggaggccgggcgcggtggctcacgcctgtaatcccagcactttggaaggccgaggcgggtggatcacgaggtcaggagtttgagaccagcctggccaaggtggtgaaaccccgtctctactaagaatacaaaaattagccgggcacggtggcgggtgcctgcaatcccagcgactccggaggctgaggcaggagaatctcttgaacccgggaggcggagattgcagtgagctgagatggtgccattgcactccagcctgggtgacagagcaagattctgtctcaaaaaaaaaaaaaaaaaaaaaaagaaagaaagaaagaaagaaagaaaagaaaagaaaaaagaaacgcagccgggcacagtggcttacgcctttaatcccagcactttgagaggctgaggcgggcggatcacctgaggtcaggaattcgagatgagcctggctgacatggtgaaaccttgtctctattagccgggtgtggtggtgggtgcctgtagtcccagctactccgacagctgaggcaggagaatcacttgaaccagggaggtggaggctgcagtgagctgagacggcaccactgcactgcagcctgggcgacagtgagactcttgtctcgaaaaaaaaaaaaaaaaaagaaagaaagaaagaaaaagaaaaagagaagagaaaacaaagaaagaaacgaaacaaaagaaatgaagcctgacttcaagaagttccaacatagcatggaggaggtgtgcagggagcacaggcgttggggaggggggctatgttgggtactcagggaagaggtccttgatctgattaattaattattcaaccaaaatgtcaggctggattctaggcactggaagtaccctgaaggggcttctaatgaacctgtcttctgcattgggtcttggaagatggggggaatttgcccagggaagaaggggagaacattccaggcagagggagaagtctggacaaaaaatgtgactggcctgctttaagaacaggaaatcatccaagtggctgtaactataacaaaaggtagggaggagaggtggaaggagtttgggagaaggctgtgaagagtcttcaatgtcaagagagggagtttgttcttggtcctataggtcataggaaaccccgatcgattttaaaatcagaggagccaaatttattttattttattttatttttatttatttttttgagatggagtttcgctcttattgcccaggctagagtgcaatggca

SEQ ID NO: 586164 - DNA, 4001 bp, Homo sapiens
tcagggccaggggatggggcactgagttgggctgggttgaatgagcaacagttaaggtcgaatgtacatgggaaataccagttttggttttgggacttgtgggttttttttctttttttgaggtggagtcttgctttgtcgcccaggctggagtgcagtggtgcgatctcagctcactgcaacctccgcctcccgagttcaagcgattctcctgcctcagcctcccgaatagctgggactacaggcacccaccactacacccagctaatttttgcatttttagtagagacggggtttcaccatgttggccaggctggtctcaaactcctgacctcaggtgatctgcccacctcgacctcccaaagtgctgggattacaggtgtgagccaccatgcctgccaggtttttttatttttatttttttgaaactggatctcactctgttgcctgggctggagtgcagtggtgagatcatgctcactgcagtctcaaactcctgggctcaagcaatcctcatgcctccgcctcctgtgagactacaggtgtacgccaccacacctgggtaattttcaaaatctttttgtagagacagggtctcattacattgccctggctggtctggaattcctgggcttcagcagtcctcccgcctcggcctcccaaagtagaaatatcagtattgttgtggttagccaccatttattgagcacctactgttgctcagccctgtgctagggatttcacatatgttattacggccttttatgaggtgggcaatattacccctatttcacaaatgaggaaagaggtttaaagggctcaagtgactggtacagaaaccaagtctgtttggctccaaagtccaggccctacccccctgccatgacccagaagcttgcagggcactgagcttgcagggcattgagaaagaggaagtgaattgctagctaatgaaggccaaaagggcctggaacccagacctcctgcttcccggagttcccttcatcaagcatcaggcgaacagcccctctcacctgaagggtccaaagcaatggcctcataatctagtgccttacagagtgaggccgacagctattattacccccattgccagataaatcaactatggcccaaggaaggaaaacctctgcctgggaatccagcatctcagtggtcaggaggagaggccaggagccactgaccctaagaggcagggtccagtgagacaggaagggaccaggcaccagggttgctggagccacgaggcgacgtcccctttttcctggctctttccacatgccacagtcaaggacaagaacacttaggggctgagctttattctataaacagggacaattgctctagcaggagaagggatgtggtgtggggtgggacctgacaggaggacacgtggtaagaaggaaggaagagttggaaggctgaaggcttgggagccacttttcctggccaggcaggcatcactgtgaggtgagggcagagccactctacccctagtagtgtgggttggtgggtttgccacaagggctgcctgcggatactggtgagtcctggtaaaggtgactgctgggctccagatgatgcgcccgggagggctgggggtgcaggcttcctaggtaattttcaaaattgcttcctggagggcgattcccagcagggtggcccgaggcaggtctggcgcccccactctctcctttggaggctaggaggaccggagtccccgaggtcccactcacctccgaggccatgttgggcggttcctcgtcgtccggaagcttcggtcctccgggtctggaagacaagaccggactgacgacctccttggccagcagggtcccccgggccgggctggctccgagttctgggcactgcgcttgagggagcgcagcccttggggacgcggacgtgagcgcgcgccacggtgctcggcgtcctccacgcccgtcccgcccatccggccgccgcgcactcacctccgcctggccgcacggatagtgtcgcgcccgccactggccagggcttttctggccgggatggcgtcagcagccgccggtcctgtccccacccctggcgacggccgcgccaataggaggccgcccggcggggtgggcgttgcctccatcctccaatcctggccgtgggcggggatacctcccgctgagctggaggctaagcggccccggggcggggaagcgggcggggaaagggttggggggaccccgacggggaaggggcctgggctggggttgaggagggtagtgcgctggcgttcgtgctgtggtcagcagacacgcaggggactggagactcgggccaggggtagaggctatgacatcaggcccgggcctggcaggttcacaagatatataaggtgaaatggcatgttcgctcattcactcattcattcattcattcaacaaacacgtaccaggcacctctatgtgccaggtacagagaaaggcatcaaggaaaaaggaaggaccatcagaaatgaagcctgtgccaggcgcggtggctcacagctgtaatcccagcactttgggaggccgaggtgggaggatcgcttgaggctacgagttggagaccagcctgggcaatacaacaagatcccgtctctacaaaaaaattaataataataaaaaaaaagccgggcgtggtggtgcacgcctgcagtcctagctactcaggaggctgaggcgggaggagcacttgagcccaggagttcgaagctgcagtgagctattgtgccacggcactccagcctgactcctctaaaaaagaaaagaaacgcggccggaggccgggcgcggtggctcacgcctgtaatcccagcactttggaaggccgaggcgggtggatcacgaggtcaggagtttgagaccagcctggccaaggtggtgaaaccccgtctctactaagaatacaaaaattagccgggcacggtggcgggtgcctgcaatcccagcgactccggaggctgaggcaggagaatctcttgaacccgggaggcggagattgcagtgagctgagatggtgccattgcactccagcctgggtgacagagcaagattctgtctcaaaaaaaaaaaaaaaaaaaaaaagaaagaaagaaagaaagaaagaaaagaaaagaaaaaagaaacgcagccgggcacagtggcttacgcctttaatcccagcactttgagaggctgaggcgggcggatcacctgaggtcaggaattcgagatgagcctggctgacatggtgaaaccttgtctctattagccgggtgtggtggtgggtgcctgtagtcccagctactccgacagctgaggcaggagaatcacttgaaccagggaggtggaggctgcagtgagctgagacggcaccactgcactgcagcctgggcgacagtgagactcttgtctcgaaaaaaaaaaaaaaaaaagaaagaaagaaagaaaaagaaaaagagaagagaaaacaaagaaagaaacgaaacaaaagaaatgaagcctgacttcaagaagttccaacatagcatggaggaggtgtgcagggagcacaggcgttggggaggggggctatgttgggtactcagggaagaggtccttgatctgattaattaattattcaaccaaaatgtcaggctggattctaggcactggaagtaccctgaaggggcttctaatgaacctgtcttctgcattgggtcttggaagatggggggaatttgcccagggaagaaggggagaacattccaggcagagggagaagtctggacaaaaaatgtgactggcctgctttaagaacaggaaatcatccaagtggctgtaactataacaaaaggtagggaggagaggtggaaggagtttgggagaaggctgtgaagagtcttcaatgtcaagagagggagtttgttcttggtcctataggtcataggaaaccccgatcgattttaaaatcagaggagccaaatttattttattttattttatttt

SEQ ID NO: 586165 - DNA, 4001 bp, Homo sapiens
aaatcatctcaagcaatttggaaatgaagtaccacatgtcctatgctgtctcttccatgcacttgaccaaatagcccaaatagcctataacaaattatttgagatttactggaaaaattccataagatttaaatgagatgactactaataagccatctgcctttgactctatatcaatttaaaacgggttaggaaagtgctttgaaaatcaagtatggtcatcagggaatcagttacctaagtcttcttaacgctgcttagtgaatccctgtattaatcctgctataataaatacattctaaccactaaactggaggggaaaaagggagaacaaagaggcatgtaaagtacacttattttttctagtaggaaaaagccaattaaaactataacctattatttttattggaatcagtcttataggagggcaaagttcctactgccgctacctgttctcaatatttttcttatttcttcctaaacttctagaacagtgctgtccaataaatatatatgtaagccacatatgtaattttaaatatactagtagccccattaaaagaaaaaggtgaaattaattttaaataaacttaactcagtatgtcccaaatagtaacattttaacatatatgtaatcaatataaaatattatcgagcagatattttacactgttcttcctactccaacgacaaaatccagtgtatttaacacaatacatctcagttaggactagccagcacttcaagtgctcaacagttacaggtggctagcgcctaccgaactggacatggcagtttcagtgcatttaatttctattccacttagtgctacttacaacttcaccctctccctttacttttatattaagatctcagtaagtaaccaactacagacaggttcaagccctactttacctctaattactcttacagcaatgctatgaatcatgatttaaaatttaaaaaaaaaaactgctgttaaattattagtcaagcgcccagggcaatggacagtaaagaaataatgtaggccacgggccgagatgaaaactgtcctttttatttaaagctataacaatcatctgaagccagccctgcaaaatgacagccattgaaaaaggcatgctagttcttttgcctttttctgtacttggtcgcctgtgtccctaaacagacctcttctcggcagggtttgctcagcaagtcacttgatgagtcttgcagtctacagagacaggtggggactggtggggatggcggggtgagaggggaggaggagggtgagcggtccaggtgaggaggggggcagttgaaggtgaaagcagacaccgagacggtgataaggccgcagtctcttcctagatcaggaccacgcgacacctgactgcgccctggccacgagcacgatccgacccgtccgccgcagggacccggaccgcgaaaatgtccacaggcttcgacgccacatagtaaaaaaaagtacacatataacatttacaggggctcaaactgccgctgcctcctctccggagcggtccggcctgccggccgcggttccctctcgatgcttcagggaaccaggacagaaaggtccttccgctagctgtcaggtgcgtaacaatcgctaggcgtccgccccgccctccctaccgcaggagccgcagcatcagcaggcgcccgcgaaccgcgtctgccgggtgccaggctgaagaccgcatcctccaccccttccttccggagcagccccagggcacgcgaggaggatgctggcgcggggcgcagggcacggggcgcaggacccggctcacctgggcgtaagcaggtcagggtgatgtggcgggctgaggccagggatgtggacagcttgacgggcggcgaggccgctggcgcttataccgacctggctcctgtaacgcgtgcgggaagtttcatcatgcctgcgaggaccaaccagcgcgcacaggggcggggccgcggggtgtccggggcggagcaggactaagtggggcggcggaagggcgcaaggaggagctcttttgtttccagcgccttgcgtctcagtgcgcctgtttaaggatagcctcagagctccgcccaggctacctgctgttctgacaattagggaggcttctgaacttggtttgttcttcgggaaatcatcaccgtttttttgttgcactgccgtctgatttattatgcagtgcagagaaaagcttgtcctaagaaactgatgcgtgaggcctaaaatgtccttataagatctattaataaatcggggccaggagcggtggctcacgcctgtaatcccaacactttgggaagccaaggcaagaggatcacttgaaaccaggagttcaagaccagcctgggaaacacagcgagatcacatctctataaaaattggtggcacaccatggtagtcccagcaactcaggaggctgaggcagaaggatagtttgagcccaggcgtttgaggctgaggtgagctcaactccagcctgggcgacaaagggagacccccatctctaaaacaataaaatctaaatctaattgatacatgaagccaaaatacatcagtggtccttaaacattttaagtacaaagattccttttagaatctcaaaaaggattttgtcaacttgcctccacaagatgattatgtgcttttaagtatctctttgatgaagaaaagacatcacgatttttaaaaagtatcataacactcttaaatcgtattttactaattacatcagcaccgaaataaattgagaaatagtaaaattatatgtgcacgacctactaagatcagactacagtcaatgcttggagagcatgcaggtttgatatccccatacaacgcattcctgactaaatcaaaaacgtcaacaatttaaaatccctaagaacagaagatggagtagtcgcttagtagttacaggcaagagcaaagatgagagatgacttgttctaaggttcattgttgctggaaagttttcagtatcaaacagactttgctgtatcctaattgacgtactttaaacctgagagcaatgtgggaaagtaggtcttctatctacattttacaaatgaaaaaataagactcagaaaagttgagggatttatccaaacacagcttcacaacagtagagaactgagtcataatctgtgtaaacccagagcccatttcccgtagcatcttgcctatgtagtgaaagacaggttcccctgcttggtgtgttacctagtgtgcttccttgtgctgcgtatctcctgcttgtccgtccagagctctacacttctccacctcactttctatcctggctcccttgccctcctctttcagggagagtgtgcaaaggcagacatttcaaggagatgcaaaaggtgaaattaaaattgctaatgaagttttggcaccattgtcattgataacatcttatcaggagacagggttttgagatcaaccggtctgaccaaagtttattaggtgggaattttctcttcctaataagcctgggagtgctatgggagactggagtttatttcacctctgcagtctcgaccataagagacaggtacgccccggggggccagtttagagacctacccctaggtgcgcattctctttctcagggacgttccatgctgagaaaaggaattcagcgatatttctcccatttgcttttgaaagaagagaaatatggttctgttctgcctggctcaccggcggtcagagtttaaggttatctctcttattccctgaacaattgctgttatcctgttcttttttcagggtgcccacatttcatattgctcaaacacacatgctgtataatttgtgtacttaacgcaattattacaggtcctgagacgatatacatccttctcggctgacaggattaagagattaaagtaatgacaggcataggaaatcacaagggtattgattagggaagtgataagtttagtccatgaaatctttacaatttatgtttagagat

SEQ ID NO: 586166 - DNA, 4001 bp, Homo sapiens
catgtgtggcatttgggccctgtttggcagtgatgactgcctttctgttcagtgtctgagtgctacgaagattgtacacagaggtccagatacattccgttttgagaatgtcaatggatacaccaaaaacaagatgttttaattaaaacatctctaacttgaaaaataactattttggtgttttttttaaaaaaactgcgaattgcagcaaatgcccaaatagtttgggataaacaccctaaggaaaaaatatacattcaagttgcataagtcactttgagctattctttgatgatatttcatttatatctaaaagaaccaaaggtttagctggcttttccggaaaaccagaaccaaataatatatggttagaatgaaaatcatctcaagcaatttggaaatgaagtaccacatgtcctatgctgtctcttccatgcacttgaccaaatagcccaaatagcctataacaaattatttgagatttactggaaaaattccataagatttaaatgagatgactactaataagccatctgcctttgactctatatcaatttaaaacgggttaggaaagtgctttgaaaatcaagtatggtcatcagggaatcagttacctaagtcttcttaacgctgcttagtgaatccctgtattaatcctgctataataaatacattctaaccactaaactggaggggaaaaagggagaacaaagaggcatgtaaagtacacttattttttctagtaggaaaaagccaattaaaactataacctattatttttattggaatcagtcttataggagggcaaagttcctactgccgctacctgttctcaatatttttcttatttcttcctaaacttctagaacagtgctgtccaataaatatatatgtaagccacatatgtaattttaaatatactagtagccccattaaaagaaaaaggtgaaattaattttaaataaacttaactcagtatgtcccaaatagtaacattttaacatatatgtaatcaatataaaatattatcgagcagatattttacactgttcttcctactccaacgacaaaatccagtgtatttaacacaatacatctcagttaggactagccagcacttcaagtgctcaacagttacaggtggctagcgcctaccgaactggacatggcagtttcagtgcatttaatttctattccacttagtgctacttacaacttcaccctctccctttacttttatattaagatctcagtaagtaaccaactacagacaggttcaagccctactttacctctaattactcttacagcaatgctatgaatcatgatttaaaatttaaaaaaaaaaactgctgttaaattattagtcaagcgcccagggcaatggacagtaaagaaataatgtaggccacgggccgagatgaaaactgtcctttttatttaaagctataacaatcatctgaagccagccctgcaaaatgacagccattgaaaaaggcatgctagttcttttgcctttttctgtacttggtcgcctgtgtccctaaacagacctcttctcggcagggtttgctcagcaagtcacttgatgagtcttgcagtctacagagacaggtggggactggtggggatggcggggtgagaggggaggaggagggtgagcggtccaggtgaggaggggggcagttgaaggtgaaagcagacaccgagacggtgataaggccgcagtctcttcctagatcaggaccacgcgacacctgactgcgccctggccacgagcacgatccgacccgtccgccgcagggacccggaccgcgaaaatgtccacaggcttcgacgccacatagtaaaaaaaagtacacatataacatttacaggggctcaaactgccgctgcctcctctccggagcggtccggcctgccggccgcggttccctctcgatgcttcagggaaccaggacagaaaggtccttccgctagctgtcaggtgcgtaacaatcgctaggcgtccgccccgccctccctaccgcaggagccgcagcatcagcaggcgcccgcgaaccgcgtctgccgggtgccaggctgaagaccgcatcctccaccccttccttccggagcagccccagggcacgcgaggaggatgctggcgcggggcgcagggcacggggcgcaggacccggctcacctgggcgtaagcaggtcagggtgatgtggcgggctgaggccagggatgtggacagcttgacgggcggcgaggccgctggcgcttataccgacctggctcctgtaacgcgtgcgggaagtttcatcatgcctgcgaggaccaaccagcgcgcacaggggcggggccgcggggtgtccggggcggagcaggactaagtggggcggcggaagggcgcaaggaggagctcttttgtttccagcgccttgcgtctcagtgcgcctgtttaaggatagcctcagagctccgcccaggctacctgctgttctgacaattagggaggcttctgaacttggtttgttcttcgggaaatcatcaccgtttttttgttgcactgccgtctgatttattatgcagtgcagagaaaagcttgtcctaagaaactgatgcgtgaggcctaaaatgtccttataagatctattaataaatcggggccaggagcggtggctcacgcctgtaatcccaacactttgggaagccaaggcaagaggatcacttgaaaccaggagttcaagaccagcctgggaaacacagcgagatcacatctctataaaaattggtggcacaccatggtagtcccagcaactcaggaggctgaggcagaaggatagtttgagcccaggcgtttgaggctgaggtgagctcaactccagcctgggcgacaaagggagacccccatctctaaaacaataaaatctaaatctaattgatacatgaagccaaaatacatcagtggtccttaaacattttaagtacaaagattccttttagaatctcaaaaaggattttgtcaacttgcctccacaagatgattatgtgcttttaagtatctctttgatgaagaaaagacatcacgatttttaaaaagtatcataacactcttaaatcgtattttactaattacatcagcaccgaaataaattgagaaatagtaaaattatatgtgcacgacctactaagatcagactacagtcaatgcttggagagcatgcaggtttgatatccccatacaacgcattcctgactaaatcaaaaacgtcaacaatttaaaatccctaagaacagaagatggagtagtcgcttagtagttacaggcaagagcaaagatgagagatgacttgttctaaggttcattgttgctggaaagttttcagtatcaaacagactttgctgtatcctaattgacgtactttaaacctgagagcaatgtgggaaagtaggtcttctatctacattttacaaatgaaaaaataagactcagaaaagttgagggatttatccaaacacagcttcacaacagtagagaactgagtcataatctgtgtaaacccagagcccatttcccgtagcatcttgcctatgtagtgaaagacaggttcccctgcttggtgtgttacctagtgtgcttccttgtgctgcgtatctcctgcttgtccgtccagagctctacacttctccacctcactttctatcctggctcccttgccctcctctttcagggagagtgtgcaaaggcagacatttcaaggagatgcaaaaggtgaaattaaaattgctaatgaagttttggcaccattgtcattgataacatcttatcaggagacagggttttgagatcaaccggtctgaccaaagtttattaggtgggaattttctcttcctaataagcctgggagtgctatgggagactggagtttatttcacctctgcagtctcgaccataagagacaggtacgccccggggggccagtttagagacctacccctaggtgcgcattct

SEQ ID NO: 586167 - DNA, 4001 bp, Homo sapiens
tcccaaagtgctgggattacaggcgtgagccaccgcgcccggccagtaatttcaatcattataatcaataatttacatttctatgtgaaggtaatttaaagttttttttttatttaatacacaaaaaattcatgaagcccaggacagaattatgatgctttacataaagaaactgatgctctctggctgggggcggtggctcttgcttgtaatctcagcactttgggaggccgaggtgggtgattacttgaggtcagtagttcaagaccagcctggccgacatggtgaaacccccgtgtctactaaaattaccaaaattagctgggcttggtgaccggtgcttttagtcccggctactccggaggctgaggtgggagaatcacttgaatcccggcccccagatggaggttgcagtgagcgaagatggtgccactgcactccagcagggctagagagagacactccatccccttccttcaaccccccaaaaatgaaatctgatgctctcaaagttttaatgcctcttccaagaaaccagagtgggcaataaactggaagaaattatccatatatttattctgattcctagctcaggcctcattccaccagtacaaaacaaaaaactgtaacgagaaagaactaaaatgtagaaccatttcttaagaaacatacaacaggcagggcacggtggctcatgcctgtaatcccagcactttgggaggccgagacaggcggatcacaaggtcagaggatcgagactatcctggctaacacggtgaaaccctctctctattaaaaatacaaaaaaaaaaaaaaattagccgggcgtggtgtcacgcgcttgtagtcccagctactcaggagggtgaggcaggagaatcgcttgaacccgaaggtggagattgcagtgagccaagatcgcgccactgcactccagcctgggccacagagcaagataacatctcaaaaaaaaaaaaaaaaaaaaaagaaaaagaaaagaaaaaagaaacaacattacagcagagtaaatgaagagagaattaagaatgatcagagtgggataggattagagtaggcctcttgcttgaaggagggggaagaactgatggaagataaacagggtggcattccaaatgcaagcagagaggaagaaaataaggcagactggactcagtcaacgaagattatgcaggatgatacattaacatttgttgcgtttccattagaaaagcaacataaaccttttaaaaataaagaatccttgcgaacttaagacagctgtgttcagatgaaactgtcccttatctctcaccagaatctaggagctcctggaccaatgaaacatctccgatggtcattgctttcttaaatttttctttcttttcttcaatgggtaatagccttttcaatttctagaaaagtaaacattttaaaaaattcttgttatatatatttttgtttccacctcatcaggaaacaataatgtttggttaagtacacaggttttttttcttggctttattttgactaagatacaaagtttgaaaagaattcgtgtcgaaaattatctttcaagggaataggtaatgatggatccaaacccaactgaggagttacgatgacctaaagaagcgtatttggtggtaaccacagttggggagggaacacgaggaaatttgtgcgggtttgcttaagtacaaactcccgtatttccactgggtaaaagggaaatacacgtgagggagtaggaggtttcacgaggctgggcctcgccttcgagggccaggggaggctgaaaccaggtgtggtcaagacaaggcctcctccgctacctgagacgtccggtcgagatacccaatctcccagccatcatcctcgctctcgctactctcgcctccgccagccactggcaggcctcgcagcgcgctcgccgccatgccagccaaggaagctccctgtcggcaccgcgcgcccttcagctctccgggcgcatgcgcaccggggtggggcgtacgtagagatgcgcgggaaggagcgccgtggaagcgctccagtctggagccctccagcgcaggcgcacagcggcgcgctgctctcctccctgccccgtccctccctaaccttgaggcttcttgaggtgaaaacctggcgtgtctgacactggtgacgaagttcgtgcgccaggcttctgctggcacttccagttcctctcagggacttacctttcgacctctttaaagtatttgcttgatgaaatgatgaaattcttgctctgcaaggaatgccttacttgtggcaggagcacactaggatttaacggcaagtaagactagactttccccgccatccttttcatctgccccctgccaaacgtctgttaaatctgtatcccctgggagacggactcttcgtagtaacacctctctcaggagcaccactcagacattcaagaagcccttacgcaagtaggagccgacgaaggagccaggagaaaatactgccccaaagaattcttcctttacatttcatgtgatcttagatctcaccttagatttagaagcttcagaccatcaaaacacttccccgctatgaagtgtagatgtcctagaggaaaatatgaaaggagggggtttccgggtacagtggatccaaagagccagaaagaaagaaatgacttaaacgtccagagagcaaataatacaaacaactccaggtggaagtggcccaagctcgaactcacctttctacatggttctagatggtagaacttctagatgttggtaacacagtgattttctttgccaccacagaaaagtagatccaccaagaaacagggcatattatatgtatctcaagataatagccatgcactattatttgaaagcttttgcggtttttttcttgcagattctctgataaaagattttgaaattatttactttagaggctcagaggtaagtatttttaagtagtttagctatttgcgtgccacatctgtctttctaaatgcattcattcaataaatgctagggattacttagcacagccaagtgctactaggtttggggagacaacgtcaaagataaaccatggagccttatggagctcactttaataagtagagatagacaatatgcaaggaaacaaaaacactattgcagattgtaagtgcttcaaaagaaacaagtgtgctctgtttctggaatcaaaccacttttgtgtttcctgggggaatcactagctgtagctgtgtgcccttaggcaatttacttagcatctatctgggtaccagctaacttatctgtagaatggaggtgatgatagtacccaccaaatagaattgttatgaggactaaatgaagtaataggcttagaataaggtctttctcaatgtaagaggtagattttagataggatagtcagaactgtgcagagtcgtaaataacaagccatataagagtgggagaatagagctttcctggcagtggacaggaatagtgccaaggtcctaaggcaagaaaaaagcaactcaggaccaggatggggcaagtgaggctggggcaagtgagtcccctaagaagcaaagtttaaggaagtactgtcagggtcctgcaaattcagtgagtgcctttttaaattttgctcctgggtcacctcacttaccttagttcttgtcctgcttggaccagaaagaaggcctgaggctacagcttcgtaaggataggcgtgtgtgatgagaggtccttgtgggccttaagtaggaatctggattttactgaaagcaattgaacagtgaaatgtttttaagctaatgaaagacatgttctgatgtgtgtatgtatttaaagacactctaggtctattgtagagaaggtttttggtttgagcaactggctaagtagtcattgcatttactgagatgggggaagaccagtggataaacgtgaagatttaataggcatccccaaattaacatattcaaaaccaagcagccaagtgta

SEQ ID NO: 586168 - DNA, 4001 bp, Homo sapiens
ggattctcaaccaattttaagtgtattaagatacacttaatgcactgtaattaagatacacttaaaaggccgggcacagtggctcacacctgtaatcccagcactttgggaggccaaagtgggtggatcacctgaggccaggagttccagaccagcctggccaacatggtgaaaccctgtctctactaaaaatacacgtggtggtgcacgcctataatcccagctactggggaggctgaggcaggagaattgcttgaacctgggaggtggaggttgcagtgagccaagacctcaccattgcactccagcctgagcaacaagagtgaaactctgtcttaaaaaaaaaaaaagatatacttaatacactttaagtacaacttaatacacttaagtacaacttaaagtatattaagtgtatttttggtcctaagaccaaaagctttgagaactgctgatctagatgacgggacaaagtggggctcccgtctactcctctacccactgcccatgcttcacccccagggccccaccaggttgtcactaacctctcagcacactgggctgagggtaggatggcatctgacagggtcactttgctgtggaacggcccaggtctggtatggttacttggttggttggcaaagagaacattgtaatccacgcatcgaaggaggaaggttgtgaaggtgacaatgaaaataaattgtctgccgggaggaagggggggtgccgggatgctgcagtgatcagggacagccaggtgggctcctgccccagcccccagagcagcccatggttatcctccctgaccctgcccctgctgagcccttgggctgctcgggaaagcatgggatggaagcagctggcacaattaaggaagcaaaatgacagaaggaagccatgggcccaggggaccgagttccgggcccgggctaagcgtctcaccccagctggaagacatcctccagcaagatgcaggcaaagccattccgctggtggtagctgtagatgtggctgcgtgtcaaggaacaagcctgaggcacggggggcctctcctgaggacacctcccctcagccccaacaagtctcccacccatgacgccctcacggagtctccctgccaagaacagtgccagctccaagaggaccttcccatgccacctctgcaggcctagcgcaaaggatatcttggtgaagaaactgtccaggttctggatgtgatgccaggagcctgggcacagaggggagagtgtcagcccctggcatgtgatcaattctccacgttctcaacccgctgccagaggcccagcctgggataagtactggagctcccaggcaccactaaccctctcccacccacacccacacacatacctcggagcccttcagggacatgaagcaggggttgctgctcctccccgtggatgggtgagtcttgggacccctcagggtcacagtcctccagccgctcataatcctgttcagggatcaaagggcctacccgcagcccaggagagtcctgggggcactgctgtgagggagtgggggttgccggggccaggggtggggtggagtgggatccccaggagggagatgcagaggcaggtgtcattgcaggttgagcctgtgttgggggggtggctgggatagggagagcactgtggcaagactgagaagcccctgtcccctgtagcactgagcaagggggccctgcggtgggaggggaaaatgaggagggggagcttcttgtatgaggggcaggggacagagagaagatggagatcctccctcccccaggtccccggcatgaaggaggaggaggaggtggcagtggcatggggaggaggggcaccgatccgggccccagatctccccaccgccccagccgccttcttctccccccccagcccattcggctcaccatcaggccacggcttctccagaaaggttggaaggatgggagctgttgttgcttccacaaaggtctgtgacactgagctgggacttcaacaggaacaatgacaacaacattactaggtgactcagcctaggcaggcctcaggcgtcccagctctcagtcacctgtctgatcactcacaccccttccagggcaacctgaggccaaatccctcagggcctgagaggggcatcagtttaagaggaggggccaaagagcacattgagatgagaagattcctattatctccatcttcagaccttgaatgaatgaaagataaaaagaacagcagccaaaatgacaaaagcaaaaagcaaaatcgtgttagagccaggtgtggtgatgtgtgcttgtgttcctagctactcaagagactgaggtgggaggatggcttggtgcaggttacactggaacagtataggttacagtgagctagatcctgccccctgccaccccccccaaaaacatcctattaaaggattgtagcagggcgcagtacctcacacttgtaatcaatctcagcactttgggaagccgaggaaagaggattgcttgaggccaggagttcaagaccagcctggggaacagaatgagaagactccatctctacaacaaatcttaggaccaagatgttaactatttcatttcttaagagtgtacctcccccacttccctccacacacacactacagtgatcaacagagaaatgttttgtgaccaaaacagaaaagaagaagtaaaggggccaggcatgttggcttacacccgtaatcccaggactttgggaggcccgggcgagaggatcacttgaggccaggagttcgagaccagcctgagcaacttagggaaacaccatctctacaaaatctaaaaaacaaacaaaataattttttttctttttgaggcagtctcactctgtcacccagactggagtatagtggcacaatctcggctcactgcaacctccgcctcccaagttcaagtgattcttctgcttcagcctcctgagtagctgagactacaggtgtgtgccaccacacccagctaattttttgtatttttagtagagatggggtttcaccatgttggccaggctggtcttgaactcctgacctcgtgatccacccgccttggcctcccaaagtgctggcattacaggcgtgagccactgcgcctggtcaaaaataaattttttaaaaagaataagaaaaggttgcatgttttattggtctgaggtgctaaggaagagaagaggggaggctgactttgcagccaagttggggaaaactaagaagaggaggtgaagaaaggaaaggcagctatcttggatttgagagttggtttggagaacttagagtagaaaattggggttctctgaaagttccattccgtttgcatccttatcattttcaactgtgacattctctcaagtccggatcccacttctgggaccccctgaaaagcatcagggctgaatcagaagggaggacagctgtgagtctgggacttggaaggataatttggatacccagggaggagctgaactgagttccttgttgtcacctcaacaaggaggaggagacccaggcagctggtctggtggcttgcccaacgccattcttgaggccctgaatcaccaggtttccttctaaagcccattactgagatactgactcagccaccaggtgtcaaggtctctagggcttaggcctaagggctgatgttggggccagtacccctgaaatggcgatatggacactgtgcttcccagattgttcactggaggcaatcatggaatcacccacaaaacttgaatccagatgtgcctgattttctccttctgtgtggggtattgtagtagtagctcaggtcttgcatgcctttatctcagagtaggaggcagagctatgaaaacaagaccctgtccttctagaggtagcaaaatggaatcccacattgcagaggggccaggaaattcccataatctttctgagacatctgtcaagatgggttatgtggggtgttgtctagtctctcccccacc

SEQ ID NO: 586169 - DNA, 4001 bp, Homo sapiens
gccctatgcttaaacaaaatgccccagtgttcacttttcacaggttgtctccttaacacaactaccgtgtacgacgaatgctattatgcccattttactgaggggaaaacagcttccctctcatctattctgaacccctcttcatttctctaggctgagattaagaatacagaggccggaggccgggcgcagtggctcacacctgtaatcccagcactttgggaggctgaggtgggcagatcacaaggtcaggagatcgagaccatcctggctaacacagtgaaaccctgtctctactaaaaatacaaaaaattagctgggcggggtggcgggcgcctgtagtcccagctactcaggaggctgaggcaggagaatggcgtgaacccgggaggcagagcttgcagtgagctgagatcgcgccactgcactccagcctgggcgacagagcgagactccatctcaaaaaaacaaaccagaggtcaggcgcagtggctcacgctggtaatctcaacactttgggaggtcgaagcaggtgactcacttgaggtcaagagtttgagaccagcctggtcaacgtggcgaaacccatctctactaaaaatacaaaaaaaaattagccgggcgtaggtactggtgtgtgcctgtaatcccagatacttgggaggctgaggcagcagaatcatttgaacctgggaggcagaggttgcagagacgagatcagctactgcactctagcctgggcgacagcgtgagactccatgtcaaaaaaaaagaatacagaaacgcagtggctcacacctgtagtcccagcactttgggaggccgaggtacatggatcacctgaggtcaggggttcaagactagcctggccaacgtggtgaaagcccgtctctactaaaaatacaaaaattagctgggcatggtggcctgcgcctgtaatcccagctactcggaggctgaggctggagaatcgcttgaacccaggaggcaaaggttacagtgagccgagatcacaccattgcactccaccctgggcgacaagagcgaaacgccatctcaaaaaaaaaatgataaaaaaaaaccagaaactgagctaagacacacatgtgttaatcaaaactctgccactatcaggctgtgtgacctcagagaggccacaccacatcccgaacagttatttccctcatctgtaaaatggaatcgactttcccaacaaggactctctgacaaggctactatggagcatctagggctaactattcaaaaacaaacaaacaaaaatcatcagtgtgcacagcgggatgaatgtagcgatttacacatgggtgtctcggaaaagcctgctagtcataaggccgtcctagagaataaagttcatttaccacgaatcctcaggtttgaataccagctcagccctcgcacgagttgtgaccttgaacaggtcacctcgcctctctgattcaacatatatgcatcgaaccttacatggtatcaggtacagtcctagtcctgagctcctcctggagcttcatctgagcttaagccttgggaaaaaagggcaaaagctgcgcctaacattcaagtgcaaagcaactgggtcgcagcgggagagggaagcggctatttcttagcggaaagaggaacagtggcccaaggcggcgcattcccaggcccagaagcgcgtgccccagatgccttcaccctccacgcctaacccggttggcgcaggccctgggcagcaggaaggcgcgcctgggcaggcggagcggggtctggcgcgcctcaagtgaggtcgtggcgaagtgcctgagcaaagggcaggcagctccgcagcttccttctctcccagtgtggctctggaccctggaccctggctcctgcttccaccacggagtccaaacagccttacctggggccggacactcaccaactgacgccattttggagtcctggtgtccgctgtgccggaccgcgcgagggctgctgggtagggaatgcacgccccatccaggggcgtagagcagaggctcacgggaagcaggtcacaactgcgaacaccctggaactactagaaggccatgaagcgaagggcgaggtgcctggacagcaaaaatccgagggtcctgcagttagagagaggggcgcctcagcctgggctctctaccttaaaaggtgggaagaggccgcgctgggactacaagcgtgcaccagcacagcaagctaatttttgtatttttagtagagacagggtttcaccatgttggccaggctggccttgaactcctttcctcacgtgatccccccgcctcggcctcccaaagttctggggttaccggcgtgagccaccgcgcccagtctatttttatttttattttttacttttcagacgagcatttacttttcagacagtggcttgatcacggctgactgcagccttgaactcccggagtcaagcgatccacccatctcagcctcccaagtagctaggactacaggctcacatcaccacttccagctttttttttttttttttttttttttttttttttttggtggaaacagtgtggtgaggagtgggggtagaggctctctattttgctcaggctggtcttgaactcctggcctcaagcgttcttcctccacctccgaagtagctgggactacaggtgcacgccaccacgcccagctaattatattttgtagagaaggcgtctccctatgttgcctagactgctcttaaactcttggcctcgagcgttcctcctacctcggcctcccaaaatactggaactgccggcatgaaccacactgcccgggctacttcaattttgattattttaattaatttatttatttatttagagacagagtctcgctctgtcacccaggctagagtgcagtggcgcgatctcggctcactgccagctccacctccggggttcactccattctcctgcctcagcctcccgagtagctgggactacaggcgcccaccaccacgcctggctaattttttgtatttttttgtatttttagtagagacggggtttcaacatgttagccaggatggtctcaatctcctgacctcgtgatccacccgcttcggcctcccaaagttctaggattacaggcgtgagccaccgcgccgggcctccgatttttaaaacaacctcgagagcaggtcttgtagtcataacttgccaaataaatgccaccctcgttcagttcattctgctacatttcttgtttcagaggtggcattgtggggctcctccatgtctgcttcccttctccccaggcagtgaaaatcgcatatacaattataggtgtgtgaaagcacggccagcatcgccagtgggaattaaaaatggttaaaaaaacaaaacaaaacaaacaggccaggtgcggtggttcacgcctgtaatcctagcactttgggaggcagaggtgggcggatcacttgaggtcaggtgttcaaaaccagccgggccaacatggtgaaaatacgaaaaaaattagctgagcgcggtggcaggtgcctgcaattccagctacttgggaggctgaggcaggagaatcacttgaacctgggaagtggaggttgcagcgagcggaggtcaagccactgcactccagcctgggcggcagagcaagactctgtctcaaaaaaaacaaaaaacaaacaaacaaaaaaaaaccaggctggtcgcggtggttcacgcctgtaatcccagcactttgggaggccaaggtgcgcggatcacctgagatcaggagttcgagatcagcctcctcaacatggcaaaacctcatctctgctaaaaatacaaaaagtagccaagcgtggtgatatgcgcctgtcattccagctactccagaggctgaggcgggagaattgcttgaacctgggaggcggaggttgcagtgagcagagatggggccactgcactgcagcctgggtgatggagtgagaacttgtctccaaacaaaccaaccaaccc

SEQ ID NO: 586170 - DNA, 4001 bp, Homo sapiens; identical to SEQ ID NO: 586169

SEQ ID NO: 586171 - DNA, 4001 bp, Homo sapiens
gtctttctcacccccaggtccccacaccgagagcctggcctggcatgcaactgtttaatgttcaactagtggtaatgcctaaactggacttctgtgcactgactgaaaatcacccttcctagggcacgttggccctatccccaaatccaggaacataggccaccactattttatatcttagagccaattagaaaaaagtgcctcccctgggctgttacactccactaggaaatctttccttggggcttactcacgccttctatgtctttccacagagctggagtccacccctcacccttaccaggcccattcatgcgcaggaacacttccacacatggcaggctgtgtgcacacagacgattccctcgcctttataggtgctattcctttgacttgaaaagcccatcaactctaatctgcacatacaaacttcagcacccagcccaaatgtcactttctctgtgaatccttcccctatacctctcaggcagagttcatcccatcctcctttttattcccatcacagtggaaggtacccctatttgagtcttgccaggttgcatcaaatttctttcttccgggtttggttccctgctgcactgtgctctcaaggggaagaggcgtgtctcagtcatctcagtctccagtgcctaggatgagaccttttatatacatgtgggtcttcaataaatgttttagacggaatgcagagctctagtcaagttactcctcagctcaaaatctctacagaaccttcccctttgcttcctgactttgtttcaaattcctctaccaggcacgcagaagcttagcccacagctctcctcttgcctccccacctcacatgccttggctcacctgcgcttctgggtgctgctggtacagccaccctctgacacttccttacctctggacctttgctcatctgtccctctacctataatgccatcttcccctctccccctgtcaaaattctagccatccttcaaggcccaggccaaatgccattttctttttttttttttttttttttttggagatggagtctccctctgtcggccaagctggaatgcagggtcaggagcatctcagcttactgcaacctctgtcttccgggttcaagcgattttcctgcctcagcttcccaagtggctgggactacaggcatgcaccaccacacctggctaatttttgtatttttattagagatggggtttcaccattttggccaggctggtcttgaactcctgacttcaagtgatccacctgcctcagcctcccagagtgctgggactacagggtgagcccccatgcccaacctcaaatgccattttcttcttgaagcatcccatcagcagatgtggcctccactgttgaaacccacagtgctttatcctcccaagccattcctcaaacacggttctggggttgaatgatgcgtgtttgtaattaacgcacttcgacagcaggtatctcccaacttcagcatagtgggtgctcagtgaatattggcccaaatggaattgagcatccatgctacacctgcagatgggagaggcagcaaactcatgtcccaggaaccagcatgacacagatctctcttgtcctccccttgtttctcaataaggacaatatttgcgctcaggggagaagggcacagcttgcccctcccttccttcctcagccaacggtttggcttcccttctagagaggtgagagaaggtgtgacaggccaagtttcctttgctccaccccatggtgtttcccccaaacacccagcataagttcacctctggcagagttgctttccagctcctgcaggtgggagtcgactcacctgcagcaggcactcggcacaactccgcaggaccggctcacctgcaccgggcactcagcacagcctccagcatgcagcgcctccccgctgccacccgggccaccctgatcctcagcctggcctttgcctccctccactcggcttgctcggcaggtagcgttatgagctttattcatggccaggctgggaagggggagggaaggagggaagagaggtgggagggaaagaaggaggagggggaagattctttggccagggttggtcctgcgcaaaggaaggaggaaacagaactttctcatctgaaggattaggcagggggtgggaggtggggctggggcagggggggtcttaggttggcctgagacggagatcagatactcaattcctcagctaaggcaggagcagccacctctcttggcctttgccacaaagaaaggaaaaagttatttgctggagtctcacccatcaggggaccaaaatgatatctcttggtccgctgtgtcctgaaggctccttctcagccccactgggctgtcgtgctttgcaatcctccctgtgcacatttgtgtctgaccttccctttcctaagtcctccatccctccctgccccttgtactttctctgcgactttcacaaaacctgactgccaggagggctgccattcactgtctcccaccctcctgcctccccgggcactggaaatgctgggttatctccccattttcctgtggaggctggaaggctgatctacatcccctgccttgccctgccaggccgggttctgcaactcacggcagagggaccttggttaccatcttctgctcctggctttgatcttgttctcagccacctcagaacaccaccacactctctatgccctgcaacactcctgctcccaaaaccaaccctgcccccaaagtcctgtgtctgcccctctcatcctcagactctcttctgtagccactgccaggggtgttggtgttgaggttcaagacgtgcactcttgagccgctgagcctgaacccaggtccagcttccatgactcactagctatgcgacctcgagcaaatgactttacctctctatgccaagtttcctcctttatctcatggggacaatcatagtgcttgtcaagacgaattgatgtaatttcatgtaaagaacttagaaatagcccatagaacacacacagtgaatgtcagcaattatggtaagcacattcattttattttccaacttcacccctccccaaataagagtgctgagtttctttctacttaccccgacagtgccttgcttatgatgggagctcagaatcagaagacaagtttaactgcactgaatcgttgggtcttcccagcagcttttcttgtggaatagccccaagtagggccagtccctccctcgcttctggctctgcttataagggaggagggcgatgtttaaattcttaggaattttcaccggggctattccatttgaaccacagaaaattgctgatattgaacaattttcacctataacaatggcaatttcataagctcgaacctaaccctagcattcagccaactagggtttttttccactcactttggaagaggacaacttccattctaggtgtagaggtgaaatgaaagtcagggccaaggaagttatttgagtcataaggaaaattagaatagtgaggaatcagtttctccaaaacaaataaagaccaggctctaagccatttagctgtaaataatttacagtaacagattgcatcgaggcaattactatactttaagcaggacattggagtggcttgggggttgggtggcataaaattagtctcagcagcaacttcatggctttagctaaacagcaggtttcttctgaactcgtcctgctgtgacaacaagctcccttgaaggacacactgacccacagccaggggaaccttgagagtttccatgcccaccacttttttttttttcctttttgcattccccaagaagcagaacgaacagcaatataatttctaggaaggttcttccaatccatctcttggtttccatctacctaggtcagcatgagcactgtctaataatagaacttgcactgagggtggaaatgtcccatgtctgagtggtgcttccaatatggtagccactagtcacacgcg

SEQ ID NO: 586172 - DNA, 4001 bp, Homo sapiens
tggattccagaatactttgtcttcaatttccctagtcaggaaaaatagtttttgtcatcagaatgagatttggtaatccatatgcccattgggtatatccaacgttaacgtgtaaattctttgtagctttttcagagagcaatttatcaatgtctatcaaatcttatatccctcatacccacaaatcaagatgtccactgctatttatccagatagacctggatatgtatggagaaacagatgaacaagaatgtttcttataatattgtatgtaataattatagtaaatggctgtaacctagatatccatcattaggggaatgattaaataaactgtgatataacagagccctgtgcagtcagcaggaataaaataaatctgtatgtcctgtatatggaagaaggatgcccacgggtgagtggggcaggggaatggtgcgagttaggttagccaaaactgacctgcaagacacagttccaccatacagtcataagtgtgtattgacactgctgattaaagaaagactaagactcacactcctgaaaggggaatctcaaacatctagactgaaatagattaaaacatccaccatactgtaacagatgcatgtccaaagtttaactgtgaaactgggggatgatcttgaagccattgccaccagcccgcacacagcatacgtagccagggaacggagccctggtcatcagaggcctcccagcagcgatcaatgcattccaaactctggggtggggcagtttgtcactcctgaacatttctccattccttaatagaccatccaagtcatgctgcccattggactgcctttagtgtcacttagaacaggtggcagggaaggacacctcccaggggttggaagaaagtgaagctctttccaatggtgaagttgaaggccacatgagagccaaggggaggaggagggcacagaagctattcccaaagatcctcccgacggccctactgctgccaaatcacactttttccccccaggtcaaccttctggaagaatttccacacctccagagtagatttaattttatcacgtacagagtatctactgtgtgctcgatactgggcctacccattgtcccagtttcacacaggaccaactctaaagtcctcgagctggccagccgaaggctgcaggacctggcctcctctgtgtcctcctccagctttggcctctccagggaccctgcatttctcccagctcccacccccttcaggcccttcgcccaggctttcccctgggtttggaaactcaatatcctcctctccaccgtccatcccacgccccgcatgaccctgtcactcctccagtctccatgtaaggatcttcttcctccacaagccttccctgacacctccagctccctcaaggagctaagccccctcctacatgcccccagaagagcaatcatttgcaatcgcttgtttaactgcctggattccccacacacaaaccagtgaagtccacgaggctagaaccattccctgtttccactcccacaccggtctaggtcaacagcaccacaaagtgggtactccagaagcaataccccatgtatagaccagaggataaacatcatccctcaggaagtgcacatggtctgggcccacatttgtgccttttgacaccaagatgaattcaaagctctcctactgccctgtctagtaactacagccaagtgaacatagaccagagacccaaggcattcactttatgcagatcaaaagcacagcatcaacacccttcttaccccagcttcctccaggcgggtcctgggtcagggtctggggcagacggtggtttccccaacctgacgcacggagcagggagccccaggtctggcagccctccgtgcttgctagcagtcctgggcggagcagcagccagtgaatccgcaggtggcttccccgcagcgcccctcccggctccttctcctcccaggctcccaaagagccaggaggcagctctgttgtatcaacactggcctgttgtgggtgaagacaaacctgccccaccggccagcctgctcagcccccgccccacctgtgccctctgccatgaccttaagttcccagcaggaagcattcatttattttctaatgaaagtaacttgcccctcagggagctgaaggttgaggacaagattcctggaggccttagaaggaccccagtaaaccaaaacatcccttgaacttgtaaaaacaaaataactttgaaaaataattttgggggccgggcgccgtggctcacgccggtaattccagcactttgggaggctgaggtgggcggatcatttgaggtcaggagtttgagactagcctggccaacatggtgaaatcctgtctctactaaaaatacgaaaaaatgagcagagtgtggtggcgggtgcctgtaatcccagctactcaggaggctgaggcaggagaatcgcttgaacccaggaagcagaggttgcagtgagcctagatcacgccactgcactccagcctgggcaacagagccagactccatctcaaaaataaataaataaatatatatatctatatatataatatattatatacattatatatattatatacattatatattatatattatatacattatatatagtatatacacatatgtatatacgtgtgtatatatgtgtgtatatacatatataaatgaaaaaattaaaatagttttggaaaataaaaaatatcacactcaccatcctatcaactattaaccaaaacactctactttcaaaggaaaatagaagactccttatgaaatgcccaatggctgaaattcagcttccgctgtggcccaggtaaaaagagacagaagcatatgtgatatgtgcccttttcctttggaggggtcttgtcttttcctatttctttgacagagggtgcgaggggcagaacaagccaattaggtgcatttctcttgcccaggggtgcggggctgcaacagccacctgcgtttgtttgaatgagctttgcttctccagggtggtgcacagatcccccacagggactctccccaccagtggccttagaaggtaccccagaatgagtgaggggggtgcttttttttaacttttctgtacttttctgcaaaagtacagcaaatagtacagggaacccctacgtacacattacttggccacaccagttcatgaatgttctatcatccacaccccacccacttcccctccccacctctgattatttggaagcaaatcccatacatcatattatttctttcaaaatattccagcaggtatctctaaaagataaggattcttttatacgcacatatacacacacaaacacacataaaataccagtcactcctaaaattcaataattcttaaatttgccttaattctaggattcaagtttcctagattgtctgtgatttgcatttttttttaagaggcagggtcttgctctgttgtccaggctggagtgtggtggcgcaaacacagctcactgcagcctcaacctcctgggctcaagtgatcctcccacctcagcctcctgagtagctaggactacaggtgtgcatcactatgattgggctgattttttttttttttttttttttttgagacagtctctcgctctgtcgcccaggctggagtgcagtggcgcgatctcggctcactgcaagctctgcctcctgggttcacgccattctcctgcctcagcctcccaagtagctgggactataggcgcccgccaccacgcccagctaattttttgtatttttagtagagacggggtttcaccgggttagccaggatggtctcgatctcctgaccttgtgatccacctgcctcagcctcccaaagtgctgggattacaggcgtgagccaccgtgctcagccattggctgatttttttattttaatttttataaaatatgacaacataaagacagggtatcactatgttgcccaggctggcctccaactcc

SEQ ID NO: 586173 - DNA, 4001 bp, Homo sapiens
ctgcctgtctttaagaacaaaggcagcactcacatgtccaaacggcctttgggcaaagctaactctaatccaaacgaggcccttgatctttgatctaaagcactgcaagctggtgctggacacaggagcacgcgatccctttttcaacattactaagcaggttgtgccagtcctggctgggcactgagtagacaatggtgaactggacaaactccagcccctgggaacatgcagtcaagggaagggtgctttgtaactgaagataatatgaagcagaaactggtgaatggcgcagcaatctgctagaggaccttcgaaaaataacgccagctaaacttatcccatacctacaaagtgtcacgcactggtaggtgttttaaatgcgttaccgcaggtcatcctcacagcagccttttaaggcaggagtcgacattatctccattttacccatgaagaaactgagacttgatattggctctaggtcacacagctagcaaggagtggagaaactgcgtcagtgcccacttgtgccctttactggctgcaggaggggtgacagacatctccaatgtcactctcctctttaccttctggatatgccctctcgccccacctcctgcctgttcccggctgtcagagacccaggtgcagagagacctcagaggtggcgtccggggtcctggcgtccctcctgcggacgctcgctgcagagcaggaagccgccgccccggggcggaggggcgagccgggccagggggccggggtggagaggtctgcagggcctgcgcgctttccttacccgcggttgggtcccttcggcacgaaccagggcccggcgatgccgacgaggccccagaacgtggtgaagatgatgaccgggagggcgaatgagtgcgccgtcatggccgggcgcaggatgcccaggcaggatgcagggccgagcagcgggcgctgcaggtgcgcgggtccccagccgggcagcgcgctgagcatgcgcaacaggagtcgagcacccgaagcgatcagccgggccgggccgcgcacgcgcatctcctgatccagcccgccgcgctgtcactcaggacctgcctaggagcccactcgctgattggctgagcagggccgcggacagagagaaatgccgaggaataggggcgcggccgcccggtttcggcgatgggttatagggtccgcgtcagccccgcgcccgcacagccaacgtcacgccgcattcttatttccaaagacccctggagcttggggtcccaccccagcggtctttcggggcgtcccctgcccttcacgcgccgcgccggctcggcccgaagcgccctgcggacccgcagcctgggccgccccgaacctgacggccccgcgggggtcggacgcgggaggaacggcctcgctttcagagacgcagcgggagggcggtccccgctgtccctctggccgggtcctcagcacgcgttctcctcactcccaggactagcgagcggcgggcgcggaccggggcctggggtcggaggcggcgcagccagaaaggccccagcggcgctgagacgtttgggggaaggcgggggcttcgcgtttcgatggcgggaagcggaatgaggttggaccggccgggccggcgttcagggacccggcgggaggcggagggctggcgtcctcgcggacatccatctgcagcgaaccaggcagaggctttgggattagatccttgactccttgcgtcagtagttaaggtttgtttaaatataaaatgggatggcccttcttacaaggttgctggaggattaaatgaataggcatgtggaaagcacctagtataataaggctcggtagtttcttccatcagggctggaagagaccacggagcctgctttcctccttcggcgtttggatctcacatatcccttcttctctggcgatcaaaaatccctatcttctgtagagatcccttttacagatcagtggcctccaggcggtatctctagcaacaagtgctaccccaagcggccggccacacatattccctggcttcatgacatagggaggcgcagtccccacgtgatgcagaagggaaatgtgcctgtccttgcactgaccccgtcagccatgtgtgctcctggctgttttctgaaatcaagaaccagttacatccgcccttctccgttctctagttgaaacctccctatccatccttccaacattcatgtaagttggaggtgggcgtgggatgacaccaaactgttaggtataaaataccatcctagccttcgaggggtttctaaagtagttgaggagtgatatattctggtaaaatcataatgctggacagcgcagttctaagagccctgtgatcaaagtagccaaatgcccattatgagaattcagagggtggagaaatccaggaagactccctggaggaggtgagattttagctggattgtaaacaatggttatttttctcatccagagtgtgtacattgttgagaacactggcctaggataagggtgcacttggcatccaggagatagagttaagagtatgtccatacaggccttcaaaaaatcaccacgagggctgagcgcagtggctcacacctgtaatcccagcactatgggaggcagaggcgggcggatcacgaggtcaggagatcgagaccatcctggctaacacggtgaaaccccgtctctactaaaaatataaaaaaattagctgggcatggtggcgggcacctgtagtcctagctactttggaggctgaaaggagaatggcgtgaacccgggaggcagagcttgcacttgcagtgagccgagattgtgcccctgcactccagcctgggggacagagtgagactccgtctcaaaaaaaaaaaaaaaaaaaaaatcaccacgaaagttctatagctcaaaaaagacggactttttgaattttgttctggaaaaaaaaaaatcctctgtagaaaatgacagctgtaaagtgaaatgtatttccttctttgcctctgctcctttgtcttggctttggccagaaccaaaaacattgctgagtctgagcagccactcatattagcagcctgcagctcttactcttttcctttaatgtctttgatgtttcatttctgtcctaatttgcatgtgattgcctgtgtcatttgtttggcagctttgtgatggtctgaggtccatgaagggattaaaaccaggaactggctccttctccaaccactaaagcctcatctgggcccacaagccctggctgttccctggagcgtgactggaagatgtgagcagctttgtgctggagccccatttccatgggtaaactgttcacctgatcaaacagctccccagagttccacagtaccacatatttattttctagaactttgtttttagctgaaagggatcttagaggctaaggcaatcctatcactttacaggtgataaaactgaggcccagagaagtgaagtaacttgcctaggcccacacagctcatcagtaaaagagccagaacacatggccgagacttctccctaatccagcgtctcctccacactcccagctcacccctagggtttgtgcccaggctgaggacactattttcagaggcactaatgtgaggcaaagggcatgttaccagacacagccccgcctaccccggtcccctgaggtggagctgtgcattccactggcttcacggttcccctctgccctggcggcttctggttggtattggcgccaccgactgctctgccatggctcctcagtgagtgctttgggtgtgattgacaagtttccatgacatctcccagggagtggggtcctgatgttggtgacatctctatcgttcatcttttcatggggctgatgaattcctagaaagggtagaaggagaaggagccactgaaagaggctctttaaaacttccctgagtgtcccccagtgcaaatgaacaggagccccaggacacttgaaggccctaggaaatcac

SEQ ID NO: 586174 - DNA, 4001 bp, Homo sapiens
atatatacacacaaaaaaaaaatggctggatgtggcggcatgtgccagctacttgggaagctgtagtcctagctatttaggaagctgaggtgggagaatcacttgagcctgggaagtcgaggccgcagtgagctgcgatcacgccactgcaatccagcctgggtgacaggagtgagaccctgtctcagaaaaaaaaaaaaaaaaagacacattaacttttaaaaagaaaacaaattatttaaaaatagggctgatgagaccactgaaggcctcaaggtctatcctgatgagggtggtggaggggtcagagggaaagtttggcatgaactaagatcacaagctaggaagaggacaccttgatgaaggaatcacactttctgcacaaaaagaacctggccttgtgctccttctctcctgtggtcacccacccattcatttgtttattttatttttatttttttgagacagggtctccctctgtcacccaggctggagtgcagtggtggatctcggctcactgcagtctccacctcccaggttcaaacaattctccttcctcagcctcctgatttcttgggattacaggcacccgccaccacgcctggctaatttttgtatttttagtagaaatggggtttcaccatattggtcaggctagtctcaaactcccgagctcaggtgatccacccgcctcggcctccaaaactgttgggattacaggcgtgagccactgcacccagactcattcgtttatttactgattaaaaattacttactgagcacccaccccctgccagtcactgggttagatttgatctctgaggtcccttttggttggaaacataaaaaattcttgaagtaaaatttgtccttctcccatgataacttgggtcactttaccagacagcttagagaatggcagataacagcctcccaggtcagggactacctaatacaccaggcagcaggaaccagtctcagccagcagccctgggctggactgtttgggggaaacaggtgagtggtttattcctgagacttggtacaggggccctggagaaggggtgaggaataaaataggaggctggtatccttaattccagtcaccaggacccctggtggattaaaagcatgcctgcacccacactctgacctaaggcaggcagtgagggcttgagtgcaaggtcttagcagaaggctctcacagtcccgacatttctgcctactgtgctcaagactacaaggaaattccgaggccgcctgaggagacctgccaagagtgtgtacctggcttaccggaggcagaaagggttgagattgggttcaaattctagctctgcctctgccgactcgtaactttagtgtgtgccttaccctctccgagctttagttttctcacctgtgagtaggacaaaaatcatccctgccttacgggacgatggtgagcctctaaaggaggagaaagcagaacaaagtccaagcccactgtctaggctgtcacgagctctgttccccttctttcatgacacacgatcatgtgaggtgggggggctcgtggacctgatacagcttctgtcccaccgagccccaaacggggacttggggcgcggaggcctccgctccggaagggcggaaggactttcaggatcgtcccctcacccccgtccgggcagcctccagcctcgccccgcactccaccgagcagcagaagggcccgttcaggcctcgcgcggtaccgtaccggaaagtgtcttcgatctcattgatggttgtatccttctccaccaccaggaaattgggatggcggttcttgttaagctcccctatgccgcccagcaggaaaccagtcaccgtgtcctcgtctccgatcactgcgatgagcttacccctccccgccatccctgcagccgggcagagctcaccctagagcaccagaagccactgaaaccccgcctccgccgtacggcgccccgtcggcctcaacccccacccttcgagcatgcgcagtcctcccagccgcattccgggacatgcgcattaacagcaacacggcctccatgtgaatacgcctgcgccgtaaagacaggcccgaaccaggggactacgattcccagaagaccgcgcggcaccacgtccttcgcgggcattcattcgttcattcactcgttccttggttcattcgttcaacaagcgctttggacctgacgctgttagacgccgagaccccagagaagagacgcagttactcatctcaagggcagggtctgggtctttatcgtgtatgtatgtgtgtaactatgacacatagttaacaagtaacacacgtttgttcagttaaaggaatgcaaaagttaatgatgatactgcctagtgaggtggaaagtcaagggaacaggcgactacaaagctgtgtgttaatggttagaatgtgaaaagtatatggaagcacacatccatggtaactaacccatggagagagggggcgtccaaagaacccttccccaagaagcttgcttcagatctaagctgagacctgaaggacctgcaggatgaaggggatagaagtgaggacaagacggtgttctaggcagaggaacagcatgtgcaaaggcgtactgactagagagcgtagggccttcaaggaaagttaaataattggtaaggccaggcatggtggctcacgccacacctgtaatcccagcactttgggaggctgaggcaggtggatcacctgaggtcaggagtttgagaccagcctggccaacatggcgaaaacccgtctctactaaaaacacaaaaaattagccgggcgtggttgtgggcgcctgtagtcccagctactcgagaggctgaggcaggagaattgcttcaacccgggaagcggaggttgcagtgagccgagattgtgccattgcactccagcctgggtgacagagcgagactctgtctcaaaaaaaaaaaaaaaaaaaaaaaaaaaaaattagccaggcgtggtggtgcacacttatagttccaggtactcgagaagctgaggcagcagggcttactcaggagttcaaggttacagtgagctatgatcacggcactgcacttaaacctgagcagcagagcgagaccctgtctaaaaaaaaaaaaaaaggatctgcaggctgggcgcggtggctcacgcctgtaatcccagcactttgggaggctgaggcgggtagatcacctgaagtcaggagtttgagaccagtctggccaacatggtgaaatcccatctccactaaaaatacaaaaaaaattagcccagtgaggtggtgtgtgcctgtagtcccagctactcgggaggctgaggcaggacaattgcttgaacccgggcaagggaggttgcagtgagctgagatggcgccactgcactccagcctaggtgacagagtgagactctgtctaaaaaaaaaaaaaaaaaaaaaaaaagatctggaagttatcctgaggacagttatcctgaagctgctgagggatttcaagtaagagagtgctatcgccaaacttacgttttagagctgtcactcactgttgactgtgctgtgtgcagaggcgaaactgagggaggagaaaccaaattgggaggccactgtgagagataatggtggccaggactcaggtggtgataatgggaaacgcagagaagtaggtagagccgagagatatttagatatttaggacaaaactggtttcagagtggatgtgtttggggagtgaggtagagagagagacctgggtgatttccaggtttctggcctgtgcagcacatggatgggagtaacattgccaagaaagtgacctctgtaagatgagcaggctgaaggggaaggagccactctttcctcctcccttttaacaaatcagcactcccggtgtctggcatggggtttgtgagtttggagtgcttgagacgtgcccgtggtctggtctagcgattgtatgtgtgataagcttgggattcgggcacacctggg

SEQ ID NO: 586175 - DNA, 4001 bp, Homo sapiens
ttcccaaagtgcttaattagcagaaacattatgctagggaactgtccttgaatatgtacgcattttaaccttcatgttattttttctgaagcacaaaatttcctctcagtggatggtcaggaaatgattgggcacagaaaaccaaccatctgaagtgttgattcataaaatgagttccatctttccacgcaggcttcagctgccttccagggtgacatccctttttatgagggggaccattctttggcatctaatggccttttctccattcatttgggatgaccaatgcacctatggcctacttatgtctgaactctttcaataccaccaacctcttctgtccccttgtgccatcttcccacccccaatttcagccaattatgtttataagacatcagttagtgaatcacaattcaaatgaatccacctatttgcttagcagcaagtggcccccggagttgctccatttgaagcccataggccagagttacatacggcaggcttgcaaatgagaacaggatatgatttatttatgacgaccatatgtgtttgatgcccaattgcagcaggttgtggcttctcttgcatatcttggtctgggatgacctatctactcagtgtgtcccatttcaggtaccgtatttccatgctgggaaaagagagatgatgactgctgaggggctgcacatacagatgctcctaaccctgcttgccacataacaatctgtgaccaaatgcaaagtgggccaaatgtaacttgctgcaaaggtttgccatgtacaatggttttcagtggtgagtggagaagtagctgctggaatgactgaccatgtggggttcattaagctgttgtgcattcacccacgagaaaggctgggatgcttgtgaagggaactccactcttcatttcagaaattttaacgccccaccatttggcaatgatgctcccaaggagaatggcagatatgcatcagaaggttcaaacgtggagtccaactgaagtgcagtaaacttctgccttcaacagtctcacccccctttaccccccccccagttgtatttatactttgaaagaagttaacatgaagcagtagtcacctgggcgtgctcaatttttgacaagccttagtcactctgtacccagcagaacaattcacattatattcgaaatcctgtgaagattctgccacacatgctaacactaaaatgccagtagctccacttaccttctttattaagcctcataacctccctgctttttccaccctcttttccagcctcttctaaatctacatctgcagatgaaaaagaaaaggaaaacagaaaataaggaaaaaaggggggaaaaaagccaaagtcaaggggggagggagagtgtttatttgcaaacagatcgatataaatactgtatatgaaattctttcaaaaattgacaatgcaacattttctcccaagtctgggtttccatctacctggcccagataggtacccaaaaaactatgcaagcagcaacaaagtagccttttaaacggacaacaccgtggggctgcgagcccaccccgcgggctgccacggggagccgggcacagacagacagacagccctggcagccgggcctctccctgtgcattgatgatctgtctctgtgtgtatttatttagagagagagggagaagcatggaggacaccgggggccactctctctctcacacacacactttttcccagtggctctaggtgaatggaaaggttacaggataataaaaggaggaggaggtggtggggttcttactgtcggagcagtgtaatttggcggcgtcgatccaggaggaccagggtttgcccagaaacgcctccggactgggcactttgcgatccagtgtcgccattgctcttccttcttgttgctttttccctgttccttcggcagcagcagccgagagacacgggattcgagaacgctccgacgtcatcttcggaacgttccgacattgagtgttctgaaagggggagggagggaggaagggcgggatgggaggagggcggcggaggaggaggggagagggagcggaggaggggcgggcgctcgggctcccggagccggctcggtggggctcgcgcgcccgcggccgccaggggcagcagagaggcacctgcagtccgcgcccgcccgcccgccggggccgcccgcctgccggggaggggcagcgcggacgggcgagcgccgcgtgcgggagagcgaaggctgcagcgcgcccggcagccgggatgcagcggcgccgcccaagcctggggcgcaggggtcggggcacacggggataggcccgacgcggggccgaaggaagggtggtctttcccgcagagttgccgctggaggaccgaaagttttgcaggcagcccttgcttccagcttgtcgctctctccccgcgtccctgtcgcccaacgcgaggcgcccccgctggggtcccgacggcttggtggggaggagccgtgaggggttgcgccccccacccccacccgagccagggaagggaccctggtgacctcgcctcccagccctcacccccgtcacccctttcttctctttcctggaggactttggaccatggagattctgcagttgttgctctaggagctgaaaccagtgggtagatgtcgttctgaaacgcaggtgagtttggagcgctacgagctaccttcccatctcaggctgcggggcgtgcaaaactcaaaagttagggcccccggacccccgggttccccgcgcggtgcgtatctccggctctcagagaaccactgcatggactttgctccagggtcagcagagcgggagggcgaatttacggctcttggaagacgacgctaacgggcctagcccctgagccgtttccagcgctccctgccgtgagacgagggtggcccgggtttgcgcaggcaacctttggccaggaatctgattcctgggagaattcacttcaggcttaactgctctagccagctagaaagggagcgctagatttcctctggattttggacgttgggtgctttagttgagattttcaccctttaaagaaggctttaaaaagtcttctgttacttctttttaacaaatccttttgtttactagaattatctaaactatatggacaccgccctcaccccacaagcgacatatttttttttctctttcgccagcacccttttagctctcaccactgctgtttcccaagttgtcacagctgaagcgcactgattggaagttgctttgtactgactgagttctgccctggctgaaccatctaataatttccctgagcttggcaccctgtatcgctaagccagtgttaggatgggcgatgaaggaggagctgcggatttgcctttagttgtgatgtttgtgtgagtcggcttgtttgtgtcagactcagataaactgcatttgcctttgctctctttcgaagggctcctacatagctaaggtgtcgctgggtgaagaattcccattgtaagaattggtggtgttaacaaatatgtattacttgttgacctcttgttatatgctagaccctgggcttgacatttccttccttccttccttccttccatctgtccatcttaagtcaaccaatattgcctgtcatggaacagctgtgccctcctgtcaggagggaaagatgagtgagacccatcctcaccctcacagagatgcagtctggtggtctctggaagaaggaagttgtgaaacttaccgattccttgggaaaacaggcaggtacacagggactggcctgtgcagtgggtggggtggtctctcagctgtgccagttcatagaggaaccgaaatctagttaggagtgaacagaaactgcgtaacagaagatgggctctgctctgcatcttggaaattgccaaagatttgtaatggtaaggtgaagactggtcttgcggagggagggggaataatggtattagcagaggcttcaagctgagtataaacatg

SEQ ID NO: 586176 - DNA, 4001 bp, Homo sapiens
tgattttttaaaaggtcctgaggtgattttcatgctccatgagcttcgggagtcactggaaatgccgaccaaacatgctgtctttggaatcagaaagatctgggctcaaatcccagctctgtcactcattagctctgggacttggggaaataacttaaccccctgagccccagtctccttacctgtaaaatggggacaataatacccacatcatggagttacaacaggacaggtgctcgagtacactgagtccctcatcttagcgcacatcacacgctgtaattactggtttactggtctaagtgtcctgtgcctggacacacccagagggcaggtgtcctgtttactcttttatctccagcgtttagcacagggttttgccctcaagagcactcactctattcactgtggaataaatgggtgttgggaggattgataacatgtagaaggtggctaccacagtgccaactcatgggagacgcttaacattaagttcccctgatacatgataatgtccattaaaaacacacacacaggtagtagctttcctcagtaggcagttctcagccttatccctgcccctgaattaaattagtccacttacaagaatcctatgggagcacactgtttaaggaccacaggctgataagagaggccaccactgctttatttctatctgtaccagtgtctactttcaacagcacagggccatggtctcttataagagaaggtgaaaagtctccactcactgctaagctcatggtgtcgctcagagccactcaccccacagactgtcgtggtcccacagcagccactaataacggaaccatttctgttctccttggagtggcagttggcagcggcaaacaggaagttgtcttgaagtagggtgtggttatgccctgtcaacatatgcgtacagacacatactttttttttttttttttcctttctggcccccttttctctcccttctttagaagcaaaaggtctgagttattttggtgaaaacaaactttttacatgatttaagatcaaccatcactaccacacaaacaaaaacccaggacagaaaggggcctaaaacacagcaaagggtctattttcctgccaccagtcactcgcttgtggcatttagttaggaactgactgtgtgtgtgagtgggtgtgctttttcccctttatttctctgggcacacaggaaacagagccctagctagaaaccagccagacacgctgcccagcatcctagtgagcccgtcagtccacctgtgggccagtcgcctgcgttgattcagggcctgcagtgtgcatgcactggacaaggaccatcgtggacaggaaagaaggaaaaaaccagggtgctagtttcaaacaatttgtacagtttgaatagaaaggaccctgaacatgtcttaacacaaagtacatataaaaacaacaaagaaacacaatgactgagtagataagtgcactgagtagataatacacggacataaacatggggcgttggggttgacacgccgggaaggttcattgcagctggcttcccggtgctctgaaaggtgtgctagaaaattttccactccactccttctcaggccggaggctggtgcctccagaagggctgtccaaaatagactggtccccaacccagcctcctactcctgacctctttctgaggcagctactctccccgctccccgcctcagccctgtctcggctccagctccagcccacagccggagagcactgtctatgctaacactcattttgctaaatgcctcgtgggctgccagcatgatctgcctgccaggatctctgttccgtgacctgcgcccagccccacgccgtcctgtgtggccctcgtgccctgcgctcacacttacacatcccggggaggctgccttgccgtttggataaggaggctgacacacgctgggcaacgcgactcgtggtagtagatgtttcctggctcctggatgagggccctggccagtcagaacgcaccacttcccctttaagagagcacgcccagacgagattagggaaaggcagaaagaaaagcccggaacagtcagggttgtatcctgaatttggcagatgaacttgggtattcctgaaccacacacacaaggtgtggtcagaggcagcaggctcctcagaggagtatcagagccagcgctgtgtgtgcagggctgggcctttccgcagccctggagctgctgtctgtctggcctgggtccccggtccccaggcagcctgaagacacctcaggccttcccactccctcttcgctcagggtctgaccatcttgataggcagagtccacttcattacctagcactatgccttagagagagtagagaggtcattataatgattggaaaatacttttgtgggttgttggaactattgatttaagcagggagatttcattcattctggatatttagaaagtttggtccctgatcttggccaaggacagtagatttggaggggggagaatgcctaccaaaacaatggttcacaaaggccacacgttatatgaaatgtccagaataggtaaaaccatagagacagaaagccgacttgtggttgtcaggggcaggctgggaaaagaaggcggggggagtgactgcttaatgggcacagggtcttctttaggggtgatggttgcacaacattgtgaaggtactcaataccactgaattgtacattttaaaatggttaattttctgtgatgcaaatttcacctcaattaaaaaaaaaacagtggcaaagtacgctttgcgcatctttatcttctgctaggacctctcctgtgtggcatccaacatttctttgcaaaacctggttattacctgatgaatattaaatcaaccttagataaggggtacatgccttttagtaaaaaaaaaaaaaaaaaaattaaacctttaagacacaaaagtattccaagactcagaagtatgattttcctggagaattttggactgtggggagacagcactccctcacgtcatgatcacatacttcctctcatcacacacaagctaggcagagcctactaggcattagagagattagagagggcattataatgactgcctatgtaagatggtctcctgtggggaccatcccttcagccacttgaaaacataaccaaagccagagacagtgagtcccccgtgggagaattattcagggagaacatgactggacttctgggttcttggcttccttttcccctcttgttgagagagtttcttcccagaattgaggagaattcatcagtttcagattgagagggagttgtgctggctggcaaagcagaactagtttccacagttccatttgtttggaatgtagtaggggggtgttgagggggtataaactgaccacccatctgaccagccctcgttttcagtcatttgcagctttggctggagattgtctgttcccaacagttaggctgtgggcgttgttccctgatcccaggctagcaggtcaagggcccctgggcacattcccttcacccaggggactgtggagtagaggcctgctggatgttgcaatgcttagaagaaacacagatgaaagggcaggcccgaggcctgggaacctgagtctttccagagaaaaacgtgagttgctttcctagtatctctgcaaagagtttcaggatgacctggaggacagagatgggaacagctactcttgggccagctctcccagagcaatctggaccttctagagcattggcccctgcctcttgcagccctgctctccctccctatctcaggtgcccgtgtaggctcttggtagccttacacctgaggtagcgtaagttctcagcaaacatgtggcttaggataataagatgcaatatttactctagcttctgaagagcagcaagtttagaaccgtaactctaaatacaaaaacaggcaggttcaatctaatttaaaaatgggcaaagggctgggcacggttgctca

SEQ ID NO: 586177 - DNA, 4001 bp, Homo sapiens
aggaataaagaaagacacacacatagacacacacaaagccaatcacttagaaagaaaaaaaagaaaacacaaaaaaggaaagggagagggacaattggtgacaagcccttcagatagcagctaggattttattcttccctcccaccagtcttccctggtgtacctttttctgtcctttaactaaattgctcatgtacacacacacatgtgcctatgtatgtgtatagataatattataattaaccctttctgtaacagaaccccatacagaatacagagagctattccacccttccctcttctctcccctcctccctcctttctcccaaccaggagaaaacgcccccttccccagcttcaccaaaaaaaaaaaaaaaaaaagaatatgggggggtaatggggggaggcgcaaagaaatcacaaaaccccatcagtctccagtcccgaggacacccgggaaaggtatatactacacagacacacacacacacacacacacacacacacacacgaacatatgactctgtagaaagcacacagaaccgtccacaggcgccccaaacccagcaaagagacttccaccagccaagaagccatgattggggagggagaggaggaaggagtgggggcagagctctctgtggagagggggcgcattgttgtgatgcccgaacccctttctttctgcccatctgctgtggagggggtgcagggagggggcgcaggggaaaggcgagcgaggaaacgagaccaggcacggctttgcgactccctcctgctgcctgtctgcccgcgcccccagctccccccaccaacaataagacctcagcctagacagacagacagacagacagacagacagacagcccggagcgcggcgagggaggcaggagagccgggcgcagccgagtggggtcgtgcataaagggaacccgggggaaggggggtcccccttacctccagcgcttcaaaagtgacaaagctggtcatggcaaatccatcaatgatgtcctcttctgccgaggtggactctctccgcttcctccgcgggggtctgggccgggacggggcggaggacgggggcttcccattgtcttccttgtcggagcccgacgacgaggcgagtgagagcgcccgggtccggccagccccgccgccgccggccgcgccggcccccagcccgccccgggagcgcctctcccggtctcgctgcgaccgcgaccgccgctttttgcggagtccatggccccgcgtcgggccatccatggttctgctgcgccggggtctccccgcttgcccgccacaggctacggccgcagccacacaaaaaaaaattgacaccgagccctccctcccccttcacggcttccctccgccccgaggagggcgcgggggagacggcggccgaaagaagggagagaggggaagaaagagaggagaaagaaaagggggaaggggcggagagaggggaggagggacggggagcgagggcgagaggcgaggagcccaagtgtggggctccccacagcaccgagggtcggagatgcctgggagcagcgccgagcaaagtaatggctgaacacacaggtctcctttagaggaaaaaaaaataactcaccaagcaagcaataaatcagaatagcggaatgctttgatcaagagactgggaggctccggggagccctccccgcggccattctccgccgcgccccccgccccccgaaaacgcccgcgcccccctcaactcgatccaaaatcgggtccgaaaaaggtcgcgggaaaagtgggggcaatgaacttcacccgcccctcgcgcaggaaaacacccccgccgcctctcacacacgcctcggagaaaactcactcccaggctcccaaatttttaagaaatgcagccaggggaggccggggctccggagcgacccaagaggggcgagaccccccagagaggggagcataataatgcaatcattagcggaagagagggcgaaactgcgagcggcggaggagaagggaggcggaggaagggaaggaggatgctgctggagcagttgtggggtttgcttttcggtcttcgaggggggaggagagggagatgaaagaagagaagaagcaaaccctgtcgctgccacccgcccccctcctcacaaaaatattttttccagtcccagagaagaggtcacccttcctcaaaaaagggagggggtgagtcagtcagtcgatgaggaaagcagaaagaaatctccagcgggagagacaccggtgtgccgccgccgccgccgccgcttctctcgccgccccgcctgagggagaagcgcagccgggaacgctgctctcgccgccgccgctaacgctgctgctgctgccgccgccgccgccgagaaagccccgagccggagggtgcacggcgtgtccccgggcggctgcagcgggagcccgggcactgccccatcctccgcccgcccgcctgcctcgcgcagctcccgctcctccccctccgcggccagcccaccgccgccgccgccgccgccgcccgcctcagcccaaccccgcgcccgcccgctcgctcgctcgctcgctcgctcgttcgtgctttcgctcgctcgctcgagtgcgcgcgctcccgcgcacccgccctccccgcgcctctctcggcgcgcgctcccgcccccgcggccccggccggcgggatcacgtggacggctgggctccctcctcccccgccccctccccagttgtagagtgtgtagaaagcaaaaggctgggggctggccgcgctcgcgagcccagggcatgcgcgctggggcggccgggcctgcgcactgggggcggtggggagctgtgaggggggcgggggcgggggcgtggagggggcgcccgcgtggggtcggccgcggccgggcagagttggcgcgccagggcgtggaagccgccggaggatcccgcctgtcgcagcggggacgcgtgtgggcccctgctcccaggccacttcgcgcgcgcgccccccacatcctcctcgggacacttgtccctggatcctctacccctggccggcccgaggccgccttctcgggaagccccaccagcccccaagggtgttttcccttggctacctgcgctgcgaggagagaagggaattcagagaaggggtacaaggggggcgtccctgggagggggcgcgactggaggagacagaacggggagcgggtgccaaagcgcgggcctttgctccgcctgggcgcagtgggagcaccaactggcagagttggaaacttttcctccacgtggcaccacagtgcgtggacgagcgaccccgcgcccggatgacccctgggattcccgcctcgtcttccagcgggggacctagggacgcacgggcggcttcagatccgggagcgcgaggcctaacagccgggggccgaacttgaacctcggaggcggccgcgggcgaggggcggggccgaaggggccgggaccgccgccccagctcgaggacccgttagaccggcaaaccgcagtccctgccccgcgggcttcctttactttttgggagtggggggcggtttccctgctttttccaccacagcccctcctcccgccgcaatgtggctgatgctcataaaaagttgtattaaagagctgactgcagccgagaatcgatcaacaaaagcgaccagcctctctgggtaaaatagctgtgcgtttttcagggcactggaattgatctatacggatcagaaagaccgacagcccgctctcagcagcctcttggatacgcttcactttctgtccaggcacataaacaccacggcaccaacccttcgtcctccctagtagcccatacttgtggaggaagaaaaggaaaataaactggcatgtattaattacaatgggccaggcaccgtgctagagcgctgtgtatatgatttcacctctttagaatacaaatgtgcacattttattagtattactggaaggagggtggtagagaaaacagtaag

SEQ ID NO: 586178 - DNA, 4001 bp, Homo sapiens
agagtcacaactcaatgagccatgcacctttaatttacacctggaagtaaaatagttaaagtggagaattaggtagctgattaatctatcctggggcaaatcttacatactttaattaaagcctctgaaaacacctgatgtacaggttataaagaacagattctagaccagtcattctaagacttatgcatgtaacacacactttccaaaactttttttttcgctcttgttgcccaggctggagtgcaatggcgtgatctcggctcacagcaacctctgcctcccggcttcaagcaattctcgtgcctcagcctcccaagtagctgggatcacaggcatgtgccaccacgcgcagctaattttgtatttttagtagaggcggggtttcaccgtgttgtccaggctggtttcgaactcctcacctcaggtgatccacccgcctcggcctcccaaagtgctgggattgagacagggtcttgctctctcacccaggctggagtgcagtggtgggatcaagggtcactgtagcctcagcctcctgggctcaagcgatgttcccaccttagcctaccgagtagctgggactacaagtgcgctatcacatgcaactaattttttaatttttttgtggagacagtgtttccctttgttatctaagctggtctcaaactcctgggctcaagtgagcctttcatatcagtctctaaaagtgctggcattccaggtgtgaggatatatttcaaaattacgcacaaacacgattttttcactcccatcacttttctcttattccctagagaacttaatttttgccaataagtcttctaaaatgttacatttcctgtggaatgcaagaaactaaatgcttcattagctagtggtggcaattactatttttaatacttcaaaaaagcatttcaatttactgttcactagcacattatgacatcattcccttccagtgtttgcttgctcattaaataatcctgtttctattttgttctcttgccttcaatacatagattgcaaatattccatttcagatgctgcattaatgattcagtgaggctgctgaaaaacgcctttatatttgaacggtttggtaatacactttctcttattgcggttgatatggagagattaatctctcaccaaaaggcaaaatctggagaagatgaaatagcaaaactaaggaccaatgggaagggggaggcaaagtcaatcgacaaccgtacctaacaggagagattccaaggcttccatcagataaacaaaggaagctgatttttctacggaggctgcatgtgctgcaagctacctgaagcattagtatgcaagcccactgagcctattaccttgaaagcagagtccaagcactgaatttttctagactcccattataggtggacacccagaaagccagtggagacaatgatggacggggaagagagtggggccggtcttcgatgctttcctcccactccaccaaagcagaagttaaaaacctacaacctacacgtatcaaccagctcctccgctgctcaaccatttttcaggggcagaaggaagaggttgtgggggctgggcttcatgtggggcgggtgggaggagctgcaaaaggagtcaggttgagaggcgaagggtcgcaggcgctgtggggaggactgcacgacgcgagctgagcacacagaagcagggcaggggggccccggaaggggcgaacgcccgaacggctgggggcgggggcgggccctttcctcacctggcagcccttcttgtggtgaaatccgaccaccacgatgtgcagtacgggcccccgggggacgccatccccgcctctcctggccttctccatgggcggccgccgcgggcccgcacgacgacttcgaccgccaagggcagcgggtctgacgaccccaccgtgtgcggaaagccgcggacttcgggtgtcagcgagcacagcacatgagggccgcacagggagatcggtggaggcaaagcagctcccgccgcccccagggccacggccgcccttccctcatccgcttccgcagcttccgggctgtcacctgacacggcggccgccgccggcgaggcagggctgggcaaggccgggagggccctgacggggcggggtctgagaggccgaggtggagcctgggggagcggggtgggtctaggagaggagagatcgactctgtggggcggggaggagcggggggaggagcggggggagggcgggtccgggtgggacttgacgaggagcggcggggtggggcttacgtgacccgggcggctgggcttgcagagcctgtggtgtccgcgggacctggaggtgcggcgtggcacacctgctttttcctccctggattcaatctcaaagcacttccttctcttttgccttctctttttcctcaaagttttcccacttccctcttctcttctgttttccttgctttttcacatcttttcggttcactctccgagtgtccgattccttcacctccttgcctttgcctctgtggcccccgtccttattcttaaatatgtagtaacatggagcatactggtgaggttgcgtatctgtgtattcagcctttaaattacttgcttactcgagaattcttgtttgtttctttctagagtttttttttcttcgtttaaatattatgtgtaggaatctgagacgcatttaaaacctgaaacagaatatccttgacaacaaaggaagtttacttggatacgtgtaaaatgattattctagtcctgcgattttataagaatattcttttcattccatctcattttgggtgtagtactctggtcaatacaaaatatatgggctctgttgtcaccagggttttttaattcctttactgattgtactacaattcttttttaagcagtgaatctcatgtcaatttaaagtgcattatagaaaagatttaacaagtcttatctaggacagttttcaaataacctaaaggataggtgtctgcttcaaatagaattcgagattactacagtaactgtgatattttgcacttctggtcttgaaaagtaaggagctctgttctaatctaaccatagctgagaaaaacagtaggcttcctaaatcaaatttagtttctgtgattcagtagaactgttttaatgctaatactgcagacatttttcaagatgctgctatacatttcttttctgtattacaaaattattggcattggctaagaaaactgtgtaaaactatattgctccctgtatgcagaatatattaactgttttcttaatatattaactgttttgagctgtcagctgtgtgatgtgttaactattaatattttcttgatataacctgtcttgatattttccacaattggcatggctaaaattactgtctaattgaacaccttttaaagatgtatataagggccgggtgtggtggctcacgcctgtaatcccagcactttgggaggccaaggcaggcagatcacctgaggtcaggagttctagaccagcctggccaacatggtaaaaccccctctctagtacaaaatacaaaaattagacctgtaatcccagctactcggacggctgagacaggagaattgcttgaatccgggaggtggaggttgcagtgagccaagattgcaccatcgcacttcagcctgggggacaagagcgagatttcctctaaaaaaaaaaaagatatatataaaaagagggtcaggcgtggtggctcatgctggtaatcccagcactttgggaggccgatgcgggcagatcacttgaggccaaaagttggagaccagcctgggcaacatggtgaaaccccatctctgctaaaaatgcaaaaattagccaggcatggtggtgtgtgtaatcccagctactagggaggctgaggcaagagaatcaccctaacccgggaggtggaggttgcagtgatctgagatggtgtcactgcactgctctccagcccagatgacagaatgagactc

SEQ ID NO: 586179 - DNA, 4001 bp, Homo sapiens
aaatacataagttagccgtgtgtggcagtgtacacccgaggcaagataattgcttgaacccaacaggcggaggtttgcagtaagccaagatcacgccactgcactccagcctgggtgacagaacaagaatccatctcaaaaataataataataatcataatttaattgtacacttttaaataaccaaaagagaggccaggcgcagttgctgacacctgtaatcccggcactttgggagaccaaggcgggcagatcacgaggtcaggatatcaagactagcctggccaacatgatgaaacccgtctctactaaaaatacaaaaaaattagccaggtgtggtggcaggtgcctgtagtcctagctactcaggagactgaggcaggaaaattgcttgaacctgggaggcggaggttgcagtgagccgagatcatgccactgcactcctgcctgggtgacagagtgagactctgtctcaaaaataaataaataaataaataatcaaatacttttaaaaactaaaataaccaaaaaagtataattggattgtctgtaacacaaacgataaaagcttgaagggatggatacctcatttttgatgatgtgattatttcacattgcatgcctgaatcaaaacctctcatgtaccccataaatatatacacatactatgcacccacagttttttttttaatttacaaaaaaatcagtagaccttgagtaaagtggattactctccatagtggtgggcttcatccaatcagttgaaggccttaagagaaaaagcctcagatgtcccctaaagaggaaagaattctgcctacagtctgcccttggaatcaagactaagacatcaactcttccctgggtctccagcctgctggccggctctgaagatttaggacttgttactcctcccaatagtgtgagtcaatttcttaaaataaatctctactctctctctcttttgtatacatatatgtaaatctcttcctatgtgtgtgtgtatccatgtgtatacagtgtatgtatgtatgtgtacgtacatatatatgtatatgtgtaccacctattagttctgtttctctggagaaccctgagtaattcagattttggcacagaatcagattaacattccaaagtgattgttatataacaaacatataacaccttttctgacaatttgtaaatgtcatgaattttaaactcacacaactgagaagccattcgcttccatgtctttatcctgcacattctcatgccacaaacagcctccttcccttatcctaggagtgactcttgatctcccggagctcccactctcttctcttccagccactcgccttccagacccactgcagtggtgtctgagtgtgggatttgggcacgggtttccttctagcaccatccctccagccaacctgccttcccactttccccttggggctgctctctctttccctcagcgtcaggcaggtgtacccagccatcggaaggagggaaggaacaggagcagaagcagctccaggcatatggttcctactccgtcctgactgtctaccccaagcaggtcgcttggtctttggagtctttgttttcactgtaaactaggggttttagattcagattcctgaaggtcttatttcgggccagcgcagaggctccctgaatgctcctggaagtgtgtgagctgagggagttgacagccttgggcacccattcctgccgtatgccagggtatcccagctgcatccagcctgtctcccagccacatgtcctgttcctcacctccttccagtcctctccagcacccatcccttgctttccccactcaccatcttggttctcctgggggacagcaggacccagaagcagcagcagagacagcaggacaggcaccattcttaccattgtgtctgcttggagggttctgggcaggaggcacagatattatcctgggtcctggggccctgcccaggggaggtgaatctacaggccaatgggagtgccaggacgggctcctcccctaatagagaaaaaaaaatgatacacaagctaggctgggcagaggttatgaagaatgaatctacacacaggatatgcaaattcagagctgagtccagagttgatctctggactgaggctttgtgtgtgcctggggtggaaggatgccagtgggtaggaggtgcgtgtgatgggtggcaagcgcctgggatgtgtcacccttccagtctattgtgacaacccctgggccagtaggggcatttgtgtgtttttggaccacactgtatccctgccttccagaaaaactctcaacatgtccaagacatggacctgggtagaccccagctggggtgggaccctcactctcccacatccgatcctgccagaggctgtgtctggaggacagtcacattcccatctctccctccttcctttctgtgcctgtggaatcccagccttccatgatggaagcagaaatagccgcatcctccttttgcagcctccctggcaacagaacgagcctcccaaaatgctgggattaaaggcgtgagccaccacgcccagccaagataatttttaatgcatacaacaagactcgttttacacagacgaagccagttatttgaaaaccaggtctttccaggcacgctcagtgttgatgggctatttgcagagagaccctccgaatacaaagcaacatgctattctaaagtgactggggcccgggtgcggtgactcatgcttgtaatcccagcactttgggaggctgaggtggttggatcacctcaggttgaggtcaggtactcgagaccagcctgggcaacatgatgaaacctcgtctctactgaaaaaatacaagaattagctgcgcgtggtggcacatgcctataatcccagcactcaggaagctgaggcaggggtttcaccatgttggccaagctggttttgaactcctgacctcgtgatctgcccgcctcggtctcccaaagtgctgggtttactagtgtgagcaactgtgcccagcctctcttttggttaaagaaacctacaaagggaccttttatagtgacttcaattttatggaataattgtaatgctcctaaggccgttgtgctccaaagtctagccgcaggtattgttattgattgggctccaaaagggcattattggcaagattgctccagcaaaaatacctcatgctcagagtttaattatttgttagattatgtagaggatggatggcagtcatacaggctgagacaatgggtgtccccttacctatttaaatggatggatgcaggcattactcctcctagaccaaaaatgattcatccctttgttaccccagaacatcctcaactatgaaaattagctgcagctatgacaggaataaggatatggaacactacctatcaactccttcacactaataccaaaacacccacattcaacatcaccctcatatctgaacgggtgatacccatcaggagctatgtcaaacccccttacatgctgttggttggaaatataattatcattcccaatacacaaactatagaatgtgataactgtaagctgttcacgtgcattgatgctacttttaatcccactacaagtactctcttggtaagggctagggagggggtatggataccagtttctttacatcgtccatgggagtcttccccctctattcacatagtcaatgaagttcttaaaggtatccgcaaaagaacaaagagatttatttttactcttattgccatcattgcaggactaattgcggttactgcaacagcagcaactgctggagttgccatccacaattctgttcaaaccgttcaatatgttgaattgaagcatggcagaaaaactcctccagactttggaattctcaggctcaaattgatcaaaaattagctaatcaaattaatgatctccgccaaagtgtaatctggctgggagatatgaatttggaacaccgtatgcaattacagagt

SEQ ID NO: 586180 - DNA, 4001 bp, Homo sapiens
ttaaatagtagcaatctcaatacaaatgtaggaatttctcaaatttcgaatttctcaaatttctaaagatcgccctctatgaaggcaacacacgaatagaagagtttttggtcacagtgactgagcatcaaaaacgctgtgtcaactgtgtctactctccctacctgtaaggcataatttatatgtgacagtatacactttgtgtgttaagataaacggaacggatctcttggatttcaatacataacaaaaatgttcatgttcttctcttactttcattcaacaaaagttaatagactcctctgattttaggaattcagaccttgaaaacccagaaactaaaattttaggtttaaaaaagtctatcaaaatgactaaacttcctgattcaagcaccagggacagaaaaaagataaaacacaccaaccaaccaaccgaccaaccatttatttataaccttaaacatgcctatacatgaacttagagaacgttaaagtttcaagggttcgaagcgcctaggctgaattaaaacaaaagttgttttgtgttctattaatagcagatgattaacagatatcttatttcacctggaattcatttgtaagtatgtaaactaaacaggccactaatcctaagtctctgtctgtgtctggaaaaattctctcctaatacatgcaagttaagagaccggctatcaacgcattccttaaggttaggtcaatttcattaaaacctcggttgttctttgacttcaagaacctcaccaaataacccatatataaaagccaagttcaactgaaaggtgggagaggaagggtctaaggaggagggcgtttcccgggagaacgcccagagctcggctcacctggcgatcctaattacaggggagtttcacccccacattcttgggcgctttcttttcttagaggaaactcgagcttgtgtctttggtcccggagggcttaagcccggcagccaggacagcacgggtcactgattccaagaagttgggaggaggacgtgggccccaccgacgcacaacagacccctccccaacttaagtgcactagttgtaaaatgtgtagctggtcaggggatggggggtggtctccagagctctgagggtcagggaagaggagaagggacggggaggagaagggacaggggaggcggagaagggccaggagaggagggggagacacacggggaaggaggaagaaccaagaggagggggagggggagggggagggagggggatagactggggagaagaagggacaggggaggagggggagacacacgggggagaaggaagaaccaggaggaggggagggacagtgtcgaggggcaggggaggagggagagtgaacggggagcggaggggcagagggagaggtacagcggggcgggaaagagagacagggaagaagcacagggaggaggggagggaaggaggaggaaaagtaggggggaggggatggggagggactgggaggaaggagagggccaggggaggaagaagaggggctgtggagggccaggggaggagtgggagagaccgggagaggtggaaggacgcgggggaggggagctggagggagggaaagtaccttcccgcgtaaagtccccttctgaaccccgaggtggaaagccctgacctccctgagccccgggccctgggcttacccggtaggtgctctccgtgagccggttcacctcctcgggcccccgggacatggctgcggccgccgggcgagcaagcgcgggaggacgcggctgggcctcgtggccgccggactccgggcagcgggagggccggggcgcgactaaggggctctggagggtcggccgccgccgcagccgtcggcccgagagtgcccgcgcgcgtctccgctgcgaaaatgtcaaaacttgcggcagcgccgccctggccttcttcgaggagcagaggagaagcggccggacgccgccagaggaagctgggcgggccgggcggccccacctgaggcgggcggggcagacgggggcggggccgcagggccggaggggcgtggcgtacccacctgaggcggcctggtgagcggggcccggccggggtgggcggggaggaggcggggccaggcagctggaatgggcgtggccagagggaagcgggccccccgagtgggcggggtcaccccacctgtggcggacagggcagcgaggccacggtgcgccccctcgcggctctcccagagctccggcgacgtagggcccgagaccctggagtggggaccggtgtggagtgggctgctcgctttgctgttttgctagggcaagggcagcctgggggtgtttagactgtggtcctggagcccttgtttgcctcgcgtggtgctggccccggggaccccgaggcccacttcctccatgagggcttccttcaagccctgcgttttggggaccaagggaaggggccacattccccagttgtattgatttccctgattgatctcttcttgccccgccgctcactgaccccaaaagttagagggacccgtgggggcatcggccctcctaggtggagaaaacgggctgccacttgcagttttgaaagctcctgatatatcaaaaaattaataaatgccagggtctagttaccgaaatgttagtacttttttttttttgagatggagtctcactctgtcgcctaggctggagtgcagtggtgcgatctcagcttgctgcaacctccgcttcccaggttcaagcgattctcctgcctggcatgagccatcctgcctggcccccagatagaagctttttgtttgtttttgagacagagtttcactcttgtcccctcaggctggagtgcagtggtgctctctcagcttgctgcaatctctgccccccaggtttaagcaattctcctgcctcagcctctcgagtagctgagattacaggtgcacgtgccaccaagccaggctaatttttttgtatttttagtagagacggggtttcaccatgttggccaggttggtcccgagctcctaacctcaggtgatccgccctgctcagcctcccaaagtgctgggattacaggcttgaaccaccgcgcccggcccagtagtacatttttaaactttacattaacaacgacctttaactcaatgcagtgtaaccatgctactcacgagattgttgtagggtttagaaaaccacctgagctgaagtgttagggaagcctctcttcttgtcatcactcaaactctgtggaggtgtgtggctcctgggctccctattttgtctccatcccggcctcagccctgcccaagggtgaggcagctgccttctttgggcctctcttccaggattatgtaccttgggctgggtgacagccttctccccagtaagaaccaccatttagctacctgagacccgcacccaacaagggcagaggtcttattctgattttttaaaacctctgggcttggtggctcatgcctgtaatcctagcactttgggaggccaaggcaggcggatcacttgaggtcaggagttcgagaccagcctagccaacatggtgaaaccgccctgcccccgtctctactaaaaatacaaaaattagccaggcatggtagcacgtgcacctgtaatctcagctactcgggaggctgaggcaggagaattgcttaaacctgggaggcagagattgcagtgagctgagatagcaccactgcactccagcctgagggacaagagcgaaactctgtctcaaaaacaaacaaacaaaaagcttctatctgggggccaggcaggatggctcatgcctgtaatccgagcacttcgggagaccaaggcaggaggactggttgagtctaggagttcgaggccagcctaggcaatatagggagcccacccccatctctgcaaaaaatataattaaaaacattagccaagtgtgatagtgtgcatctgtagtcccagctattccggaggctgaggtaggaggatggcttgag

SEQ ID NO: 586181 - DNA, 4001 bp, Homo sapiens
acattccaagtcttcacaggacaagaaaaaaaccagatcaccacccctccactttaaagtgccttaccttataccataatgacaaaaaagtgaggtaatatttaaattaattgaaagtgaaggagtaacattccaccttcttctgttgattgacttacagggatgaggtaggaagagcggtggattctactcctctttcatcatttgaccttcaacaagtcaacctccactctctgggccaactcagcaaaccaagcccgaggacccgaccacctccaagatccacttcagctccaagatgctacagctctatttctccaagagccttcctccagcatggactgattttccaggcccctttgtgtgtatactccccacaaagggacactcacaaattgcactccaacaagaatgagattatcctctaaagtactgcgttaaagtgaggatcagggagaaatgaaataactctgagagacacttcctcctatacagaagcaagcaagaaactgagaaatgaagtccttccgaacagaaggggctgagaaaactcataacacattagccttcactcttaaagctttcagtcaccaaagaaatgcttgattccgaaatcgtttttgttttttttacagataagcctcaaaaacgattcttctggcacccattaaaaaaaagcaaataaaagctgcacaacttttcactaaaagataatgcttatgcaagaaatcttagtcatgacgagaggatgcttcctttgtaaaacatccaatttcatgttcctaaaatacaacataaaaacttcacgtcttggtttttttgtttgtttaattttaacaaataccaatctccttctaaaccttcaaaatttcaaacctgtgtctgcccagggaaggcaggcatcagctcctccacaggcagtttccttccctccctttcctctaagcggggaatctcattcctagttttctgccccagggtcctgtcagttcatccccggcctaaagtcccctcgggagacgaaaaaaacgccaagtatccccgcagagatcggggtaagacgcagttgagtcttgcacacgccgcatcacgaggccgcgcgagtacaatttcaaaacttaagctgcaggtttcatttaaatttttaaaaaatttttgtaaaaattaaaggagaaaacctagctccccctccccacgcctcctcctccctctcgggtcctcaaggcctaaagccaacccggggaaggtaatggggatgggggatgcgctcctcgccggcgaggccccgggacaaagtgcggggccccgggggcggccgaagcgggcccttctccttccagggccggtgcgcgccccccgccggatcccctggaaggatcggcgggcgcaggctgagactcagcctccaggcccgcgagcggccggggcgcgctgacagctgccccgggccggggatgcgcggctgacctggtctcgcgagccccaggccctaccccggcccagcccggcccagcccggcccgcgcggctggaaaaggatactcccgggtgcggaaggcctcctgagtgtgcgggatggtgaagagcggctcctctccgggcaacggcttcaccagcgggaagggcttgcggcccaggagcggcgccatcgcggcggcggcggtggggactggcggctgctggggccggccccgcggcgcagcactaggccccgcggcccggagcgagcgccaggcgcccgggggtggggtgggggaagggaggggtgagagggcggcgcgaactccggctccctcaccgccggcgcggccgcgcgacagtcatggagcggaacgccacggcgcagagctcccgcgcacaccgccgcgcctcccagcagccccccgccgacctccgcttcgggtcccggcggccggcagtcacgactcctcctcagcagcaccggaggaaattattgaaaaatggcgggagattcccctcctcccccgggcccggccaacgcacacactaacttgctcccccgtggcgccggtggcgaatgctccaataggcggagagctggtcagcgctcacagcctattggctcggaggagctgccgctccgcgcctgggtcccgcccccctgcccctgtcgcgtagttgggttgcagcgcactagagggcagtctgaagaggtgaaaggtcacgttatgtaagcgcccgtgataggcgtgcgggcctccgacggcagagttaaaagtgggggacagcgggggatggagaggacgagaactcaaagaggtcaagccggagaagcccctcgcatatacagatactgcgccatctgtcaccgacggcgacaccgacatccgggcaccactgtccgtgtggtgcgccggagggggagggtgagcgcgcggccaggggctttgtctttcctcttgggcgcctcccccttcttaaaggcgccgtgctcggccacgcccggggatgcgcgggtggggctgggctgcagggaggggttggcgggaagtggccccgggagcttaccctaccaaaggttctgcggaaggacaacgtgggggccagctttgctcaccccagagttaacttctgggcgggagtgtggttgagatctgggtagaagtatactgcttgtttctaggggctggctggaaagtagaatatagaagcttctttggagaaatagattaaaagacgtacttagttttttggtttttggtttttgttttttttgagacggagtctcgctctgtcgcccaggctggagggcaatggcgcgatatcggctcaccgcaacctccgcctcccgggttcaagagattctcctgcctcagcctcccaagtagctggaattactggcgtgcaccaccacgcccggccaattttgtattattagtagagacggggcttctccatgttggtcaggctggtctcaaactcccgacttcaggtgatccgaccgcctaggcctcccaaaattatcattatttttttttttgagacggagtttcactcttgttgcccaggctggagtgcagtggtgcagtctcggctcactgcaacctctccctcccgggttcaagctattctcttgcctcggcctcccgagtagctgggactacaggtgcgcgccaccacacccggctattttttgtattttgtagagacggggtttcaccatgttggtcaggctggtctcggactcctgatctcaggtgatccacccgcctcggcctcccaaagtgttgggattacaggcgtgagccaccacgccctgccagagctgtgactctggctttttttttttttctcccatgatactcagcacctggctcggaacattgtaggtgctagtgaatactatttgaatgaattggatctaccttttattttttattttttttgtagagacagggtcttactttgttgcccagactggtctcgaactcttggcctcaagcaattgtcccgcctctgcctcccaaagtgctgagattaggcgtgacccactgtgcccagccaggatgtctctttaataggtacgtctgggccgggcgcagtggctcacccctgtaatcccagcactttgggaggccgaggcgggcggatcacggggtcaggagatggagaccatcctggctaacacggtgaaaccccgtctctactaaaaatacaaaaaattagccaggcgtggtggcgggtgcctgtagtcccagctactgggaagctgaggcagaatggcgtgaacccgggaggtggagcttggagtgagcggagatcgtgccactgcactccagcctgggcgacagagcgagactccgtctcagggaggcgggggggggggggaaataggtacgtttggtcgggcacgatggctcacgcctgtaatcccagcattttgggaggctgaggcgggcgcctcacctgagctcgggagttcgaaaccagcctgagcaccatggagaaaccctgtctctactaaaaatacaaaattagccg

SEQ ID NO: 586182 - DNA, 4001 bp, Homo sapiens
agaaatcaggtcttccagtcaaagaaagatgacaaatgcatgtagtgttcaaaagaagtatactgcttttgaaggcaataatacaagggctcactgttggaattttcaacaaaagactcaaagggcaaaataacacaaaatttggagtaggacagctctgggtgcactttctgaccacgttacactacatgatcttaaacaagtcccttatcctctagtatctcaattgttctagggtggaggaggataaaatggctcaacccatagcaagtactcaatagatgtcagtaataacccaacagtagaaacagtgctagtaggagagacagtggtagtagtggtagttgaaagagacggtggtagtgtgttctgtgcaagacacaattacgaatgccaaactcaccctctggaccgaaattttaaatgggactcacaaagactgatagtaatcactaatggaaatgttattaaccagcagggatgttttataataatttcatgtattttaataattttcaaaaatatttcaaagtattctaaagcgtaagacttactacatccctcaaaaggtgtaaaagttttaaaattactatatatactattgctgttggattttttcccttcagtgagcatttctatcaagaagttgtaccataaatataagtgtatagttgtaatttaaccacgacaattacacacaaggaaaaatcccttaaactctgacaaataacttgtaacttattttcaaaataaagttttttaaaattcttctttaaaaacttctgggttttctagttttttttttaattcttccgtatattcatgaaaaaaatctcagtaattgttttctttataaaatgctaataagttagaaaatctttctctgaatgctggccaacttaagacccatagcttatcctgcagcatctttcaagttgtttatcaatgaggacatgtaagatgtgtatacctgtaagatacggtttcatttttaaagtaaaagtgagatacccaaaaaaatacatttctccaggaaattgaagtcaaaggcaggatttgactggcaggaggtgctgataaaatcagcgcagctcatctaaactgttgtggtctccaagtaacaagaggagaaacaataatcctattactagaaggattgggggtattagtacatgcatcctacttcagtcgtaggctgggaactgctttgcccatttactcacagacctgttgaagtgtctcaggaggatgctcatgctccaagtgacattcctcaatggaatccttaaaaattctcatcccttttttctcaaaagtactcacagaatctcatacactttgtgctcctagtgtttgtttatttcagtgcaaacatctaagaaatcaatcaccttacagactccaaaccattatactgcattagagaatcttgttcacaaaataaaacatggaaagggtattcatgtacccgaagtttaacaacagacataccatcttacctgatgccacgtcagatgagctctgccccacctttctgcgaaccctcgttcggcaaattttgctttatgaacgcctgacaaggtcccagtgatggagcagagggagcaagaacggacggtgcagagaaaagcaacctttagcttcactattccctctcgtcctccagctgaaagttgttccacgtcccgggcaaagagagagccccaccaggcagcaccaccagctccacagagttggagtgattcccccaagaagctcccctgcgccccccgtcacccccagagaccagcagaggaaacggcatctatcccttggaagacactaggcaggcgagaacaaatgcaagtcctgctgctcacaccgaggaggaaaggatggaggaggcggtgaatgggatgtagcagaaacccgacggccgcagcggaagggacacctcccctctccagcctaactctgagccatcttcgccctgttgtcatagcacttacaacggacgccactgcgcaggtcacgccgtgccgcgccgacttctgggggctggagtccagagaggctgaggcgcaaaggcggggaccgacttctgagagggccgcggttggaattagattgctactggggcggggctcgagtgaaccacggcctggtcctcattagcagagagtgataattactgcaatcctctgccctgtcctggcagcagttccttaaggaagaccctcctcctgcctgggctccgggggcaggccacgcccccccggccgcgtgaccgccctctcccctcggtgcgtgtgggtggggcctagtgggggcggggcgtcactggcttgtccatggtgctctgggatcctgcgcttctgagagtcccaatcgcggtgtttttttcctgccgggacactcatgagggccccgtccatgcaccgcgcgaccgtggcgagggtggtcgcggtagcgagcgccagcgtgtgcgccctggtggcgggggtggtgctggcccagtacatattcaccttggagaagaaggcgaggcggaagaccaagatcatcgagatgatgaagcttttgaacagtttccagtttttcctttttttactatttgaaacagcgctgctttgaagttacttgtgcctgcgtcctgatacacatgtgttaaatatattttccgtatataccttagagtgcatttcctggtatatgggattggatctatgtcttcttttgttttttacttatttttttttaatctttacattcaaattcaatgtagccaaccttgaagtttttcttgtttgcttttttcaatggattctagtgtaggctttaaatttccagtatttcaccatcaatccacaaatccacattcccagtagaaaataccattctagttttagttttttgggttttgggttttttttttttttttaactgagactgggtctccctgacagggtcgcctagactggagtgcagtgacaggatcactgctcactgaagcactgaagcctcagcctcccgggctcaaacgattctcccaccttagccttcctagtaagctgggactacaggcacagaccaccacacctggctaatttttgtattttttgtagagatggagtttcgccatgtccaggttgctctcgaactcctgggttcaaacgatccacccacctcagtcccccaaagtgctgggattgctggcgtgagccaccgcgtccggcctcaatatttttaaaaatgacctttcagtcaaagccttggtaatataaccagtttccaattgtattctgctatacagagagagcagatttttattagacttattgaaatgaccatattaccataagaagactcacaaatggttttctaattatggaggaatcaagtaaagagaaaaaaagtttttatctttttttacacaagtatactctatcaaattgctgtaaattataaatagcttaaaagacaagattttcttaaatctggaaaaaactatttgagtaaagaaccaacaacatttgaaataatatcataaaaacattgtcttcattagttaaactcacgtaattaattcttgttctgcctgatcttgattaatagtttcatgaacccacttttttattacagttctggaaattgttatattgtccattgatcttcaagttgttagaaacccaaatctaagagtatattttagggccaggcacaatggttcatgccggtaatcccagcaatttgggaggccaaggcgggaggatcatttgaggccaggagttggagaaaagcctggccaatatagtgaaaccccatctctactaaaaatacaaaaaattaacccagcgtggtagcgcatgcctgtaatcccagctactcaggaggctgaggcatgagaatcactggaaccagggaggcagaggttgcaatgaaccaggatcgtgccactgcaccccagcctgggcatcagagcaagattgtctcaaaaataaataaataaaaataaaagagta

SEQ ID NO: 586183 - DNA, 4001 bp, Homo sapiens
aagagatctctcatagggaacaactagcagttgagcaccttatcatagctaatacctattgtgttctcactatattatggttctaagtacttttacatgttttatctcatttaattacaacaactaccgtaaggggtagacactagtactacctccattttacagatggggaaacagatcagagaggatcaagagcatgcccaaggttagtaacatgcagttataggtgacctgatttctgagcatgtgcctttaaccactgggttatgtaagaaaataatagagactaaatgatgaaatattttctttaaagattatggtgatacaaatataaaagataaaaagatgtggatacacacataggacatattgtaaatgatctgcgtgcatacataccgtattttctttatatctgtacatgagaacacatttatatatcatatgcaaatatacacacatctatctaatagctacttgatcaggatgggtaaaatttttatttggcaggaagaaaaatattgatccataagttacagatcactctgatggagtaaagatcaactgacaatttttccttctttgcaaacccttaagccttatctataaattagatgtttatatacaaaatctttctttctcttgagtatataggattctatcattgcaaatattaccaaaaagcaaaacagggtgttactgagtttgaaacaaaacctacaggatgagaggcagcatgatggagtagaaagaacactggactaagagccagatttttttctagaatctgtcacttaccagctaggtaaccgtaggctacttgccctcctgggtctcagtacgtgatatatagaacatgggtggaatggatcaaataagatcaaagaccctacagtatgattcaattttttttctttagtaagaaacaacttactgagcttagcttagctgatagagaaggacagaagagagcagaaatccaggcaggtaaggagcaagttaggagttgtgaaagactatctggaccctgagctaaggtgaaactttaagaagtttctcccagtcctgggattttaatacactttagtgggttatctctaggatctcacttatgaaatactttcttttatgccaggagtatgaacaaatatcttgcaatatttttattacatgtgtatttccccattcatactatcaaatttctggatctaaaattaaacgactaaaaagtagattactgcaagggtaaaatgaaccactgcttggcttgaaacactgtacttggttcttcaagaccttagaagttccgtcactaacgaactaatgctaatacatggttgtgatacttttcacattcagcacttttaatatacattcattaattttatgtgaaatcaaaagtagtaaaattgtcattaatgaaactaacggttacaaaggcgaaaactaagaataatttattggctttggtttctaaattgctgttccagtgcctcagtgaaacacttttacacccatgctgtactgtaaacatgatttatccacttatatttatttagttcatggctccaattcagggcaataaaacaaaggtaaaacctgagacaaggcagggcaggtgttaaaagtataatcgttgctttattatatctgtaatcaacagaatcaaaagtataggcgccttttcttttagaagggaagaaaaagttatttcacttgtacacgtaacagagttttatataaaatgttattttaatattgtcattatatactacctaattcgttaggtgagtttattttcaaagactttcgaaactttttaatgttcagaaaactttttccattttacattaagagcgatccaatatttattagttaacgatttgaaggtttcctacctctgaggaggaataaaaggtaggcagaagattaaaatgagtcctatttcggcataaagaaaggttgccactgcagcccattggagtgtcatttttttcttcacacctaaatggaaaaacacttattttctcttgcttcctttcaaacaaaaccgggttcaaggccccgaggcgcagcgtttttgtccaggggatggacagtgttccaccttcccccacctgggaaggcaagcacggaccccggtcaggaaggggaaaagggtggcccgggaagcgggtgtcgccacctccctgggagtcgtgggaactggcgaggcggctcgctggccactgccttttccgccagcttcgcggcgacagaagcccaacgcctccctccaccaacgcccggcttcccggccctcccgctcccagaaggcgccgcgggccctcgaccaccgcgccgcggaccgggccgggccgggtcgggccaggccagctccgcggggttctccagaccaggcagcggcgctctccctccgcggcctacgccccacgggtccccgggtcgcagaagcccttacccgccggcagcccgcctggctccctgcgctgctccgcggccgccgacgcgcgggacgtcagacgccgcggctgggcgggggaggggagccagggccccaccccgcctcacgccccgcaggctcccgcccgcgggtccgtcccggctgaggtcacaggcggcgcgaccacgtttattggcaacagttgttttctaattggcggcaggtcagagaatgagttagacttttgacctgatgcttggaggtcggagcgcaacttcttcaggaggacagactttccactgctaagtgcggccccggcgggagggtgccggggtccaggtctaaggagcggcgccgggcggcggggctggattgggtggtgcaaattcagcgaacgcgcttaagacgcactcctttccggtcacctactctctcttcatggtgggaactgtttgtgtccagaattaagctatatttaataaagggccaggatgaggtggtcgtgcagcattttgttctggagaacctaggatcaactgtatgtcacaacatattccgtaggcgttcccgttcccgtccatgggctgggaagagacagtaaactttaccgtgatgtttggggactggtacgaaaggtgggtatggggatattctttcactattttccagcttttcaaactgtgcgtgtacatttaagttgttgagttttttcaatattgacaacgtatcaggaatttaataaaagtactatcctggtaacaattatttggggaatagtaaataaatgttgaaaattgataattatagaatataaaacattcaaaaacacatttaagttggtgctttttcttaatttatcactaatattctggatcacatgtaacagaaaaaatagaaaaatagactttgaacataaattaaccataaggaagattttttttttttttttgagatggagtctcccaatgtcgcccaggctggattgtggtggtgcgatctcggctcactgtagcctctgcctcccaggttcaagtgattctctggccccagtctccagagtggctgggattacaggcgcctgccaccatgcctagctaattgttgtatttttagcagagacagggtttcaccatgttggccaggctggtctcgaactcctggactcaagtgatctgcctgccttggcctcccaaactgttgggattacaggtgtgagccaccgcgcctagccaggaagttacttttttttttttttttttgagacagagtcttgctctgttgcccaggcaggagtgcagtggcgcaatctcagctcactgcaagctccacctcccaggttcacaccattctcctgcctcagcctcctgagtagctgggactataggcgcccgccaccacgcccagctaatttttgtatttttagtagagacggggtttcaccgtgttatccaggatggtcttgatctcctgacctcgtgatctgcccgtcttggcctcccaaagtgctgggatcacaggcgtgagccaccgcgcccggccaggaagttacttttaatcaaaa

SEQ ID NO: 586184 - DNA, 4001 bp, Homo sapiens
atctgtcacttaccagctaggtaaccgtaggctacttgccctcctgggtctcagtacgtgatatatagaacatgggtggaatggatcaaataagatcaaagaccctacagtatgattcaattttttttctttagtaagaaacaacttactgagcttagcttagctgatagagaaggacagaagagagcagaaatccaggcaggtaaggagcaagttaggagttgtgaaagactatctggaccctgagctaaggtgaaactttaagaagtttctcccagtcctgggattttaatacactttagtgggttatctctaggatctcacttatgaaatactttcttttatgccaggagtatgaacaaatatcttgcaatatttttattacatgtgtatttccccattcatactatcaaatttctggatctaaaattaaacgactaaaaagtagattactgcaagggtaaaatgaaccactgcttggcttgaaacactgtacttggttcttcaagaccttagaagttccgtcactaacgaactaatgctaatacatggttgtgatacttttcacattcagcacttttaatatacattcattaattttatgtgaaatcaaaagtagtaaaattgtcattaatgaaactaacggttacaaaggcgaaaactaagaataatttattggctttggtttctaaattgctgttccagtgcctcagtgaaacacttttacacccatgctgtactgtaaacatgatttatccacttatatttatttagttcatggctccaattcagggcaataaaacaaaggtaaaacctgagacaaggcagggcaggtgttaaaagtataatcgttgctttattatatctgtaatcaacagaatcaaaagtataggcgccttttcttttagaagggaagaaaaagttatttcacttgtacacgtaacagagttttatataaaatgttattttaatattgtcattatatactacctaattcgttaggtgagtttattttcaaagactttcgaaactttttaatgttcagaaaactttttccattttacattaagagcgatccaatatttattagttaacgatttgaaggtttcctacctctgaggaggaataaaaggtaggcagaagattaaaatgagtcctatttcggcataaagaaaggttgccactgcagcccattggagtgtcatttttttcttcacacctaaatggaaaaacacttattttctcttgcttcctttcaaacaaaaccgggttcaaggccccgaggcgcagcgtttttgtccaggggatggacagtgttccaccttcccccacctgggaaggcaagcacggaccccggtcaggaaggggaaaagggtggcccgggaagcgggtgtcgccacctccctgggagtcgtgggaactggcgaggcggctcgctggccactgccttttccgccagcttcgcggcgacagaagcccaacgcctccctccaccaacgcccggcttcccggccctcccgctcccagaaggcgccgcgggccctcgaccaccgcgccgcggaccgggccgggccgggtcgggccaggccagctccgcggggttctccagaccaggcagcggcgctctccctccgcggcctacgccccacgggtccccgggtcgcagaagcccttacccgccggcagcccgcctggctccctgcgctgctccgcggccgccgacgcgcgggacgtcagacgccgcggctgggcgggggaggggagccagggccccaccccgcctcacgccccgcaggctcccgcccgcgggtccgtcccggctgaggtcacaggcggcgcgaccacgtttattggcaacagttgttttctaattggcggcaggtcagagaatgagttagacttttgacctgatgcttggaggtcggagcgcaacttcttcaggaggacagactttccactgctaagtgcggccccggcgggagggtgccggggtccaggtctaaggagcggcgccgggcggcggggctggattgggtggtgcaaattcagcgaacgcgcttaagacgcactcctttccggtcacctactctctcttcatggtgggaactgtttgtgtccagaattaagctatatttaataaagggccaggatgaggtggtcgtgcagcattttgttctggagaacctaggatcaactgtatgtcacaacatattccgtaggcgttcccgttcccgtccatgggctgggaagagacagtaaactttaccgtgatgtttggggactggtacgaaaggtgggtatggggatattctttcactattttccagcttttcaaactgtgcgtgtacatttaagttgttgagttttttcaatattgacaacgtatcaggaatttaataaaagtactatcctggtaacaattatttggggaatagtaaataaatgttgaaaattgataattatagaatataaaacattcaaaaacacatttaagttggtgctttttcttaatttatcactaatattctggatcacatgtaacagaaaaaatagaaaaatagactttgaacataaattaaccataaggaagattttttttttttttttgagatggagtctcccaatgtcgcccaggctggattgtggtggtgcgatctcggctcactgtagcctctgcctcccaggttcaagtgattctctggccccagtctccagagtggctgggattacaggcgcctgccaccatgcctagctaattgttgtatttttagcagagacagggtttcaccatgttggccaggctggtctcgaactcctggactcaagtgatctgcctgccttggcctcccaaactgttgggattacaggtgtgagccaccgcgcctagccaggaagttacttttttttttttttttttgagacagagtcttgctctgttgcccaggcaggagtgcagtggcgcaatctcagctcactgcaagctccacctcccaggttcacaccattctcctgcctcagcctcctgagtagctgggactataggcgcccgccaccacgcccagctaatttttgtatttttagtagagacggggtttcaccgtgttatccaggatggtcttgatctcctgacctcgtgatctgcccgtcttggcctcccaaagtgctgggatcacaggcgtgagccaccgcgcccggccaggaagttacttttaatcaaaagtgttagaacttcttgcccatccacgctggttccttccaaacaccgagcacattactctagtgatgatgctgtgctcacaacactagggtaattcaattcagagttctgaccatacctccctattttgtacagtattcatagaaaatgaaacagcgagttatctttaaaaaaaaaaatgcattaactgaaaagtgaaaacagaatgtactgagaaaaaagatggcaccacagtgcttatgttaaaatggattcattcaatattcccaaacgtgaattaaacagttttacataattgtttccttataacagttttcatgttggcaaaacaaaataatactttaattatgaacggttttatttcagtctgagatacttaattcttgcagtgcatgcccaccgataacaaaatctattaataacactccaaaaccatgggactttaaagttacaatcaacggctgagaggcacaaaagtaattaggttttaaagttaaaaacaaaacctggttactattctctaggaaatatttcaaatatataatcatctccaggttggacaccaaatttcctatacttaagatatggtagattgcaattaattttatctttttaggtaggagattattaagctttcaatctttggaggacctagaagttttgaaatgtaccaaatttaatgtcattaaccaaatggaatttttaatataagttctgagtgcaattctattcagaatttcctgttctttttcattttggatggatgttggtatttgttccacca

SEQ ID NO: 586185 - DNA, 4001 bp, Homo sapiens
ataagatgcacattttatatatttttttacagatggggtctcactgtgttgcccaggctggagtgccatggcatgatcatagttcactgcagcctcaactcctgggctccagcgatcctcccaccacagccttccaaataaggctgtgcactttaaaaaggtcactccgctactcggaagagagaaaaataaaatcactcagtgcaaatgaacagactggggaatgagcaagagcagaagcagagagtttacagggaggctggtacagagttccaggtgacaggggatggcccttcagcctagcctgctaggggcgggggggtcaaaaatggggagaagagaaaggtgtacctgttcttaggtttcaccaaaacctcggaggattaaaggtggacgaggaaaaccatgagtatgttaaactaatatttatactgaaacccaactatatatgaagccctcagacataaaaaagagaaggaacttccctcttgtggggaaatggacagataaacacacaaataaagtccaacgtaccaacgaccttaaaggaggtaaagggatgggaggagttaaggaaagcttcctggcgggaggtaacatctacttgaacttttattttctgtagagacggggtctcactatgttgcccaggctggtctcaaactcctggcctcaagcgatccgcccacctcagcctcccaaagtgctgggattacatgcctgagccacctcacctagccagacctgggtttttaaattattagtagtaattggctatacaaaagagctgacgaagttggctgtgaaagtttaatgtgatgactccgatacacaccgatatagtatgtatcggagttccggatactaaacaggggctcaatcggcatcttccatgaacattttagacacggggtctctctccgtagcccaggctggagtgccgtggcacgatcatagctcactgcagcctccaactcctgggtcccagcaatcctcccaccacagcctcccaagtaaggatgtgcactttaaaaagaccactctgctacttggaagtgagaaaaataaaatcacacagtgcaaatgatgaacggactggggaatgaacaagagcagaagcagggaaattagagggaggctggtacatagtttgcaaaggactctcctgacagccgccggggcagcaagagaaaatgcctaccaagctcgcggcgcaggggccggttactgggggaaagggaggggtatccctctggatgacaccaggcttgctcccttgacagatggactaacccagaaactcacccaacttcaacgcctgaatacgcagagcgctcagcctggcgggctgacaccactccagggctactcgctattatcaagaggaagcctggaaacgcaggcggggccactgcccaggaagaggggagggcgggccccgggctgggccgggcgcgggcaccgacgccaggcagctccagtccgggccggaagccggaatcccctcccaggcggcgcgcggcagcagccgcagcaggtgggcgggcccgcgagccgggaggaccgctgattggccgcggccggcgcgccctctgacctcacgccgacgccagcggcgccctcctcccgccttctcccgcacccccctcccccagcgccggccggtcggctcccacctgacccgccagtcccacgctcctcagggcctggatccgcgacccccgccagccccctaagctccggcccctcaccatttccgcactttctcgatggccgccatcaccttcttgatgtcgtccttggcccggctgcgggtctccgcccggaccgaccggcccgacatggcggcggcgggagcggcgggggccggggcactgctcccaagacaccggggatcgcgcgcctcacgcgccgccgcccgcccgccgccgccgcagcgtcacagcggccgtcgccccctccgtgcgcgcgtgcgcgagaaagcgcgcgcacccgcccgccccttggggctcacggcctcagcgcgcctgcgcgccccgcccggggcgtccctcctgagtgccccgggagtcccctgagccccctacccgggccggggtgcgaggcgggttgggcgcacgtgcttgtggtcagggcgaggtgcgaggtgccgccggtgggcaacctggttctcttccctgagagtttggaggtcggctccctgctctggccagcgtgttaggaacctgaccctgtggaaccgcactcctgcgccatctctgtcctcccgcctctcctgcccagcacctttgccctctggctcctacgctgtgctccaaccacgcctttcttaaggatggcttccggtctttgcacacacctgttcctcacctggaatcccctcctctctttaccagatgaactgctttcccagcattcagaccacattcttgccttttctcgagtatctagtagtcccaagtatttgggaggctgaagcgggaggatcacttgaccccaggaatttgaggctgccgtcagctatgatatgatcgcacctgtgaatagccactgcactccagcctgggcaacatatggagaccccatgtctaaacgagaccccgtctctaaagtaaataaataaaaagatgtctattttgtgcaagactctgtacctaaagctgaagacatacgtggttttggtttcaaagagcttccagtttgtttatttattgagacggagtctcgctctgtgactcaggctggagtgcagtggtgtgatctccgctcactgcaacctccgcctcccgggttcaagcggttcttctgcctcagcctcctgagtagctgggattacaggcgggtgccaccacgcccagctaatttttgtaattttagtagagacggggttttatcatgttggtcaggctggtctggaactcctgacctcgtgatctgcccgccttggcctctcaaagtgctgggattacaggcgtgagccaccacgcctggcctttttttttttgagacggagtctcgctcttttgcccaggctggagtacagtggtgtgatctcggctcactacaatctccgcctcccgggttcaagcaattttctgtctcagccttccgagtagctgggattatagtcgtccgccatcacacccagctaatttttttatttttagtggagatggggtttcaccatgttggtcaggctggtcttgaactcctgacctcgtgatccacctgcctcggcctcccaaagtactgggattacaggcgtgagccaccgcacccggcccagtttatttattcatgtggagaggggatctcactatgttgtccaggctggtcttgaactcctggtctcaagggatcctcacaaagtgctgggattacaggcatgagccactgtgactggctgagcttccagtttagtagaacattcagacgaaaaaaaaatatttattttttacttttacttattttttggtacagggccttgctcaagtgatccttctgcctcagcctcctgtgtagctgagaccacaggcgagggccaccatgcctcgctgacatttttttttttttttttttggtagagacagggtcttcctatgttgcccaggttggtcttgaacacctggactcaattgatcctccttcctcggcctcccacagtgctgggattgcagacgtgagtcactgggtccagcttcccaaagcatatttaaaatgctatttgataaatgctagcctaggcggagcatggtggctcacgcctgtaatcccagcactttgggaggccaaggtgggtggatcatttgaggtcaggagtttgagatcagcctgtccaacgtggcaaaaccccatctctactaaacatacagaattagctgcttggaaagctgaggcaggagaatcgcttgaacccaggaggtggaggttgcagtgagccaagatcgcaccattgcactccagcccgggcaacaagaacaaaactccatcttggaaaaaat

SEQ ID NO: 586186 - DNA, 4001 bp, Homo sapiens
cttcacaccaatgtaaattatagcaatagtagttacctaggtaattacttctcctctcaatcacagaagagcttttttttaaaaaaaaaaaaaaaagaaagaaaaaaaaaggaaaaaaggagaaggtagtgggctctaaattggagaaattctaattttactggctgagctgaggtccaggtaacaatactttaaaaacttcccaagggattctaatgtacagtcagggctgagaaccattactcaagtcactttcctgcaatttaacatggcacactgcagcaggaaaatactcaaaagggcctaggggcctactgatgaaatccaaactctttggcctcgcatgcaaagatctccacagtgtgatcccgaatcccctacttcacccaaactggcttaatcataatcccttacttcttttgagttcctcctatctggaactcacttcccccactctccattattcaaggtctacttcaaattcctatgtctccaccaaatacacaaagatcttccccacaaagtacacagtgatctatctctgaaatctctgagaccatcccttatatgtagaacttatctggtatttggatgtatagcgacactttgtactacaatttatctttgcacatattcctactccccacctagactggaagctttggggatcacaaacagggcaacaaacaactgtatacctagagcttactcaagcacacaataaatcttttttggtattaaggatgatgaacaagaaaaacatttagacatataaagctaaacttgctcaaaattatttcttttttttttctcttcaatttacctggccccattttctatgatctaagtattcataaaaacttcattaaaaaaacaaaaaactttctcatactacaatttattgatcaataaacaagtctacggttattggcaactttcactgactttaaatatctgacactttggggattttttttttcttttttcaatcttataatgactgagaaaggtaatatcttttttcaaatgtttcatttattttctgaagtatactgcactctaatttagcggggtcttctttaaaaaaaaaatcgtgtcctaagagaaagcttcagaaccagaaaatgccgttctagtagctgtgcgttactataagggtccattaaaattccttgtgtctaacttattcttgctgatgagccagtttcctaaccccaaaggtaaagatcaaatgttaagtcgccaaaccttaaccacgttctactgccttaaccgtggcacaaggttcagattaagaaatcgcctttgacccagaagttccagttccaggacctttaacaataatgacacatacatttacctttgtaactcactgttaccagattaacgaccattactagcgtgctttgggtgcaaccacccactcttcaaattccgcttctgaagaaactaagatccagggccagtagggaaacagaaaccggagtcgggctttggaaaacatagcagcgtccataaccacgctcagtcaataacactaaaacactcgaccactgagatgccacctgtacacacccacccctagtccactactttctctagcctaccatccaaacttgaatctgactcaaacttaaggaaattccaaagatctgggacaaatggtgtgtttccactcgacatggaccccaaagatcccctctagacatcctgttttttggaccaaatgccaggaacataagacaggttcgatttcctcccgcgccccagcgctcccggttctagggccccgaacttcgaacctcagccctcttcttacccaggcctgcacgcctcatcctgccagaggagagagagaaaaggcgggtgcggggctttgggtgagtaggaaacagctaggggcgacccggaccgcgtcttcagtaccagggcccagcgaaacaccaacttcttcccctaaagcgccacgacatcagtggagtctaaacaccgcgccggatgatggcgtcaccacggcgctcattggagccctgggaagaaggttgaaaggcattctgggaaatgtagttcaccaacgcataacgtgttgctgagggcgtgatgtgaacccggttccaggagcggacggggcgtccggaaaagggggcggcttcgactgcggctctgattctgggtctctgatccaacgttcccgctgttccgctcgcagcccgcgggtcgctgctttcagtttgttgaccaccaagtttaacccagcagatctgctcctccccacccacaagaggatggttggggtatctttcctgatttagcctcgaactccctctcacctccagagacgattcagggaaagttagagaaaactttgtccaggtttctcagtttacaaacaagtaatccgacacccacagaagtaaccgatttgtgccttgtagtatccagtaaaggaaagaaaaccaggttcctttgagtaggactcctgctcagatgagagcagactaggaaaggctgcgggatctggtcagaggcactgaatagttagttccctgttactgcatctgttgtacttctagaaagaaccaagacttttagttgttatggggaccaaaggacccctaaacgctctcccacttttttttttttaacttacacaaagcttattgaaatactgcttacacaaggcagtgtgccaattaggggtttaaaacttgttggcgagttggaggtgttactggtatcgaggttaatcctagaatttcattttatctcagaggatttatcgtgagaatacgatgaaatcgtggtttttgaagggaaaacaaaaaaacctgatacacagtaggtgatcaaaattcactgggtgtctgcggttttgttgttgctgctgtatatatggcagtggaatcgtctccacactagagatttccgaatatgtgatctttgatcatttagcgtttcctcatagtttcccaggacattattaacattgactataatactggcataagtctctgcgttaagttgcttttgtaaaaaacacatgaaaacaatttttaataagagttattaacctgggaaggaggctttatccaatagtgttttgatagaaaaaaatcattaaaataaaaccgccattttctaaaagcaatgaaattaaataagcataatatcagggacaattattacaaataaaagatggagattcaataaaagaaatgatagctaggtatccctttataacttaaaatctgtgacagtcctttggttaaaaaaatgcatgttctataattaaaacgtttaaaaattgccttacagaaggcttgctgatggaaatgtagaaatcgttatttttgaaaatatggtaatatttactagaactaatcatttagattacataaaatatactgcttcctttacatggtaggaagacataagaatgaaatgtagttaaaaggaaaacatatataatgtactaagaatataactgaagtaaggcaaagctagttcatattgaagttgttacctaaaaaatccaattattgtttttagctaacgttgctagtatcaaattaggataatgtcatctgaaaaaaatttgcactcaaaggaagaggcaggaaaaatgaactcaatgtgcagaaaaagaattattaaatgtgaccatagttgacattagcgatcagagggaatcattttcacttttctcgttgtgctttttcctttttaaattaaaatccttaacttttcttactgattgaaagcaaataaatttcacagagatgaatagcatttagaacctcttctctattctcacaggatagtctcacagaaaacatctaatgtttgtaggtctctaggagataaaggactaaaaattacttaaaataatattaagtattccttctagtaattacaaaagcaagaataaaagcaggaaatgtctgaatcgaggtgcaaaattggaacttttctttctcctatctgtctgcttcctgcctgcc

SEQ ID NO: 586187 - DNA, 4001 bp, Homo sapiens
aatgccagatcctcagggtgttacctgtgtccttacgtggctaggcctgaccccaagtgccacaacccccaacttggggagggcagggccacctggtggggacgggccagccagagcccttggtctcagctgtggcagccacatccctggcccggcttggccctgagggcctttgggacatctctgggcagaggcatgagggaggggagagtccagtagccaagtccggcagagccagtggggcaggaacgcccagcagaaggaagctgggcttggggcagcagagacgtgccaagccaccaggcctggccatgaggatgaagcacctgggcgggggaagggacgtacctgccaccccaaggctccaccaggcagagagacccaacgggctgccaactcaaaccagaacccaagcacgtcataatgtcctacagacagcatggtgccaattatatgataaccccacatcagtgagaataagtaacggcggtggcaggggctgggtggggggcacactcgctccccacacaggccagggctgagcaggaggcctcagagctgctcttggggagcaacccagggccttggggcttctctcccatgcccagaagggctgcaccaggaacacccagccctgtctcctgctccagttccacagcacccctcacaccctgccccagaccctccacaaccaggcacagcctggagtcaacacatccaggagccccaacttgggaggagggaggaagagactccagcccctccccaccattcaacttttaaggatgaattggaggtcatctgattagagtttctggcagctccaatcatctctgattggccccactccccgagcagccttaggctctgccgggcttgtcccgggcctcagtttaccccaaatgaggatgctgagcccaggccccatgtagccctataacaaaggttggagagggggtccttgctggggctttggccttggaaaacctgcaggtaaaccttttcctgggatctccccttgcccagaagtcagggtgaagagacgttagttccaaggctaaggaggcctttcaactcgggctgagactgcctggctcaatgaaaaatcaggatccaactgggccctacctagaggtttgggcctcacgccgctgtccagggccacagccgcaactaggccactcgctggtccccagcggggcaggaaaaattgctccagggaagtggctgaatgttcgggggaaaatggaaccgctgaggccgtgtccttgtggggtgtcaccgcccatctggggctcgtggcttggagggactggggctgggaggagcaggccaggcagctgcggccaccgccacccccacccaggactgggcgctaggtgccctctcggaagctgtggatctgcgtggagtacctctgcaggtggccctggggctgggcctccgtggcccccaacgcacccccagccacctgctgctgctgctggtagtgctggtagagcttggggcccggcccctccaggcctgggaggcggctgctggacatggtcaggatggtggccgtcagcgatttgatgtagttcttggccagcgtgagcgtctcgatcttggagagcttcttgtccgcgcgcacgtgggggatgacttcacgcagggcctggaaggcgttatttagcttgtgcatccgctgccgctccctctcgttgctctccagccgccgctggatgctgctgtcacgacggccaccgggcccggagggtcctggccgcctgcgcctgccctcgcccggagcccttgctgcggcccgggccggccggctccgcagacccttggccggctctggccccgggttcggcagggacccgtcgggcgtcccctccccgggggtggcctctgtgtcctgcaccggggcccggcgccgtgggggccggttcttggtcttcatggccctggactggctgtcctaggaggtggcggcaggaaggtgaggcccttggagctgaaatccagaacacaggacactctgtggtcaccccacatgggcaggggacccgctggggtgccgtccctggcagcctcctccttgctgacagcaatggtaccaggggcaggggttggcgctctgcgactggaggtccttctgttcacacgcttagccctgggctgaccccacacacacccacgcccttgctttacctcaaacagacctctggaatctgtccctgtccctgcgtcccccttcccccaggatgactcatcctgacccctagatcttcctctggctcatgcccctcactgcccccagagtgcctcctgagctcggtgacctttgacactttgcctagaatgcgtcccccaccctagcttagggggcgcctctgccggaggcggcactgacttcatcccgtgggcgggcagtgactccagccaccaggctctcactgtcctgccccgctggacgtgacacgtgcagggacagcactggggccagaaccgctgcggacatgggacagcactggggccagaaccgctgcggacatggggcagccgtggaggtcagaggtcggcaatggccagggcctggcggcagcccccaatcccaccacgtggatgggccccgtggagcctccagacagaccagaagtcccccacccgggtttccccacagcccccacaacccccacaaccccaccgccaggtcctgcccctgggtcccctccccgcggccccacccgagttcccagctcccgggttacctggggatccgcggccacacgcgccgaggctgcccacgggggacaaggacacgtcgctttagccgccccgggaggggccgcggacgcatgcaaatgagccctcggggcggggccggggcggggccggggtccgggtgtcccggcgggcgctgggcagcagtggcggcacctgcgggcgggcgggcgggaggccggcgcctggggctcccggaccaggtggccgcgcagccccgcccccagcttccgccccgcccccaagatagaaaacctcccccgcccgcctctccccatcctccccctactgccccccaccctcgtcccccaagacagccacccccgcccgcctctccccaccatcccccgacagcccccgaccctcgttcccccagacagcctcccccacacgcttctccccatcctcccccgacagccccccaaccgccccgagatagcttccccccattcgtctctccccattctcccgctacagcccccccaagacagcctgcgtccccacctcccctactcccgtcccccgacagcctccccacaacctgcttttccccatcctccccctcaatttccactcgcgcctttcccacccgcctaccccatatccgtgcccgagacagcctccccccgcccgctttccccgaccctccccctgacacagcacccccgcatccatgcctcccgcgatcctccttgcccggcctctccactcgtggcggggcccgggcccattccgccaatgggaaacaggtctctgggagccgccggaaggaggggcagccccgattcaggctcagcacacagatcccaagtcccaggagcactccgggacgagccgctccgcgaaaacgcgggcatctcccaggggatcccccgccccgccgcccgggatgtttaggggaacctggggctcctacgggctgggggcggagcccgagttggggtgggggtggggggctccttgggcaggtgtgcagtccttgggaacgcctgttttgtttgtttgtttgtttttgagacggagtttcgctcttgctgcccaggctggcgtgcaatggagcgagatgatctcggctcaccgcaacctccgcctcccgggttcaagcgattctcctgcctcagcctcccgagtagctgggattacaggcatgcaccaccacgcccagctaatttttgtatttttagtagagacggggtttctccacgttggccaggctggtcttcaactcctga

SEQ ID NO: 586188 - DNA, 4001 bp, Homo sapiens
cattaatggaaagtttcactatttgattaaagcttaatttgaagctgagtaatgcaatgtctttttcaaattccaaaatacatggctatcaacttatttctaaaatcttaaatatatgatttaccacaaaaaacaaatggcccaacctgttactactgataaatatatgatcatgtcatcagagtcctggatacgccaaagagaatcagaaatgaaaatgcgcgcagctcctgcacagtgggattccctgtcagcccacggttctgatggagtgtcgcctctacatagaagtcagtgcaattttgagtattttaccagattttcagttctagaaaaaatgactgggagtaataagcagtgtagatcaaaaactaaatacaattataacaaagatgaaaattaatagatgtggcccaaagtggcaaatctttgactttaatcacatgctaactggataggcagggggtacaaagaataaaaaagtaaagatcggccgggcgcggtgactcatgccacgcctgttataatcccagcactttgggaggccgaggcgggtggatcacctgaggtcagaagaattgcttgaacccagcaggtggaagttgcagtgagccgagatcgcgccactgtactccagcctggtgacagggcgaggctctgtctcaaaaaaaaaaaaaaaaaaaaattacatatgaaatgtgggaaaacacactgagaattattcctaaaaaagttgaagtataattagagaccctattgtaatttttagctctctggctacagaatttcccttctgatactttgtctaacatttgacttgtttttctggaatgcatcccgttaagggaaggatgagcatatttatcaatacaatcttttaggaaataattaggaatataccaatacctttatttccataattttaatatcttcttgggaatcgtactatagaaattacattaatgatggaaaaactttcagcacagtattgcttcctttgtaggtggtgatgatgacagctaacatttactgaatccttcccatgctgaaaaccctattgtaagctatttatgttcgctaagtcacttattcttcagggctatcctactaagtaagcattatgattacccccacttttacaggtgagaaaatcgaggcaacaagaggttggttaacgtgcccaagatcagatcgcacagcggtataataggatggaaaactcctatcacataatgaacgttaagtgaaaaaaattagtatccaaaactgtaagtctgatgtctcattctttttataatttaagtagtttataaataccctcattattagccatatttctgagcacttcatatgtagagtgcactttacagaacactgtcatgtaaccctcacaccgtctacgaaataagtgatagtttccagtttccaaaaacgaaagcggggctaggagaggccaagtgcctcgcgtggcgcctcaggattcgccccagcggagcagaccccagggcatcccaggcgggtcccggccgagctagcggccctgcggtggctacgcccgggcccagccgctcgcgctcctggagccgccggactacgcggcacgcggacgccgagcctgccctcttgggtctacataaaaaccgaaactacgggcagtcttaaccgaaatggagacttaattttttagactgtcttttgtgtagttgagaaagccccttgccgggacccgcgctgctgggcctccgaccgcgtcctcactccgggcccgggcggggcggggcggggcaggcggcgcccaggctgcgtcccggctctggcggccgcgggcccgggcctcctgcgggcctggggcttcgagctcaggccctagcgctctatggaagccgcgcgcgacccccgctcccctgcgcgcgacccccgttccccgcgcgcgcctcacctgacgcgggcaccgctctccgtgcagcctccgggcgccaccggctttgcggaccggggcgggatcccagctccgattggctgcccggctggggggcgggggccccgaagcggggtggcggagaccgggaggggaccggaggcggtggggaagggagtggacggaaggggagggagggtcccggcctcgtgcggtcgcgcgtgagatcctggcctctgtgccctgggtctggcgcctggggccgtaagaaccgtccgtgcgcctgccctgttctctgcacccagcttggtggcgaggggtgggtggtgggtgccggccgaccggagggcgtatggaagtggctgggccccctcacggtgtgcctggccccctcacggtgtgcctggccccggcgtggggggggcaggcccggggggtgtcgcatctctcttatccgccccccactcaccacgtagaacccactggatcccattggtatttagtggccccgggccgactgaactggcgccgaggcttacctgagtccttcctgtaaatgtgaggagcggagggaatattccaggaggccggtgtctgcgatgtcctgctcttgggtagctaggaagtagtgaacgtggtctagggaactgcctgggctcttatccacctgggaatgggtttgttggggatcctgatgtgggagaagccagggagcttctagcctagtggggctaggggagaaaacagggagaggggtggattaggctgaaggaaagagatctctgatcttaaaggcagcgttctgacgggtaaggttgactggcattttccccaacaaagagttctagtaccgtattccatgacctgacaagcctgtttaagtgaggttttgttgagtgcaaagagagaaggcttggctttgaatttttatctccaggcgggacctgcctcctgaactccatactcctctatccagctgcctccttaatacctcctcttggatctctaaaatacatttcaatctcaacacatccaaatctgtgcccctgatctcttccccatagcatcaccatctcgatggcaactccatcttccagttgtcaaggccagaaaccttgctgtttcagaaacctttctctcacatcccacctccagggcccaaaaattctgttggttggatctccctagcatacccagagcctgaccacttcttacctctgcctccatcatctgctacctgggtcatgacagtggtctcttccctgatatccctgcagcctgtccccataaagcagccagagtgaccttaaaaaaagaaagccagatcaaattcctcctctgcccaaaaccttcccagtggtttcccaaactcagagtaaaacccaaagccctgcctgatctgctcctctgttacccctacaacctcatctgctactgcctccccactggctcactctgctccagtcactctggcctccctgctatttcttatgcaaggcagacagggctctgctgcagggtctttgcacaggctcctgtctgtttggaatgctcgactacttctcactcttcctgatattttctcaaatgctgcctcattgagaactaccctaaccactccatttgaaattgccacctgccccactcctgaatgacttatttctttagctcctgactgaatttgtttatttagcttattgtttgttatctgtctcttccatccacccctccctgctgctgccccttgggtcatgatatgtcctttctcggaaaaataactgccactgatgaggtaccatattttcactggcaaggcctaggacataagccaaactctggggtctgattgtgcagtcactttaaataaaccacaagagaaaagagtgattccccaaaaggacatgctgagtgctgctgctaggagaagggatgctggctaggcaaaaccacagatgttcacttgctgagtcagaccagtacacccagaggagctttgggaaagcctgtgagaggggccctccatgtccttgagagcagaatttaaagatgagacctctaaccccctcactttcttgtaatgatg

SEQ ID NO: 586189 - DNA, 4001 bp, Homo sapiens
acacttaccaagcagacacacattatgcaagggttgtctgtgataaatggaatctggaggacttcaccttcattttcacattttgcaacagaacctgaaattcaggggggaaaaatgtttcatttaaagttagcttagcagcatgatttcaacatttaaaatttttacactaatcctttttgaaacctctacccaaacttcagaattcttaatgtggtttaaattattaaattcaccaaagcaaaacctctgcccccaactccattttcaataattttatttaaacaggttcaaaaaagaaaagactatgatatagggataaattatctgttctcagatggtctaagcacaattccaagtatttcactggatttttaataacactcctcctttatgaagatatttcaactaagcacacagccccatacgcaaagaaaaaaataaaaaataaaatttaaaaaaaccctcaaattggggcagattttaaattgaccaaaactcagaactgagtcaataaacaggcctttctatgaatctgtctcgcattgtcttaggtttaaatcactttttgaaacgcaatccccttttcccttctcttagaaattgactccatattttcttttctgcaccaggtgtcagtaaagtatgtccttcagaatagcagctgaggtcttcacctgcctgaaaacatataattattatatccggctattagtgccctttttaaatgatagtttctttaaattcaaggtcttgagagccagtgctttaaaaagcactcctagcacagtggatgtattgcaaccccaaagatgagaaaggaagatgtgcggaaaactgcacaaatttttttcctgagttctacagagggaaagattaaaataaaagttgaggaaagcattaaaaataaataaaataatttctcaaattcaaatagaagaatgtctattattactacattgaaggcaacagcctctcagcccgcaacctcttcaccagccttcccagccctcccggggcttcgcttcatccccatcgaccagcgcagggcaagcgccaaggtgcgcgctccccaccctcccatccccggggcaagccagcgccacctttcccaggtaccaaaccggcgtcccggagggccggtccctcccgccccctcccctacctgtcaagaaggaggaagccagagacatggggacccccgagcaattgagtagcagcaagacgcagcacgtaatcccaggcgagcggcggcagtaacgctcagccagagccccgacgccggagaaccagagcatcgtcacctggagggaatccctggcgactgcaggtcccgcgccgccgcctctgctcagctgccgcagctcacagtcgaaaagggctctcagccggcgtgtcgggagaccgtccgcgaaggagggaggcgggcgcccgagagctggggggcgggggggtgtgagggagggcggggggagagaccaaggtgtgggggcgcccggggaggaggggtcctgcggccaggctcctccgatgcggctttttttttttttttcctgagggagttgcttgcagtggcttagcagtcagcccctcagcgccggagagggggccaggaggaaggggtgttgcggcagccggagatagactgagaggagctgcggcgctgccgactgcgcactgccgctcagccgccgcccgggctgccgctactgtttcgggggctgtcgctgtcgctgccgcagcgtcctccactcccgcactcctcacctcctgccagccccgccggctctcggccctcccggagcgcgctcgctccgccgcaacagacgtgggctcaccgggcgcctcccggaacccgctgggggcgcccgggcgcaggagggactgcgcgatagctgcagcgggaactctctcggcccagcttccagttccccagcccctccagggaggccagggccccagggcgcggaccagagccgagaaggcgcgtctccactgtccgggcgagcgcggctcctcctccctttcttgggggagccccggggatgccgcagcactagcgctcaggcccgggtgccccaatccagcgagggagcagcaaacgggacgcaggggcgccccaccaccctgctcgctcccgggtgccccacctttgggaaggagcgacacacccggggcagtagggcccccgcaacttttcatgccctgctttgcttccctctggcgggggcgcgacagcgaactcagggggctgagcggacagaggggcaagtggccttagagatgtgttctgtgcttagctgtctgcgcgtcctgacactagggatgaccgaagttgaaacacacacaaggtcgatttaaaaacgtaccgaggcaaacgcctttcgtccttaaaaaatgaacagtcgctccgagactcctcccttccaatctcgggcggaccggggcggggaggtggtgtttgactaatcattcattcacccgaaaagagggaggaacccccgccccaccgctcatctctggcgggggccgccgcgcggcggcctctgcagctcggagctccgtcgctctctcagcccggctgcgccctctcgcctctgcagcactgggtgtcggggagtcagctcctgtgatccccctgctgaatcgccgcctcctccccacgcagtggcaccctctactcaaaaggggtgcaatcgcagagagatgatttttgtaaccaaagtacgaaggcgcgaggtgggagtgagggacgcttggcaagtgttgggacctgacgatcagctagctgtccttgagctcacggtggactaccgacttcctctgtccaagagttgaaaccgggtccccacggaacggacctaagggtctccaggcaaagtgggttgtttccattgtggaaactacagctttgaaaataaatgagtctgtttgctgacaggtttaatctagcttcaccttaacccttccctgcctcgttgactgtttattcgttttttcgagtgatttggagacttcacttaattagtgcaacattgccaacatcgcgacacaccgaggagctgatgcgagcacgttgctgtgacgtgggaaaaataagagaagggaaaactgtcattagcttagcatgctccatttccctcccaaaatagattcttaccgtaaaatttaaattgaaagagaaggctgatgtgtgattccttccctccctccccccacccaaataaagccatggccaggcagcttctcggaaaccagtgtgtttatgtatttactaatcataaagataatatgcaaaaagagaaaaatctctaaatccagccttacttcccagggactcattaaaaaataaataaaattaaaattaaaaattaaataaatagaaacctttattgctgcagataagtacaatcagttggaaccactatctcctctatctaaaaagattgtccctggatgaggcttttagataaagttgtttatcataatttaattatggaaagctgaagaataaggaagctgggagaccttttgttgccttagccataaatttggataaatgcatgctatgaaattgcaagacatttgaagggtgtgcctgagttactttgatatgccttccctccctgacaccagccaaacatcctcagaatttgcatgacaaatttctttatgatagaatctagctgtgtgtggcatttccataatgtgcagcatggtgctttggaatgcactggaactctccctgtaggtgcaaacccaaaaaccaccttaaaaacattttcatctgtctgaaagtttgcgaaggggaaaaatgcacagaagcctttggcaaacctgtctcttcttcctgtttgttataagcctctgccaccagcgatttcccttgctgccttcttggcaaatgggccctgcttccgaaagagcagccttttctccaaggccttatcaagatgttttcccatgcatctactgctgccatcacccctcaagtgatagtc

SEQ ID NO: 586190 - DNA, 4001 bp, Homo sapiens
caggaggcagaggtggaggttgcagtgagcagagattgcgccactgccctccagcctgggcaacagagcgagaccctgtctcaaaaaaaaaatgcaaaaattaagagtcacagttgaaatgatttgtttaagatcacacaaatagtaacagtttcaggactaaagccaatgttcttgatttctaactcagagctccttccactatgacactgtttgaattatgcttctctgaagtccaccaccaactggggagcatctgcggtgtatgaggtgctactggaatacaaagatggctaagaaagagctattccctggactcacgggaggcagttcaaaaaaaaagaaggccgggcgcggtagctcacacctgtaatcccagcactttgggaggccgaggcaggcagatcacctgaggtcaggaattcgagaccagcctggccaacatggtgaaatcctgtctctactaaaaacacaaaattagctgggcgtgggggcgcatgcctgtaatcccagctactcgggaggctgaggcaggagaatcgattgaatccaggaggcggaggttgcggtgagccaatatcgcgccattgcactccagcctgggcaacagaagcgaaactccgtctgaaaacaaaacaaaaaaaaaaccaaaacaaaagaaagaaagaaagaaaaaagacaaggccaggcacggtggctcacgcctgtaatcccagcactttgggaggccgaggcaggcagatcacctgaggtcaggagttcaagaccaccctggccaacatggtgaaaccccgtctctactaaaaatacaaaaatcagccaggcgtggtggcctatgcttgtaatcccagctacttgggaggctgaggcaggagaatcacttgaacccggtaggcggaggttgcagtgaaccgagatcgagccactgcagtcgctccagcctgggcgacagagcgagactccgtttcaaaaaaaataaaaaataaaagacaaattgacatgagttctgctttcactattaaaaaacctttagtacctacaggtgaaacttagcttttgatttttccccttcttggaaagagtctgcatttagtcagctaacattctagtaccactcacaagctaaagatcttccgtaatttgcaagggaggcagtagggggatgagagttataagttagctaacaaccaactattctttaaagcttaactgtgaacttaactgcaattatgcatttcattgaccttctctagtgtaataccagctcgtcccttagaaaagaggaaaatacacttacgtttttatttctagtggttctaagaacttgtgatttggctccagattcctacatgaaaacactgcatatattcacctccttctcttttcaccgcattcgagtttttctgtctactacacaaaatgatagatagggccaggtctgccagaaccctaaatacagcggcatcgccctgcttccttccaggggatcttactattggaagggctctgctacacagtacctcagacatccagaagagagtttatcttccctccaacttctatatattcttgccataaggacagcactaccaaagcgggctcctcctctcagttgacagaacggtgactgcctgcgaggctcattctgagatagggacaagggaaagggaccggggcgataagtgagggtcccagcttgagggctggagtgggcaccagactcccaccaacgactaaaccgggggaagtaaagaaactggccttccccgcacccaaaaataaaacatcacatcactaaaaaatgtaaacgttcgcaacattttctaaaacaaagccactcacctgcaaaggggccaccagcagcagcagcagcagcagcagccgctcctccgagccgccaaagagccagcgcctcctaggactcatcactgccgccggcatcgacgctcttttctagcccctgaaccagacgtgggcaggtcctagggctctgcctattggaaagtcgaactgtcactcatccacggtcccggcctactcccggaacaggagaggtctcttccgtttaccaaatcccaggagtaagaagtggggctctgattggtttactctagagacgagcacatacctgaaccagtaaggagttggcttcgacgccagcgggcaggcttgggcctagggaagtagaaaaacacaccctagagcgtcgctggtgcaaaacctcgggtgcggggagcatcttagctgtttgaggttctagaaagcgtttaacgtcttaaaagaaacacctgcgggtgaagacaggtgtcagcggactcttggaagagaggaggtgatgtttcttttacttatgggaaatttagggattgaaacctgaagacgaagccgaggtatcctcccagaagaagctcctttcgcacaaattactcgtggttgaaagtcttaagtcgtgattaaaacaaatgcctttaaagtgcccaatttataggcagtaacgcaaccttactttctcttaccgcttttatagggattcccctaggcagtttgctgacagtattttaggtggggaagaaaagtgattaatggaatgccctaaaagcttattgcacagaggaagggaggctagagtggaatgagagaatgacaaatttggaggcgacaataactgaacaagagaaatctatgaaaacaccggaaacctggcacgaggccttaaaagcttctaagcaggcttgaactaccacacgaggttttgaagcatatgtgtcagaactcttgggtgggcgggaaagataaggaatgttatgggagattcccttcttagaagctatcctaagtagtgtttcgtgtcctcctgtgagtttttcctgtttcatcctcctaacaaatgcattaggtttgtgacacgcaagcaagtcctcagaataaattatacatacagttgaaaagataatctttccacatttgaaattctgtgacacactctttattgaactcattaagacctaatcgtagccagttctgtatctcatttatccatgttagagcatgacagttcctcctgggatatcaacagaactttacttccgggacggcactaatccgaggcttgacaggtcccagcaggtgataggtctcacctagtgatagttagaatttaacttgcacaagattaactagagttcaggccagaacagctggaaggggcagcttccaaatcttatacatttgccctcttgcttttttctcaatatcagttgaggacaaagtaaggagaaagcttttcttctacagtgtaataaagctcctattcagagtgcccaccatccatactccggaggctaatgacagtcattaccaagtgacagtcttgtggcatttggcatttagggctacttagtctggacttaagggcgcctactcattggatttaagtttactgttgttatggacacccatggaatgctagcttgtcacataaaaccttaatatcaaacatcacttgccttttagaatcattcgcaagagtatgtggcttatgaatgagtcattttgatataagatggaagcttatatcagtgattctgtctagaaggaattaaaaagcagattttcatcaggagcaagcatgtttgtaagacaaatgtgcacagaggctaacagaatttcaggagttacttttgccctatggcaagattgttctccatacttaattatgttacagtatcatatcctgaaccctgtgtcctggtctattcgatgagctgtctctcttatgaatttttaaataacgaggtcgtggttcacaaagatgatcataaatccatttaaggcaaagatgaactccaaagaatattagacttgtacaaacttagtacttgacagggctttggaaattaaactctagctccttgttgtacagataaagaaactgaagcttaagtgatgtgctcagaattacttggttggggacaaatcctgggctaggacccaaggttgct

SEQ ID NO: 586191 - DNA, 4001 bp, Homo sapiens
atgtcaaaggaaacaaagatgtttataaataagaaggaacgtggaggtgtggagaagaaaagaggaagcttcagaaagttaagtaccaaaagccaggaaacaaggcaaaatgaatggtaactggaaacaagggaaacagaataaactaggaaattgaagtagagaagagctttctccttagaaatcaagaagctgggggaaaggaacagatatgagaggaaactgatctaagcaaaaatgcatactgaaaagtggaatgattttaagaaacttaaaaatgagaaattttagaacagatcaaatgatggtacagaacacattttgggcatgtaacaaagatgatataaagagtagaaaacaaacattatcataaacaagctgatgctgaataaagcaagcatattggatgaatttccaaagatgatgatgcaaaaaaaaaattgcagagagaatgagatgttatgagaattgagaaattagatgttaatagtaagtagcaaagagaacttcgagcaaagtcaacagagtaagtcacattacctaatcaataactgtaaaccacaattattataccatatcttatttgtaaagcataataaagtattattttctgtaataaaataccaaatatttgtaataaattttatgtaataaaaaaacgtaaataatttgacacagtgctaagaggctgactaatgcaaaaacaggctgagagaagcaaggactggagaggaaaaaggaaaaggaaaaaaataggacaaaaaggaggacaacactaagaaatcaatcagacctataaaaatgggtaggaataaagaggtgtgaatgcacaatggacgactagccaaaaagtgccagtagtgcaagcgcgaaaagagccaagtgaaacctgatggaatcttgacagcttctgggctcagaaaacaagtagctccaaagtgtccaggaggatttgtgaagataacaacagacaacaatgttagggagtggtgagatcaagtacagagcctcaagaggaccagggtaagagaagtgcaaaaatgctcttaagtgggagctggggttagaaggcaggcaggtccgacaactggaaaatgagcgggcggtagatgggaatagaatgggggttaccaatcagcgacagagcgctgacaaacattaggaacagaggaccagagaccagaaaaggcatcggaaactgcgatttaggattgaaaaagtaaagactaaatcaaaataatttgctgggtaaaacaggtgaagagaaatccccaaatagaaaagtgaaaaagggcagcggactgagaaggggggcagtccgggagaggagagaggaaatgatgagccccatcatccccacgaccatgtaagaattacacgcgacagtaactcgggctgttgtctcagccccagcaactaacctatatcctccacgtcgaggccgccgccgcccccaccccacagagatgcagagctggatacttcagccaatcgtgaccttctcggaccaaccctgagtttcgccccctattgatagcctcccgctcaaccaccgctgccccaatccccacatctggggtgggggccagggaaaccccccgggccattgtgtgtgtttacgtaggaaggcgctgcatgacggagagggacacgggggcgatgcccacctcccagcccgcggagctggcccgagaaggtggctgagggcatcaagcccccaccgccgcctctttccaaaataaacaccagccagccgccgagcccggagtcgggagggcggcagggtggcgccagcactcacctcctccggaatggcagggtccgcagccgaagaggccgcggcgccggcgccggcgccggcctcgggctccatgtccccgttgaacagagcctggcccggctccgcgccgccaccaccgccaccgctcagcgccgccatcttataaccgagagccggggcccgagcggccgctgtcgggcggggagggggaagggaggcggagagctgggggaggcggaggcggaggcggaggcggaggagcggggggcgcggggggcgcggggaggagcggcccgggcggcgccgcgggcggagggcgcctgggccacctcaggtaccggcccgcggccccgggcgcagccgagcctgaggggattgggggaaggacgctaggcgggggtgcgggggggagcgggggaagggggcggagacgacgagaagtcgccgcggcaacggcgtcacccgcgtgtcacggtcgtgacgtcaccccggtgcgtgacgtaatctgaggcgcgccttcgcgccgtcgtccggggagggttttttcccttctaaccacccgcgctctcacactttgcctccgctccgccgtttccatggctccggtttcctactttcctcttgtctcctccgtcctcagcctgttctgtaatgtgggatttactagaagagcagggctggtgttcgaggaggagaagttgaaatcctagagggaggaaggcggggaagccaatactacttgctatttccactgcaatgaacgtctctgtgtcatcaaaataagaacttcaaccccaaggttgaaacagccaagcagaatttgatggaaatatatttaggaacagctaaattagcagtgcgacgcgtgttttcttttcattgaagaattcagccagttaaaacgagtctaaatggaagtctgaaagctttttcttcattgttgaggaataaaatatttcgtgtatttttcgttttccagattcattcatttaacaaatatcagttgagcactttccatgccgtagggcctgtacaaggcacatagcattctagacatctgaagcatcaaaactaatcatttttattttgaagaaaatcactcaaaatattttatgtactttgtgcctttcatgaacagaatattccaagcattctctgcaaaatacgcatgaaaacaattgggagagaagaggtcaattatctttgagaagcccaattacagaatgaaattcaattcattattaaaaatacatggatctaataaagaataaataattggaaaagaaaagtttaaggaagagagaaacgggaatgagaaacaattactgtgggctcccaatggcctggagtgaatcaccaaagtaacctaaacatgaagtcatgaaaaactaagtggattctgccttttagtacttcccatcatgggggaagtcaccagcgacctccttactgtattttggatgattcaagaaatagaaaggtgtcctactgacttctgaaacagggtgtcttcatattgattagggtcaccgtaagcctgggagctgatgcttactctcaggtaaaggatgctgtgtgaggctgcttgatgaatgagaatactaacattcttctgcattgaaaaaatataacctataagatgaacattgtaggccgggcgcagtggctcacgcctgtaatcccaacactttgggagtctgaggcggatggatcacctgaggccaggagtttgagaccagcctggccaacgtagtgaaacctcatctctattaaaagtacaaaaaattagcctggtgtggtggtgcacacttgtaatcccagctactcaggagcctgaggcaggagaatcatttgaacctgggaggcagaggttgcagtgagccgagattgcaccactgaactccagcctgggcaacagagccagactctgtctccaaaaaaaaaaaaacatgaacatggtatgctttgttaacttcattgtacattctcctccaagtaggaaagtttctatgaggaaataaatttaaatcaaaaagtggcttggcaaatgtagagtaaatgatcacaagggatgatgtcatcaagctaaactaatctgaagcaccctttactataaggacatacttagaagcagactgaaatagcaccattagccagtcatggcaccttttcccctttcatcaccctttcatcaccctttcatcagaaacacaactggcaa

SEQ ID NO: 586192 - DNA, 4001 bp, Homo sapiens
tcagcctccagagtagctgggactacaggtgcgccaccaggcacagctaatttttgttttttttttttttagagatgacgtctcgctatgttggaccaggctggtcttgaactcctggacttaagcaatccgctcgcctcagcctcccaaagtgctgggattacaggtatgagccactgcatccggcccctactttcataatcagaaagaaaacaaatctgatgtcttaaacacactaaatacaacgagaacaacaataaaacaagtttgttcacgccttctgtagaactgaaccttggggtgccctgatcgtggctcaactggctgaatttcaggctctaactctccagatcattctctcgggcttcatcttaacttgccctcagtctgccacagataatccttaggaagtgaaggaaagacatctgattggcagtttctgcccttcctccaggacaggggagtccccatctggcccctgctccctgtcccagcctctgcgtctggtctctggataggcagtaaacagcagcaccacctccttacctccttcagtgaccgttttaaaccagtccaggagcttctccaaacaggtgtcatctgccaccggctgcctgggatctaccagaacagcacagagagccgggagcagctgggcgcattctgggtccatggtgaggccgcaggccctgcaaaggcaatgtgagagccaaacctcaatgcccactccagacccagctcgctctagtcacagcagcccaccatgcctgctcaggcctgggaaggggccccagaactttcatctcagaccaggagaaccatgatccccagaccagaggtctgtactgcagggatggatgcaaagctttggtctaggtggggccctgagcgctggtggcggggctgaaaggggcagatgagggtctagctgaaaccacaaggcctccggaactcaaagtctgtcacccttggtctttggtgcagtcggggcaacagcgtggtgctggcccaggctgcaggtgggccagagtcaggggcatctttgagttccggggtcagccatgtgtgcaaggggatgtctacccatgccccagggccagcctgggctggaaagtttctgtccctcccagcgtcaagtggtggctgcatttgacgtcctgaagccagcaggggggtgcggaggggaaggggcgcctgtccgtgtgtctgtccctctcagggtcagtggtggctgcatttgctgttctgcagccagtaggagggtgaggaggggaaggggcacctgtccgtgtgtctgtccctcccaggattagtggtggctgcatctgaagccggcgggggggagaggggggcggcggggtgcggaaaggaaggggcgcctgtctctcccaggaccaggtgtgcatccgtgcgtccagcctcgggggtgggcggggtggtcagcggctctgtctaaccggggcaccgtctgccaatgcccgggaaggctgcgtcccgggaagaggaaccctccccacactttgaagtcagttttggccgcgagcgccaggcccgagagtccagaaggggcgccagagcaggcggccacagtcgggctgggaagcgagcccaggtcgcgcacgccccgggctgggctgctccctggcccgcccgcccccctcggccgggtcttggcctccccgcgccccactaccacgacctcgacccccgaaggcccacgcgcctcaccgctcggttgcgtcctccgccgcaaccacccctcgcccaaggctccgcctccggacagtgccacctgccaggcccggaggaggcggaggacggagacggctggcgtggggaactgagactgcacccctggaggccgctctggaagcctcgagggcccagacttgaaggaaggagttcaagctgagaggggctggggacaggcaggcgccaagccggtcgctccgacagatcacccccgccaggcgcctagtggttcatgccgagcatccggtgggtgggcggggcgtctcgagggcggggatctctgaggaaggcgcggggttgtgtccggaggggcggggcttcgcctgcagggcgcccagtgtctgcaccggcgggagcgagaaaactatgtgccggagagaagcgtcctgatccgtgcaccaaagcccttggtcatttagcttcaggttctcaaattaagtcctccgcggccgcgctgtggctcatgcctgtaattccagccctttaggaggcgcagttgggaggattgcttgaagccaggagttgagaccagcctaggcaacaaagcgagaccccatctcttaaaatttaaaaaaaaaaaaaaaaaaaaaaaaaaaggccaggcgtggtggctcacgcctgtaatcccagcgctctgggaggcccaggcgggcggatcacgaggtcaggagttcgagaccagcctggccaacatggcgaaatcccgtctcgtctctaatttttgtatctctaagatatcaaaattagccggacgtggaggcgcgcgcctgtaatcccaagtactcgggagactgaggcaggagaatctcttgaacctgggaggcggaagttgcagtgagccaagatggtgccactgcactccagcctgggctacagggcgagactccgtctcaaaaaaaaaaaaagaaaatcagccagacctggtagcatgcgcctgtggtcccagctactccagaggctgaggcgggaggatcgcttgagcccagaagttcaaggctgcagtgagctatgatcctgccccggcactccagcctgggcaacagagcaagaccctgtgttttaagaaagcaaacaggcagaaaaactaggtccaaaaaattgagttcaaaacactaactgtgtgttcgagagtctcaaagccagtggatagacaaggctcatgttcccaaagcattgttttatagcaagattgttgggagccaacaccagatttaggaaacaaagcagaattcctatggatattaaaatttaaaaatttaaaagcactgactttgctgggtcacctttattttatttatttatttatggagacggagtgtcactctttttgcccagactggagtgcaatggctcaatcttgactcactgcaacctccacctcctgggttcaagcgattctcctgcctcagcctcccgagtagctgggattacaggtgcgggccaccacgcccagctaattttgtatttttagtagagacggggtttcaccatgttggccaggctggtctcgaactcctgactttaggtgatccgcccacctaggcctcccaaagtgctgggactaccagcgtgagccaacgcgcccagccgtgctgggtaaccttggaaaagcaacttccctgacgcttgcatgccccctgcacacacacacacacgtacatccttagaactacatgtgtgaaaaagtttgaaatgcacagttatcttccctgaaatttggttcctcattgtgaaatgagatactaacattcacccagttaggtaattgtggagtaaagaaaactcaacaacagcactgtgctaagtgcttcacttactgtaaacttgtatgattctacagcaacggtaggagagtaccactaccagcccatcagatgaggaaaatgaggcacagagaggctaactcataaggccttacagctactggattggcacagtttggatttgaacccaagcagtctggctccagatttgaatattgtattgcacaggtccacaattttttttttttttgaggtggagtctcgctctgatgtccaggctggagtgcagtggtgtgatctcagctcactgcaacctccacctcccaggttcaagcaattctcctgtctcagcctcctgagtagctgagactacaggcacccacgacccctggctaatttttgtatttttagtagagacagagtttcaccatattggtcaggctggtctcaaactcctgacctcaagtgatccacccaccctagact

SEQ ID NO: 586193 - DNA, 4001 bp, Homo sapiens
tctgctcctccatgttctgagtcccctccatgtgccttcacactcacacagctctgccagccccccaacccggtgcagctccgggagagaactatgtcccgaaggcagccagcgccccaccctgccctccctccaccttcactccaaaggctaatgtttctgctgggtggtgaccaactgtgtcaaactgacgtcccagttagggtttgtcacggggtccctgtgcaggcaagcagccacaacctgcccccgaggtcccagcctcttgtccccacctctaggttgcccttccttcccaggaagttgcctgctaaggctctgaaatcactcacttccccgtgactccactctaggccttacacacacacttttgaaatcaagtctaagtccaaaccagggtttcttaattccatctcagtggcttcaacttcctcctccgagacacagctgaaaaccctgtcccggccaactctgcccctactttctaagcaatctgaacacccccagctgccaagggtttatatttaattaatccttatttaaatgtgaatcctcaaaacctccacaaaacaagcctctagctgcacctcggggccctataaaaaccaaaaagcgtgtgcaggtccaatgcgaggatatgaaaaaaataactcctgcctcaaagaaacacggggtttccatcctggtccagctcgtggaagagcgtttcaagccaactttggataaagcagctcttacggccgtcgcttctcccactgaggtctgtcctgctggtgcacttacttccaaatgccccttccgggaaaatgaaaccttccaccaccttcgacgatcaactgcagagtaaacttgcggaaagtgaaggaaaaagcagacacctgattccttgcaagtcccagaacaaagacgaaaggaccacgagtcccgttgttaccatttctacatcccaatcacttggggtgcaatgccccaagatctaggaaaaggaatccacccttttgcccccacaaaatgtgttcagagccaagggtgagcggacccgcactctcccacaccgcattcgggcagcctgtctgtccctcccataaagggctctggtcaagatccaagtcaagccggacccactcccacaagcagagctgtgaggtcctgggggttagggcgggggtcctcagagcttccagggccagtccccaggctgcagacccactcacctgcagacaggacagcctcctacgaccacgatagagttggcaggatagcgggtgacggtccggctgtggatgttgtagaccctgggatggtgggtgggtatccctgtgggcgggaaagcaggtcattagggtgcagggaggagaaatcggaccgccacggggactactcatcctgtcccctcaacctccaccccgctaaaaaagcccccggtcttttccaccctcgggacggccaccgcgggcctgattcggcgctaatctgccaacagcgagcgcctcgtgacacaaagttcatctggggcagggatccggccccgccgggttacgacgggcccgaggactagagccccgggggggaggctggccctcggcggcgccgggtcccgaagccagcccggggacctccagctccaggaaggacccccgggcgggccccacccgcctccggacccacgtcccccgaccgggcttgccacctcggaagccgccggcggggaaagttggttacgggcccacctgtgacgaggtaggggtagggcggcggcgggggcgcggcggggatggcgccgtagccgtgcgggccgcacgcgtagtcgccctggccggcctccaggttgtaggcgggcggccgctcctgcagcagcggcttgtggtccatggcggcccggccgcgcccgccgctccggcccggctcggctcggtcggccccggcgggggacgcggcggcggcggcggggacgcggcggaccgggtggctcgggcccctctgaggcagacgcggggcggggcggggcgggcgcgagccgcgggcttcccccgccctcccgggcccagtcacaagaccggggtcacgtgggcggcgggaggcggggctcgggggcggggccggcggggcgtcttaaaggggccgcgccctcccgaagccgccccgccggcggcgcctctgcactccgccccgccccgccgccgctgctctctagacctcccgtggcggggagacccccccccccgcccatcccccacgacgacccagagacgccccatagggtcatgacctttagggctcgcggatgcacccccacctccccctacgccccgatctcccaggccggccgaggtccccctaccggtggaggagggggagggcggggcctgagagggggcggggccgggtgggtcccaggccgccccaacgccagccctctgcccctatgatcgccagcgcttccagcaatacaaagggcacacccgggtgtgcacctcagctgcggcctgcgcggtgctcagctgcggcgcattccctccgtttgcctttttttggacaattaggtgattgacgggggtagtagccagtgcttacaaataactcccccgtttggggacaaaactataaatactgggcacctgccgcgtctcctcagtttccctaatcttcaggcagccctgccaggtgttttgcttacccctggaggacaacacgggatcgggctcagaagggggagggatttggctgtggcaggtgcgggtcagagcccgtatctaaacctgggtgttttctggcctcggggactgcgtcaggcgccctcgttgaaacatttcctcatacaaggcttcacgggttggccaggacaactttaaaacgaacgattggaacgttcaggattgcttgcgtccttagcgcctctgcaccttttcaggggcacctgtatccgttactgtattctgtctccagttttctcacctgcattttgatatcacctgcactgtagctctgggacgactacagctcttctcgaaccgcgcctttttaatttttaaaaaaaaaatttgtagggggtgctgggggggctctcttgctctgtcacccaggctgcagtagagtgacacagtcattgctcaatgcagtctcgacctcctgggcccaagccatcctcccacctcagcctcctcagtagctggggaccacaggcacacgccaccatgcccagctaatttttaaaaatttttgtatgggatcttgctatgtgcccaggccagtctcaaactgctggcctcaaccaatccttttgcatcagcctcccaaagtgctggaattacagatgtcagcccctgcacccggccttatttttattttttaataagggatcatcattcacatgtatatatacacacacatacatatatatatatatatatatatatatatcttttttttttttttttttaacagagtctcactctgtggcccaggctggagtgcagtgatgcaaccctggctcactgcaacgtcgacctccggggctcaagtgatcctcccatctcagcttcctaagtagctggggactacaggtgcacgccacagtgcccagctaatttttttttatattttgtagagatggggtgttgctatgtttcccaggctggtctcaaactcctgggctcaagtgatcctcctcactcagcctcacaaggtgctgggattataggcatgagccaccaagcccacctgaccatcatatttctttatcacaagaccagctcttcgaagcccattcccatcgatcttgtacctgctgtcctagtcatcgtacccacagtcctcgaaaaaggaactgaggggtggtccaggtacactagggaactgaggggtggcccctggcactgatgaacagccagatcaagagtgaagactgggccgggcgtggtggctcatgcctgtaatcccagcactttgggagggtgaggtgggtggatcacttgaggtcaggagttcgagaccagctggcc

SEQ ID NO: 586194 - DNA, 4001 bp, Homo sapiens
tgagtcagcatagggtcacagctatgggacagggctcagcacccagactgtgttcaaatcctggctctgctacttacccgctgtgatcttcagaaaggtacttaaccttcctaagcctctgtttcctcatctgtaaaatggggataatggaagctaccttatgtggtcattgcaaagacttcattagaattgtatctatcatgcctggtgtataatgtgtgcctaagagacatttgctgttgtcattagctaacttcaactaaaagcttaaccctatactggatgttgggaacacagaacaaaagttaagcctttgccccttagaaggtgacattttagcaaagagacagacaagagaaaaagcaattacaatagagtataaggagggctgtgactcggggagccatgggggtgagtatttaaaaaggcaaagatggaaggtcaggcacggtggctcatgcctgtaattctggtcttggccagcaccttgggaggctgagatgggaggatcacttgagcccaggaatttgagaccagtctgagcaatgaggtgaaaccctatctctaccaaaaaaaaaaaaaaatcaaaaaaattaactgagcatggtggtgggtgcctgtggtctgagctacacggaaggctgaggcaagaggatcacttgagcccaggaggttgaaagtcttcagttagccatgttcacactactgcactccagcctaagtgacggagtgagaccatgtctcaataacaaacaaaacaaaacaaaacataaaataaaaagggaaagatgactgtaaaatcaaagtaccttaggatgtgctttccaagagtatagacagcagaaagatctctcgtctctgcagttgcaggcttggattcttgttcagctctaaaaaattattctgtgactttcaggtcaccttccctctctggtcctgtttcttctgtaaaatgagggcagtggattggctgattgccaaggtctctttcacaccaaacaacatattacataaagtcaggtagttcccatacaagaggccgatcccaatctaaatagcaaagcgtttttcaaaccacacagcatttccttgctgccagagagaacccaggttaagtatttacctttcagcataacagattcatctctctcaaattcattcagtcactcccttctgtactgacactttacaaagacccaccccccccccgcccacagagcctcctctcatgaactctctaaaacaaccatatagaggaggaatcaaactctataaggtagaatcagggtcacacagctgagaatttgcaaaacctgactctggagggctcctgactcccaaatcagtggtcttcgcactagtctcccctacgctgaagctaaaaataggtgaattctggtctcggccccaaggcgcatagtctgtgacaagagaatgatcgcttttctacgacccagggaaattcgagggccctgatccagcctggaagtcagaagaggcctctcggaggtgaaaatggtaggcggtaaccagatcgaggagaaagaggacgtaggaggtaatcagatcgagaagaaagatgtgccgggaggtgtaagagagattggggcgctaggggaaggaggcgaggaggagcgaaggaagatagtgcaggattgtagggaaaactcataaaaaggacagcatctgaacccagcttagaaaaacaatcagaacacagaagacgttcctaccagaggaaacggcgcgagaatcctagaggaaaacccccaaatctaccgtcccctcagaagaacgaacgtggcgccgcctcctctcgggagctctctccggcctcaaggtccaaagcccgaacacatcccagtggctggctgagagtccagccactcatatctccctccaggacggtgcagaccaccggtctcccgcctcagccgttgccaaggtaatcgagaacagagggaaaacacataccggaagctcctggagcttgggtagctgcttctcgacagaaggcttccgctcttcaggcgatctctaaggcatgaggtccttgcggagccccgccctacccgcgcggagattgcgtcatcttaggtgtcctcagcaatgcctgtatagaattccagagccgctgttgccatttgccctcacttccggtgggtggcaggcagggccacgcgtcttcccgaacggagagactaggggcgttgttgcctggcagcagacgggcaagcctggacttaggcggcgcgcaggacggtccgacttcgtgcggaggcctccctgaggtccgggtccttgcggccactgcggccactgaagcggcggcggcggctggcccaggaggaagaagtcgagcccaagctatttccggttccggtgtcagttcgaggcgccgccgccgccgccgcagccgccggagccgcaatgcctaaaggaggtgaggggcgggcgccggtggcccgcaggcctggaggggcggcccaggtccggcttccgctgtcccctcagcccgtgcgcgtctctgagagcagcgcagagggaggctgtccgcaccggctgagagccaggcctgggcctcgacgcccaattgtcccgatggggaaactgaggactgtggtgtcccagagtcactccgtcagtggtctgaggagtttcggaagctctgggtcctcgccggcctagaaagccggatctaggatgcgcttctccgggtctaggggttctggaatttatcccactctttggctggctaggaactgagtcaccgcgtcccgcgcttgtgccgggcccgcctgcctctcgcgtaaaacgtgggctttttctggcttcggttcagccaggcctgcctaggaggacttaaggagatgcccatgagccttccagacctggtttcgactcccccgttcggtagcggctcggtgtgttcctttgagccagtcgctccacctcctgtgtctccgttttctcatttgccaatgggaataacgattgtacctacctcttagtactgttgggaggcttcaactaggtaatccacgtggagtgcgcagtacagtgccaggcagtcgttaaaagtgcccagtgaagcagtaactattcttatttttaaggctttgccagctcttgatcttgtaagtaggttcatgactgcccagtccattgtagcccgtcctctatcttctagcccgttctctatcctgtttccccctttagaatcgatagtccccagtttgaatcccagctatgtcacgtctaattctgtggccctgaacaagttaacctcttcctcatctgaaacactgggctaatccttagcttgttgaattggggccggggtggtaaaattatagcgctcataaagtgcctggccacctcctggcacagaacaaatatatttgtgttggtagctcatgtgttatattggttaatgcactcaacccacagaaacatctgcctgtagcgttttcaaacctaaatcgcttcctgactccagagataattgggcattacagagctaaatgtgtttaaacctagctctctactgatttattctgtggctggaaaagtctctctgctattgttccccagtcccttcatctgtaaaaggaggttgctgaatgagccatcctccctccgaagttttacttaatggatactttgggtaaaggttggaggttacaacgataaaaccttaaatatgaattcatagctaaatggtctttgggcttgtgaaaagctttttggggtagacaaggtttacattttcttgggttaatctgaaaaccacaaaaaaccgtgaaggtgttaaaagtatcaaactccctaagagcaaaggaccaacgcttgtttccattatgttaagtgcaaatcgttttttaaagtcttgaagagtctactataaaattactgtggaccaagctaaggtcagggtcccatagccaagtgcatgagaggagagcctatagtaatcaattttgagttgttactgttgcctg

SEQ ID NO: 586195 - DNA, 4001 bp, Homo sapiens
atctaatgaacagtacccattatgaatctgtttctagaaatgtaaactgaacatgatttatttgcatttctaggtagatgttagattctctttcaacgttattgtctctaaattcactggtcatgtattcagagagcactaaataccaaccaagtgtcataaggcatcaagaaaatagatagtaagctgctatcctcgaggaactgacaaccccagtgagacaaacaggtgtgaccttcaagtaaccatggcccagatttggcacaagagatggaaatactagcaatgaagtacccaattatgtgtatgcatctgctggtaagatgctaaatcacatgttccaggaggttaccactcaactgtttttttaggtttgtgggtttcttccgcatgatactatgttataaatcaattgtaactctgaactaacagcattacaaaagattggtcactctcaggagccttactacttgcttgaacagccacatcattattaaagcatcatccaacaaaagtatctttgttatacactgagatgaataatttcaaaccattttcatgtaagatgttctggctcagatctgtcccagtctttaatgctgaagctttaggggggaaaaacagctggagtttaggaaagatttttgctaaaggcaggaaataatgataaacatattccaggagatttcagatgttagtgaaagcttcacgcaaaataaatgcctaaggccagaggaaaatgcatttcgcttttcgtatggcgctatgagaagaaacagtggtcctggggatgcttaacaaaaaccacctacataattactcaaatatttctctttgacacatacacgtctctttgacacacatattgagagaaacatcaatactactctgtagggaaacaacagtaaaacataaacactaatttccaaagaaactttcattgatgatgtaaatataaatctgcaccctggagaaatgactgattcccgcattttagcaagcaaatcttattctgaaatacacacttgtatttacccccatctacctatggtcgaagctccaggctacatattacagttgaatgaaggttggattaagaggctaatctaaggctatatataggcagcaacaccaatttaatctccgccctctccaacctccccaccctccactccctatttccataaatctcaagatctgagttacaaagagaaccgagaactctagcagagcaaagaagcccttccttccccctcccacaggctgtctctcataaacgaagtattagtgcaagtgtaaattgtttccaaacatctttaacaagcaacattgggcgatcaggttttcttctacagcttccacagaggccaaagagatgacaagtagtggggagggcgaggatcaccagcgtaaaaactaccttctcccgagtctgttctcactgactcgctagtaatggggcgctgtccttgcgacccctacctagcccagagccccggccccagcctccccgggagccgcatctggcggtgccacgcacgagaccatgtgcacccgccacttcccaccgcgtggctggcccccgcccgcccgcccgcggtcccagggtctcccgaggcggccaaacgttgcgagtcggaggtcttcatcccagggcactgataccccgtacgcgccgtgatgatgaggtggagcgggggcttctccaccgcgaggcaggaagccgccccaggaggcacatgcttcctccccgccagctcctgcccgatggaaaccccggcggggcggcagtcgctactctcgcaaccctcacggcgccccttgcctcacctgggctgcttctcacctgtccgaggaggtagcgacgacgcgcaaggctgggggctgcggcgattcgtgcagcagcagcggcagcagcagcagcagcagcagtggcggcagacaatggaggagtgaaggacagacacattgacatagacacacggaacccggcgcagccccgcctcccgtaccgcccccgtctcctagaccgcccccgcccagactgcgccactcccgggggaatggtgggggtacggcgacaacctggggcctctgcatgccccagaaagccgtcgctgagcacataactgccagctgtagaattttcaatattacatgtggcgaaatatttgaaccggacaggataggggagcggaacgtgtaggaggaatttaattcccccctccagctttctgcatttggttttgtcctcccaggttgctccaatggcgatctctcgctaccgcctcctgcggctcctcctcctcggcagggccaatgacaggcggcaggcggtgaccgccgcagggcctgcggagaccgtccgcctggctcgcccgagctcgcccgctgtccgccagcccgcgggagggaggagagaagcgaagcgtttccgcggttggctactcagtgtcttggtctcaagttgcctcattgcggctggcgttcccaatacagacgcatcgtttcttttttaatactccctaagaaagggaataaccttcaagctggcgggagcaatggttcacataaagaaaggcgagctgacccaggaggagaaggagctactggaagtcatcgggaaaggtacgggtgctgggctgcgacgcggccgcggccagcctggccggggggcgtggcggagcccggggggcgctcctggcctgggtgacctttggctgcggttctgcaaggtttgcagcctggaaccgggaaagagcgtttctccctttggtctgggaaaggttgcaggggcggagaggtggggaggcagaagcagtgctgggacaagaggggtagttacagaggctcggcctctaaatccgcttttggaaacgtacggatttccacgccccgccttaggttaatgcgagcttcccggggtgtggaccccagtgtgtgaattcttcactgctcccgagggattttgaccgcggtcagtcctggtagtttcaggttcttaggcgggtgtctaaatgaccctttagacttccgcaggccgaatgatctggatcctttgccgatccccgcccccgcttgggagtggagggcgcccttagggagaggggttcttcataagggtacagaactaggtctgtaatttgctgcattgagacttccgtatccagggcctccctggcttccagaagccccgacagcctcaggaaccctagagagacaaggaaattggcgaggcctccacacccacccctcggcccacgttgcacagatgagaccttctaatcgcgctccttcgcgctttcttgtccactcccccaaggcgtgccccacttccgcagtgctgagtcccagcggggagccccgaggacgagccagaagccatatttccccggagtccccgagtggacgtcccagaggagttccctgccgagtcccgttacctggcaggtgacatcagcgtgactgcatgcttcttctgcaccctcacggtgcagggatggtgatgcgtgcgactccgggcaattaatgtggtgattttaaactcaataataatatagccatgtttgtcctcgaatggcagagatgccagtcattgcagcataaggcttcccagtttccagttttatttacttagtagccaggctgaaatgtggaatcctagagaataaggcagatttattcttcatagcgacaaggaaactccacatgcgaaggagaaaaaattccggtttgaactcaacaggtgctgatgagctgagcccacccgatctgatctcaactattctaagtcagtcacagctatatctatcaatgatgtgttctttgcctggaatttggggatttgggttagagtttagattgttgtactgcatggttcttgctgacctatttggcatttcagtctttcagttcttcctgtctctaggtaatttctccctgcctttgatggctctgggattcaattaagcaaacatgcaagttctagctgtgtgccaggt

SEQ ID NO: 586196 - DNA, 4001 bp, Homo sapiens
gcataatgcaattttaattttagcacaaatcaatacacaaatagtagcatgtgcctagtgacatactttttcatatttctattaggtaaacaagaactcattatgtgtaccctgaaataaatttgtgatacaattttaagaataactggatattgaatttactcaacgtagtctagtcttaaaaagcataattatgaaaaactttaaataggaaacacaaaatatttctaaaatgcttaatcctaagtaggaagatacaaaaaaatacacattccaggcaaatttgagaggcatttagtagctctccactaatactgaaaaattattctctttatgaagaattttaaatgagtcatactttccttactaagtcattgtttcacttaccataaggtgaagagttaactgtttgctaacttgaaactttatattcacttaaactgtacatctatatataaagactggtagaaagtatagtgtactatatacaatatttagaacatacagcatcatgggcattaagctcaactgccatttacctaagagggtgaaaagctgtcatctaaataccttctaaaaactcggattccaacttcccaaactcacaccagaatgaagcaacttgaaattatgcgcactttttcctggcagagctatgttctatgcccaacttttagtaagttaacatatttctctcccttacacatcggccaattattcattgattcattatggttctaaatttataacttttaaattcataatgaaatcaatccatggttagcacaatagttttctatcttaaaaaagcgttaaaaggaaatacagtagtatgtacaatggatatagagaactaggttagaaatcttgagaatttttccaggatgtgtgggttttttgttgctgatactgttgtttgctttaaatgcggggtggtggggggtggggagacggtaaggaccaggaaagaataaatccacagcgctaaattatggtcatcttttaagagtgtacgacttacccaaattcaaagcaaatggacaacttgtcaacacctactaattccatcacaatttgttggggaaaaatggggtgcagaagcaaaaaaaaaaaatttaatgcctttcttcctcctccatgccccgaatgccccaacacacacgtatctgcttcactctgcggcagggaaacttaaagaaataaatcagctacagacaaacctgatgatccaagctagacccaagcaagctccaggcacctctggaaggagcccgctcgctgggcgctcaggcggcgcggcagccgagtggctccccggcgaaggtgcccaacacctgggcgcccagtccggcgggacccacaggtctgcggcggggcggggagggcccgggaggagggactgggagggcccggcggggcaggaccgctaagtggtccggtccgggcgcactgcgcgccccgccgcgccgccaggcagcgcgcgagcagaagaggggcgcgagcgggcacaagggaaggacccacgacgaagaggagggtacatgtccacaaaattgaggccgggtacgcagccgaacgctgtggcagatcgctaaggctccgggagcgggaagtcctcgcgccttcctcaggagcccggacgaccccagcccggctttgaccccgagacacctgttccgccgcgcccggggtttggttccatcctccacgcttccccaccaacccggagaggggggagggcgaggggagacgagaccttggacccgtagcctgagggcgcctccgccggccatacctgacatcagctgcggctccctctcgcccctcctggggggcggagagggggacgacttgggactggtgacctttgcttctctgggcagccgcagaagtggctcgtggccgctagccgaggccgcccgctgccgcccagattattccccggcagcggcagcacagcggcggcggccaaggcgggcccagcgcgcgctcccgcccgctcgctccgcccctccccgcagcgcgtccaggccgtggcccgcctatggcgcagccgccacccgaagtctcctggcgctgacgtctccgccgccgcaccagccccagggaagggcggagcgggaggggcggtgggcggggatacggcgacgtgaggaagcggggattggctgccgggtgcacgctccgccctaatgcgaaggggtctgggaagtcggatcttgcacgagcagtagattttgttgtatcccccttgcggcttgtgtctgctactctccgcatttctgatcctgctgtaaggttatgcactagcttcaagaccttgagcgggacgaaagcagggtaacaatagggagcgagaaaggggatgcttgaaggacctttgtctgaggtacaggctctaaccctgcaggactcttgtggcctgtagcctgctcttaacccgttcatttgtttttctgttctctccccgtgctctctttactcagtatctctctgggcttaataaaaggaagtaataagatgaagtatgcatacgggtgctgggtcatcatgtgagaaccaggaagagctgagaaccgagataatgataccagaaagctttctataggcacatttcgtctttggttctgtcagcacttcggttctgtggggcaatggccggaagagcttcttaggggcgtaacaaaacctatctcccctttcgctgggctctgaataaggaagttgtctttggaatagggggaggaggctgccacctgttgaggcaaccccacaatagtcatgaggtgagggtaaggtttagtctttactggcgttaaccattatctacaagaccacgttccagaataggaaagctaccctgcttcctttaaatgccctatccaagcggttctttagtactctacagcatggttgttaaagagtatgggctctgaaatcagactgcccgggctggcatcttggtccctccacctattggcaagttacttagaatgcctgagacaaataataatatacattagttattgttatttttcctttaatttgcttaggttcagctgtagtgtagtttctcaggacattgcatcaatatatccaaaagaattgtgaaacataaagcacatgtagtgattctaatacagatgtctcatttttcagatgacaaaactaaggccagaaagataaactgataggtccatgttagaagagaagtgcagctatcctgatgtccaggttattgctctttccttggctcatgggtccagacttctctgccttacatgattacgtccattctctactcctccccaacttgtatacagttgttgctcagcctcctccccctccacctttccgcaatatccttccacctttccgcaatatccttccacctttccgcaacatccttccacctttccgcaatgtcttgccatccattgtgaaacatggaaggagaactctttcaggggtcagtgttccaaatagaaaccaaaactcacaactccttatctcgttttaattttattaaaagttataattaataaagaataacacttttttccattgagcaaagattagaaccctttcctaaaataaggtcagccacagccttatcctggaaaattacttgctagaaacaatactggaccaaatcagccctgcccccaccctgcctttctttgaaaatagcttttttttttttttgaagagatatggtctttctatgttgcccaggctggaatgcagtggctattcacaggtgtgatcttggcacacaacagcctcgaataactgggctgaaggctgaagcaatcttcccgccttagcctccccagtagttgggattacaggcacaggctgtggcacccagctaataactattgttttataaaaacaatacatgcttatgcaaacaaatttaaaaaatttaaacaaaaatgcaaagaagttaaaatctgtccaaataccataatatagagataaccatttcttaaattttg

SEQ ID NO: 586197 - DNA, 4001 bp, Homo sapiens
aataaagtggcagcctccatagctgagggcagatacatatgtgattaaagtagtaatgtccagatttactcttttgcacacatcgaccttaatttctgttggaaacgcaacacttgctagtatattttctcggtcaactctggtcacctgcaaaagttcagggccctcatcatctgattcactctcacttggttgaagctcttcagggtgatctaacagagcgttgactgctactatgtctcctctcacagatatgcccatttctttcagcttctctgccatggggctggagacactgttgtaaaatgcaaagatgatgtgagggttgctatactgcactggctgctggtgactggcctggaggaagtcttcagcctgctcaatgatgcttttgtcaccatattggcccctgcccagccagatgttatgaagagcttcagccttccggccaatggctttcacccaagtatgaccaccatttgcaactacatctaccacaagggtttgcttttctcctaaggtatctgtataaccaaagacatgaagaacactaacaacttcttccaggttttctgctgattccacaatggctctcaggtgtgttaggttagtgctctgtaaatgagactctttaatagctactttcccagcttctactttctgcaagaattttaattctgccttcaatttgctgcacagctttgcaccaccttctatgccaccttttcttgatctagaaagtgattctgctctcttgatcagttccttggctatggcgattcgttcacagagcatggaatgtgcagacatgctgtcagcattattcctttcctagggaaagaaacaaggcaaacttcagtagtctcctaaaattatgacaatcaattcttcactggtgattaaaaacttcaatctagcaacacagcttatggagggtgagtctatgaacccgggcttgtgtatgtctcattctggagtgactgcttcctctgatagctaaggaaaggatggcagctacacttttgaactcttctttaggtacgtctgacacactttagaccttcatttcttcagcttgaaagccatggggacacagcatggtcctaggttaggatacaatgcaagagttgggcaatctgctatataaataattcccttatgtctatcagcggcctgtttaactgctgagaaattttaataaaggcgacaaaaatgccgaaaacaaaaatacacacagactggctagttagcaaactgtccaaagcaagtgtctgtcctaaactgagcacttcagcctccctaaccttttcctccttcccgagttggtctccttcaaccggctgcctcatgatttcccccgaggcttggggtacttacgccaaaaaaaatcaacactgcctcatttctgcatttgacgtcaacccagactattttaaaagaccgaagaagaccaccaacttgcgtcccactcccactccgactctgaaggaaaatccgaagatgaaactaaactccaaggctgcaacccgcggcggccgtgcaagcggccccagcgcaggtcgccgggtgggcgggccagaggccggcggggccttctcggtgggctgcggggccctcggccctgcccggccacctgcacagccgggccctgccaggaggggccggggccgaaaagcccccaccgccagcgccgcggctcagggaccaggcgctgatagcgcgcggccgacccccttcccgccgggccggccctgcccagccccctctggcctcagaagaggcgccccgctcccagcctccccgcctcgctccccggctcctcaccggcagcgccagaaccgcgagcgcgagcacgcaggcgcgtgcacgcagaggccgggacccgccgggaaatctcaaccgggcagcccccaccccgctcgaacgccgaggcggctccacccgcgcgagccccgccgcctcgggcacctcctgcatcacgtggttccgggccgggtgacgccaaacctgcgattcccaagcggcagcgcggcctcccgagccgggttgacgctggcgtggcggccatgtttattgagggcacctggcttctcccgcttgcgccgccgggtgagcctgaaggcgcgcacccacctggctccaggaagagggaccgagctcgcgtgctgggcctcactcccactgggggcgtcggccactcgatcgcaaccgggtcgtaggcattttgggggctcattttaacagaagaaacgctggagaagcttgtcagaggtgacagctgagaagtactgcctctgggacttctgcctccaagccaaagcactttccactgcattgtcctgggccctccaaagaaagtgtgctgtccttctgaagagaagaaatgattgcatggcttccgaggggctgccatattcatattactgtagtagagtgtccagagtcacccagaaagattagggctgtaagaaagtaaagctaatttaaaatattaaagaggacttccagttataattaatcctgtgtatcctgctccttctccaaacttaacagtaaagcaatgctccttctccaaataacagtaaagcaatgacaaagggaacaaacaaaggcaaaaagaacaagagaagagatgactgcagaccggttataccaacacatttttggaggacaagagcaataacttattcagtccttacagcgtgacagacattgttctaagtgttttacacattgttcactcctttaaacaacctaaaaggtagagatattaagtatgctttacagataagtgagccatagggaggttacctgaacccaagcaccctctttgcagatggtgtcaggagaactgagcaaactgcttgtagaaggggatatttagccactgattcacaaagcagaaccccagaaagcttcaggtgccttgaaggtagaagggagggcagtaaattgttcaggcagaagactagtttaagatgctaaagacagggcatcagagggattccagacacaaagcctaacaaaggatgagaggtgccatgatgttttcctactgaatagtgcaatgctagcagcccccttctctgcccctcccataatgcaggcacccctctaccgctccctaccactatctccccataaccctatttttctctgaagaaatgagtagacaaaagaccctagagaaatggctcggcaataccaacattcagcatcccctagtgtgagcctcacgaacacagcatttcccaacgtttttgttatttgaaggaaatggaaaacagaacaaaatggtctcaaaaagtattctataactagcatcttcaaataaaagatatttcagctatgaaacaagaggatttctttttttaaggagacagcagagcacaggaaatggttcttctgtagtaaaaatcatatcccaaatttcaaaacatcaatgagttggaaaaatttagaaagtagaaatagatgaaaaatggagcaaaaacaaaaggatccagtatccaattaacaggagtttagaaacaaaaacaaaatgaagagaaaatttttcaaaaacttaatagaaaatttagcaaacagaaacgtttttcacagtgcaagggcccactgagtgctcaccacaatgactattaagaaacccacacaaaggaacatggttgtgaagtttcagaacacagcagataagagaaaaaccaagagctgcagaggggaaaacttacaaaggacttggcatcacatacgcaatagtattaggcttcctatcagcaacactggaatttagaagggagtaatgctttcaaaatgtggagataatttatttcttagagtttttaaacccagccaattcagagagaaagcaaggagaataaagatagtttcaaacaagcacctagcctggattggaacaggaagacagagggttctaagagaaacttctctgaggtgtggggaagagaactgatacagagtgcctgatatctgactgatgagga

SEQ ID NO: 586198 - DNA, 4001 bp, Homo sapiens
caaaaaaaataatttaaacaaacaaacaaaaaacactccagaaatctaattaaatgagaattccgaacagcaaaatcatcttcagagactctcaggggagactcttttttttttgagacggagtcttgctctgtcacccaggctggagtgcaatggcaccatctcagctcactgcaacctctgcctcccgggttcatgtgattctcctgcctcagcctcctgagtagctggggttacaggtatgcaacaccatgcccggctaattttgtatttttagtagagacatgatttcgccatgttggtcaggctggtcttgaacccctgacctcaagtgatccgcccacctcagcttcccaaagtgctgggattacaggcatgagccaccgcacccggccgagggtctctcttgagcagtacctgaagccaggaggcagcacactccaacaccgggattcgacacacagccaccgccatggagaccagttttcccaacaagctcatccggctgtcatcggctttgttcccttgagggctgaaaagggatgaaaaaataatctgccgaacagagtccttggtttgctcctggaaataattgcacatgatttcaagaagttgaagctcctgaagggaattcagtctctgcaaaagaaatcccggaaaagcgttaagaaatgtggctgtaacgtacttattaactcatacattaagaaaacaggaaatagactgggcgcggtggctcatgcctgtaatcccagcactttgggaggccaaggtgggcgaatcacgaggtcaagagttcgagaccagcctggccaacatggtgaaaccccatctctactaaaaatacaacaattagccggcatggtggcgcgcacctgtaatcccagctactcgggaggcttaggcaggaatctcgcttgaacctgggaggcggaggttgcagtgagccgagatcgcaccactgcactccagcctggtgacagagtgagactccgtctcaaaaaaaaaaaaaaaaagaaaaacaggaaataacagtattttcccgtagaacttttcgcccttcgtaaagttcccgtagaacttttcgcccttcgtaaagctcaggtctcagggagatctttgctgttgatcttagaaaaaagtcatataggccaggcgttgtggctcacgcctgtaattccaacactttggaggccaaggagagagaatcttgagcccaggagtttgagaccagcctgggtaacacagggaggccccatctctacaaaacattcaaaaattagctgggcatggtggtgcacgcctggagtcccagctactcagaaggatgaggcgggaggattacttgagcccaggagttcaaggttgtagtgagctgtgattgcaccactgcactcctgcctgggcaacgtagtgaaaccttgtctcgaaaaaaaaaaaggcagagaaagaaaaaaaaaagaaaaagatgtaagaagaaagccatacagatcattatacatcctcctggagggttcaggatgagcctttcggtaacagcccaacagacctctagggagcgggcagtcgccagtttgtccctttaacaccaagactcggctgtcacacgccccgcagactggacaggcagctgagcaacactgcaggacccggagaagggtttgggggctgctgcaggagcgaggccgagcgcgagcgcggggatcctggacatggggcgcccgcggcttgacacagccctgcatcgctggggaaaaggcccgcccgcccgcctgcggggcccgggaacccgaccgtctcaggccgcaccttgggctgcgcgctgcgctccttgggcacctggaacacgaactcctccagcagctccacggggcccttgtccacgatgggcagcggcgcgctctgcagctggctgctgaagtagatgtccaggtggtacaacacctccttggcggcgctcagcgcatcgcggcgcagcagcgagtggcggatgtcgctcatggtgcggccgccgcggcccccgcgccgagcgcgtctcacttccgcccggggcccgggactgcgccgctacccgtggaaacaaagaggcgcgacccgggcctgggctgcggcacccgcccgcttgcccgcctgccgccgcctgctccctgcctgctcagggggccatcgctgctgccgccggccagcaggcgcccgaaggtccgactgcggcgccgccaggagccgccgggagctgccgccgcgcagccgaacagcggccgaatgccgggcacggagacggcggcccgcaggggccaagcgcaggccgcggcctaggcgcgctctccggagggcgccccctggcggcgcgagcggtgaggggcgcgccgcggtcccaggtggaccccgcccccggagcccgcccaaccgccggtgcaggcccgctccgtccttgcccaggctccctcgcgggctgtgcgtcgcgttcagagctgccgctggttgatttcacggtgctttccaccagcaagaattgggggtggtgccgggctttggcttcggccagcggacttgggttccctggccgccccagctacccgtcttcacgtttccatctgttctcagctggggggtacgggggaagatggctggaaggccccctgcccctgactcccacttcccagcctctctgactgcgggctccttggcctagcaaggtgcagaacacctgccacctgcacctgagagccctcccactccaaagaccttccgcaccaagacctcgtttctggcagtcatgtctcctctgaaataggtggcagttcactttcacaatttttaaactggtgagaaaggacttgaatgtggctagaggagggcaggccggaggccacacatgcaggaaggtgcctgatgtacaagcccatactggccggaaggcaggcctgggtgaggacactctgttgttgagatgaaaatcccctgggggagagaggagaatagagggggcataaaagagagcacagccaggcacaacgcgcaggcgctgagtcaatgagaccctcctgcacatcacacaggtcagagacacggccgcaagcccctcctgtccacatgcccagagtttagagacaccaaggtctcagcatcacctagaacctctgagaagtcatctcttgatccccttgacaccaggacttcagagatgcccggtttcaaaagaagacaagcaagggggattcctcagtcaacacccattttcccctctctcccttgcccaccgaaagtgatttataagcacagcagaaatcaaaacaaacaagccatgcttggaaaacgaggatccacatgtgtaaataaacgggaactacagctcaaaggcagtcatacacttgtcattcttgtttcttcctctcatgacatggaaaggcaggtagaaagatctcttgaaggttgctccgaagcccatgggagtgaatgttccggtggacttggggctctgctgacggaggccaggccacaaggggacaacgctggcaccaggcccagtcacctctgtaccactcgttagtagtctggttggtggccgccagatacaggacaaacaacaggtagccacccaggaggaagctcagaaccacgacaaagcccagcatgaagacaatccgtggaaaagtcaggaacaggtactaggagcagagaaaaggtagtgctttaggcagctggactgtgacatccatgagagtgaacactggccaaccctgggcctgccacagccaccagcgctgcttcctcagcccacctacttgtgtccagatgtgacaaactgaacataaacagcactgagaagcagcccagaataatcccagtacatacaagagtttcctgtgggatgaatgaagtgttcacactgaaggaaaagggaaagtttacttaggaaatgtgctattccagttagctatttataaaataaatgcagacttcattcatcaatataaaatccagatggacaaaagagatca

SEQ ID NO: 586199 - DNA, 4001 bp, Homo sapiens
agtcaaccactgatggtcatttatgctgattccatgtctttgctattgtgaatagtgctgtgatgaacatacttgtgcatgtgtctttatggtagaacaacttatattcctttgatagaacaacttataagaacaacttagaatccaataatgggattgctgggtcaaatggtaattctgttttgagttctttgagaaatcaccaaactgcttttcataaattaaatcataatgtataattaatgtgttacagggaatttggtgaagcaaaaatttacacaagtataagcagcaaattctgggagtatttttgggcagatggtagaagggcatgttagggaaccaatacagtactatttataaaagtctttgcttacaacatattaatttcccaatgaaggaacggaccattctaagattttagaatgtagtggatgaatttgatgtgtggcttttatagtagacagccacttacttctcgagttccttacagacacttgaaggttcagataattgccacgttttgccttccctattatatgataagcagaagagccccggcccggcgcagtggtcacgcctgtaatcccagcactttgggaggccgaggtgggtggatcatttgaggtcaggagtttgagaacagcctggccaacatagtgaaaccctgtctctactaaaaatgcaaaaatattagctgggcatggtggtgcatgcctgtaatcccagctactctggagggtgaggcaggagaatcacctgaacctgggaggcagaggtcccagtgagccgagatcgcaccactacactccagcctgggcgacagagcgagacaccgtctcaaaaacaaacaaacaaacaaacaaacaagaaacagaagagccccagaacaataaatgtttttcctcacataataaaatacacgaatacattaaaactgctttttcttgtttgctttttctagtttttgttttacctgtcctctgaggcagttgggcgagtaaccgtctggagggggttgtgcaattcattagagtaaaaggtgttggacagtatgtcagctccttcaagctccctgcaacagtagggcctgccgtgaatgacttccatgcttcttggctaaaaaggcacaacctggaaaagaaaaggagggcacatttggcttgtcgagtcaaggcaggcagaaaacacattttacactgctaaattgttcaacctgacgctgcacagacgtcacaggcttccctctgcactgaaagccgtcaaatcagtaataaatagagacctaaataagttctatggaaataaatttcaactgaaacaaatccacaaagtggacggtgcctccaagtagtcaccagaatgatcatccagtaggttcgtaccagtccgctactttgtggccatcaactgacattcaattcctgccttaaatttaactataactattcaagaaaactcacttgacttttagcctgtggtctttccgaaaattagagactcttcattcaacaaaataagcgctgtcctaaagccttcggggattctggacaagaatccctttgcagatggtggagtcagtagtgcagcacgaacgggaccctaaaggggattcccggtttccaactgcgtcggggagaatcccacctctctctcggacttgggggaaggccaggagccggcgtagctgggaccaagggtgccaggggtcgaggccgagcctcacgggctgtcactgccctgcaagcggtgcctcgggggtctggacatacctgggacatgagcctgggggcgctgcgggaccgcgcctcccctcccctccccgcagctggcggccttcgcgggccgaggaattttgaggtcgtccgcacctacggcccggtggagctggcaggcaggggcgggggcgggagaaggacggcgggcaggccggggtggggtggggctgggggcgcttgtgacggtggccgtgaccgcggcattaggtgatgcgtccttgaggggctgggggcttccgggcggcgagcggggcgcagtaggaggctcttagagacctcggaggaaaccagcccagcgctacgggactggcaagaatgcgaagaggaaccgagagtgaacggagtgcgaggcgccgggtcggaggcgagaggggctcttccgccttgcgacccctggccccgcctcccggtcccttgccccgcccctctcggctcaccgccctgcctccagtcggaccccgccttgccccacccgcgccccgcccccaggcgccctctagcggcggcggcgatggcgataccagtttctttttccagggctaccaggtctggagctgtctcagggccggccagggagctctctcatgtggactgggcggaggaggaagagctccggtccagtggagtccctggtgaggtcggagcatccgacctgtcctccctccccaggtcacctcgcaaaaattggggacagtgtggccagatagagggtggagtctgcaggattctgaaactgcagcccctggcatggcgccctaacagagtctctgctccttccctggtgggtgcggacatggcaaagtcctttacttgcctcgtccccagggcctagccccaccttgattacctcagttttccccaaaagatacaaatgtgagccatgaatctgcacctacagggtcatgagttcctgtgatggctgacaataagggatgtcacccccccctcgccacctgccaccccatcaaggaatgggatgtgaggaggttaggttgtgtgtatatgtgtgatatggttaggctttgtgtccccactcaaatctcatcttgaattgtaatacccataatccccgcttgtcaaaggagagaccaggtggaagtaattggatcatgggggcagtttcccccatgctgttctcgtaatagcgagtgaattctcacgagatctgatggttttataagaggctcttctcccttctcccagcacttttccttcctgcccccttgtggagaaggtaactgcttctccgtggccttctgccatgattgtaagtttcctgaggcctccgcagccatgtgagattgtgagtcaactaaacctccttcgtttataaattacccagtcttgggcagttctttacagcattgtgagaaaagactaatacagtgtgggaggctagaaatgagcctgcaggaaccagaaggtgagggtgagaatgaccacctctgagaagaagggcgttgaaactgtgtgccaaagagttaaagaaaacagtcatagaaattcttgagtttacaggatggcagataaaagaaacaaattgctgaaatgctgaaatgcctgggcttgtaggttaataaaactggctgaaatccactggaacatataaggccaactagagtctgcacagatccagcttgctgaccttacagctgaatttctactgccatgtttcatactaactcctcactgaatttgcacgtggaacccttaggtagcatgaagaaataagagcacatgcgcaaggactttccagacttcctctttccttccaccaagcacctgctaatcccagaatccacactcaaaaccatttctaataaaataattgtcctaaagccagcacagggagacagatttgagctggacttcctatttctttgttggttgacatgcaataaaagtttttattttatcaaaaacccagtgttatagtattgacttctagtgcctcgggcagcgagcctcctttgcttggtaacagtatgatggtgcctttgctattctctgcctactttacaactttctactaaccaaccagtgggcattcattttgtgctgtgccttctatgtgagtgttacctggagtgggggaagaaaggtgtattgaagtaggcacagtggtaattttgtagtcttggtttatttcttagttcctgcacctctgccgaccttccagtagttaccacccactaagcctagaggaatagatcctgctggaga

SEQ ID NO: 586200 - DNA, 4001 bp, Homo sapiens
tccagcctgggcgacagagctagactccatctcaaaaaaaaaaaaaaaatcctatctaccctatatgctccacccatgcacttgtggcatcctttaaaaggaaggtttaggcagtgataatcttttctcaccttcttttaagcacatatacgtcattgattatcatttatattcatcattcagagactaattgtattggttcacatcaaagtacccctggctgaggaggtattttcttctttttactcttcttatgctaaatgggctttccctgacatgggctgtctgcatctgaccttagcagcaggcagacacaacccccttgctgaccctgcagttcatgctgctgttctcagggaaaggtcatgaaatcctctctgccctcgaatgaccagagtcattcttcatatcagaagatactctgagcctgtggcatgtgtcagtttggggcactgtgccacaatgagggtgtgggcaaatgggaagaagccaggaactgcaacatgggagaaaacaaattagggctggagaactaggtggggacacctgtggttcccatcaaactgaacacccaaagctggagataaatacaaagtgggagctcatactttaaccaaaaatgcctgcctagtgggaggcaggggcttggggatcaggaggtgtcaaagatcaaagacaggcaaagagttaaggatccaggtcttgctgggcatgggtggcacttcgggatgttgaagtgggaggatcgtttgaggacaggagttcaagaccagcctgggcaacatggcaagaccccatttctacaaaaaataaaaaaattagctaagcctgatggcacatggctgtagtcctagccacccgggaggctcctctgggaggatcacttgaagccaggaggttgatgctgcagtgagctatgattgtgacactgcactccagcctgggtgacagagcaagatactatctctaaaacaacaacaacaactcctggtctttaaagcgagagaagagacaagaatctaggcaaggagaagggaacaggtgcaaagcttgtgccaaagggtgaccaagatagaggcttcctgtggacccatctccagggcaaaacatagtctgagaacaagcgcattccttctaccacactgtgtgaaaatatacaatttttacgctggaatttttcaaatcaacatgactcaggctaaacacaagaatactcagtggagtgttttgtgaggattcttttccctaagaagattccaggccttctttggggcagtgaattaatctctgtctctctctttacttcaatgtcgttaagcccagttccataacacatagtagagagtcaaaaacattcatggattgagtgaatgaattctcaagagatactgactgactcaaagagcagttgattcatcttagaatcattaacttaccttatgtcttcccgtggcatatgacaagttaaattgacctggaccgcccctaacgtggacccaaacagcgactgccctcccactcaggcgaaggtcaatccggcgccttgccccactgggcaggagggcttcacattcacattgggggcctggaagtctccagggacactcttcaaggctgaggctttgaacttccacttgcattttggcaaaggtaattacctttcctggatgctgtcaaggagagcggcgcttcaccaccaatatctaagatcaagtcgcacggatccccagggtcagtaggaggattcagacacaggctgggcgcctcgctcctgaccactggattggcatcaccataagtaaggtcacagctgagtagaaaatgcctgaggcaaagtgggggtgaaagaggggccaccgagcagtgtgataggcagccccttccgccagctcattatccccacctgctcctgtcgtctcctattagaatcctaatgcgagtttacggaaagtcagctggagcttgtcctccatgtaattcagatcacgttgcctgcagctcttaggtactcaaataaacagaaggactaatattactactgaaaaagtaattaagggcattcattgtaaagtaataatgattacctcaccctcaccatatggccagaactgattaacacctagaagaaatgatctaaaacctctacaatcagaattaatgtctcaggtcataatgagaaacattttgtagcggggtttggcagggaaggatgaaaaagtggttgggagtttactaaatcaagaggcacaaacaaaatattgaggataacatcctttttcaggatttttcatctcattcagattagacaagttgcatttttagtgtagaacccatatcacaaatgcaaaaaatattacaagatttacacattggaattgtcacttaattggatgagtttttcctccattgtttcttttataatgatgaggaattgatggaagaatctccatcgaggctggcagtttcttaaatcaccagggaagggcttagcccactgattgaaaatcttcttatcgtaaattactggttaaaatgctatttgttgtcaggagtatcatggagtgtgatttaatctcttaagattagttaaagtggtagaaatgttagcatttctgggtaatgccaaacaggttagcattacaaaagatgcctagaaagatacggacccatttggaagacaaggttgctgtaaaagccagtttgcaggtgcaccgtggggggtgacaggatgccctgggctgttcttgattagtgcgtgtgccctagggtcatgtggtgaagcataaggaagcagaatttgggatatttttcccaccagaatccctaagattactctgtgtactgctggggaaaagcttaatgggctcaacaccacccttgagggaaggcaataatggaatctcttttttctgcaaatacttccttgggtggtgcatcatgattccctgaggcaggatttcctgcagcagagctggaggggctggaggggctggtggggctggtggggctggtggggctggaggggccagaggggctggtggggctggtgagtctagaggtgctggagttccaagaacttggcctggaatcttgaacctgcagccatacattcggactctagctttgcctttttacttatctgtctttgaccactaaagaaatagacagacctcataatattatttcctcgactgcctcttaaaagtcaaaaccttaagttaaggacacctcacattttggtcaagaccagtggacctaggtaagagtaaatcagagaattcccaaggtggaagaagttattcctagacaacgaatgaatcccctggatttgggttgcggagtgaggtgaccagctggtcaccctgggggtggactgagccaaatgcctaagcctcattgttgttttaataacccaagttggattcagggagtacctgtgcaattctgtgattagcacatcgggcagtgagatttccgcacgttgtagctgagaggccggctgctgagacgaccccttagggaaaagtggaaaactctgcctccagaatggagatctggctttctcttcccctgctcaacctgagctcagggattctgtgcccctcgctctccggacagtttttacaccagattatcttctaattgctgtgaatgcagccgcatcagcaagtccccatctggggacattatcaatttcaaaccttggtcagtcatgaagccccattgaaggacttcatcctgaaatccacgaacaaagaacgagatcccgcaatgctgtcatctaaaatgcctgaaaatgccagtgctgcgacagatggccctgctcggtgtaagtgacaatgcccccagcaggccattgattctgtttgtgaaatttaaatatctgaacaatgactgatggtgctagggagaagtgtaccttcaatccccccgactcccacccccgccagggttcagcatatctcagtagtcctagtaaaaataggtcagtaaacagcctt

SEQ ID NO: 586201 - DNA, 4001 bp, Homo sapiens
ccctctttgtctgctgtccctgatcaccccttgtcaccgggtcagctttgtcctgtggaccctcccccttcaatgacctctcttcctgctcaggtgatgtgtaggaagcccagcccccaggactctcacgacactcacagccctccacacctccgagtccacgggcccctcagcagcaccccagcctttgccaggtatttccgctgtgcacgtggtgctctcttgaacccctccagccgctgccagctctggtaacttggttaccaaagatgccacagcacagaaatatcgaccaacacctccctggtcacatccatggaatcagagcaagatttcctttctgcttctgttccaaaaataaaagctggcacttggcttccgcttgtctcttaatgacttgttcctgctatgttctatgcctggaagtcattaactgtacgggagaaaaataccctgaagttagaaaagataagagggagaaatgccaaaaatgtttcatggacacaagaaaaggaaagaatcaacaattggtgacctggtgggtttgaaggccacccagtggaccaaagattggacaataaagcagtctagttggagacgagaagggcttggattaagtatcggaaagctgctcccaattgttctcaggattttatcgttattttattgtcattgcctcctgcctctaatctgctgtcctgaacaaaaccaggagaggtgtgggagagaaggatgtgggtctgctgtctctggccctgggagatgaaactccgaacctggagaggcagtcagttagcactgatggcaactggtatctctgctgctgaaccttgagatacagtgatggtgatcagaggcagagagccatgcctgcatctcctttgggagttgtgacctggagcccaggagggagggagggtcagtgagtgagcatgaagcagagttggatatttgggaatgtccgcctcaatggccctcctgagaaaaccatgacactggccagactaaagcagaagctgaggtggaaagagtgcttgtgaacagctgccgtcttggacgactggtcttcttcctgctgggccatgtccaccacctgccacatctcacccactgaggaggccacaaagtgctcttcgaactgttcttgattctggtctggaacaggggaaaaggacaaggactgagccctgaccctggcctgaaccagaaaggagaagttagaataggaaaaacacgttgaagcctagggctgcagtcccaattgcccatatccttagccttcaccagagaggggatgctctttctagaggttttttctggtctgtgttcaatcacagccccaactcaaacacacacacacacacacacacacacacacacacacacacacacacacacaccattcctaaggttagctgcctcctctagggtttcaacactgggggagtcaggggccaccttgaagcatgacaaaagccagccaaatgcaccatgcttacacacacagaagttgcatgcaagctcagctggcccatggtgagccgacactattatttcacatgataaccatcagtggctggagttaccccccataaaccagacctatgtcaggtctcaccctagcctcatcagtgacctggggcctggcctcacacagacctcaccctgagcctccagactctcccgtctttttttctacctacctgaagagggtgttttctctgtatggctcctgtctttttttccacctacctgcagagggcgttttctctgtctggctcccatctttggggcctgggctcccgttcagaggcttcacctgcagcagcagcaagataggaaccaggaacactgccctgcagagctggggggccaggggaggcatggacctgcccacccactgcctttggccgccccctgctcccagtgcccagcaggatccgtgcacctcctgccccattcctgtcctggcccttaaccctttccaggggcattttctcccctcaccttccataggacctctgacttcacatgttctgtgacatcacagccatgggcctgaacttcattccggctcactagagcgttccaatggcgaggcacaagaatggagcacagccagcagggatggccgaggcttccaagatgaccacagtgggtcattctgtatttagcagaaatgacttaacagcttgcaatgtacattcatatccattacaccattagatccacgtagaaaccaggactgcaaaatcatagtgttctcatatctattacattcatgaggaaactgaggctcacagaaaaaatgactctctcactcaaaatcgcccaaatactaaggggcagaaaaggactcttgattaacttttacttttaaatatgatatcttcccactattctatgtggcctttctgtaacaagagtggtttgcataggatgaggcccagaacagatgagccggacaggattctcaagtcgtgggtatgaacatgctgctctacatgaagcatgggtctgccagaaaataaagatggggaggagcatagggtaaggatgggtaaaagcacatgctgtgtgtgtgtataaaagacacagagacagagacaggcatagacaggcagagacagacagagacatagaaaaagagagaaagaaagagaccgagacaggcagaaactgaggggtagagacagagagatagagacgcagagacagagagacagatgaagagagagtgaacggagagagagcgagagacaaagagcagggtgccttgcagctggtagagcccattcacaccctctcttcaccctcccctggttttcccacttttctagcctttgtcctcttgtaccaccaggttgaaacaccctcttctttcattttacacctttctgtactcttagacgaaagaaaaggttgttagaggctcatctccaacctcattgcttggcaaaaggagttagagtctgcagagaagccgcagtgcggcagggagtctaggatcccaaataacagatctgggagaatcctgcctcagtacttggatgcgcctcctgcccatgagcctggtgagcacagatctgttggcagtaaccggctgtgggtaatcacccccaactgcttcttgggcagagatggttggagggttgtgagttagggagacagaatgaaggccttttttcgaaaaccagcaacagagacataggccattagatgcaggatggctgctaagacaggtaagagaagactttagtcactcctgaactctcataaccagttcacactgctcctgctcatccatgcataccagacctgaatgaaataccacatgcaggtccaaggacactgcggagacaggcaccctttctgcaagagggaactgcagacagaaacacacaaagagatgctttcccacagagtttactcgtgttagcagacatgcccacatggatgctgtctcacatacagcagacaccatctcttacacacttcctgatggtccaagccagatgacaagggactagggagtggtacggaggtcgcttgaaggtgagtaaggaaagattcaagtaggcaggtgaccctgctcaccccaccttgaacccattgacgtgagatccaaagaatgatgcttgaatggaaaaaaccatcactaatctcctccctcctggctattttgggggagcagcctcttggtttcctggcaaaaagagaagccatctccagctctgtgggaatgaatggggagggcggctggggtgagaattgcctcccgggcaggcttgagtggaaataactgagttgtttccattacttccatttccttgccaccaccacccgcctgacctccgcagtgttaaaagagataaattcttgcagaaaacagggaatcccttaaatattttttcttattacaaagtagaaaatatagaaaaatacaaaaccccaaaaaggctaataattccaccatccagtgataatcacttttttttttt

SEQ ID NO: 586202 - DNA, 4001 bp, Homo sapiens
accactgaaccacagcaatcaggggaacttccaggccctgcaggagggacaaagggggttggcacaggtattaagagtgcccctcccatcttgagtcagctgcctggtctttccctcccactgccttatcacttttctttgaacacaccagccccttatgctcacctccttggcccctggagggggctgctcaccccctctcagctgaaacaggaagttgtgttcctccagggcattcagcgggcaggggaagcagccagaggtcccgggtaggcggcagaaggagcccatggagacttccccagactggtgactagctcagaaaagaggacaaggcatggtctccccatgccagagctcagcccctgaagccatccccaccacttcacagcctcgcccctcccaggacctcaccagacattgtccaccagcagcacagagccatcgggcatgacaggtagataactggcgttgaagttggggaggattcggatatcccagatggagatttcctcctgagaggagctgttcagcactgtgggagaggaccagcttggctcagaatagctggacccctcaggccccacctttacccagaaaaaaccggacctaccccaccagcctgcccagaggaactgcatccaatcagttcccttgttgctcccggaggctggagccggcagccctgcttacccttgagcacggtcaagtgttttccagccacagtgaactgccggcatctcagaaccggagggggcagcagagtcagcagcgtgctcactgcgggagggggtgggggcaagaagtgatggtctggaggctgacctcacctccaacccagaattctcaccttcctcttctcagagcccattagccactttccagtgtgacccctcccctctgtcccccaattcccagactctagccctttgcctctgcgctgccctgcccaccttgggccttgaaagcgctctgctcgccccggaatgtctccccaggagatcgggtctgcagcaatcgcaggtagccttgatctctgacctctggtgcctcaatctcccgcttccacacagtcactacaatctgtcaagaggaaagacagatggctgagcccggaaaaggtgtctgaattaggacaatagctccactcttgctcatcttaccttggccttaggtgtccctgggggcagtctatccagtgaaacggtgagtgggaagatgacctcatctgtggacacaatcggttcctccacaggcagctggggttgggaaaggggtgaagaggtcaggagcaagtcagaggcagcctgcagcctttccctttaagaccggcagttcatctgcctcctgcctcaggcccccagcaaaccgcccctccgtcctgtgccaggtcccccaaagctcctcaccgtggtcgctccccctgaggtagcagggcccgggccgtgggtgagaagggggctgcagcctcggaacaaacccccacccccaggatcccctccccctgggggctccgaatcctggtcgccggcgccgccgccccccggcatcccgcctccggcgctgaccgaggccagggcggccagggcggttgccagttctgcccaggctcctctggagcccaagcccgggccgcccccggtgccggaccccgcaccgccccggcagcgcaacaccagcagaaaacggacagtctcccccaagtacagatggttgcgccggggcagcgcccggtaccggcccggatcccctgccagctccgcgcgcggcggcagcggcacggccgggaagtacatcgagtagtcgcactgggactccatggggcggcgaggacggcgcgactgggagcccggaccggaggccgaccgccggcggggcccgctagggtgggtccagagggtcccgacacctccggctgctgcgcccggctggggcggccggagagaccggcccggtcccggcaccggggcaacgaacccgaaccgagacccggcagcgccggaaccggggtactgagccgaatgactggagagaaacaggaagcggaagggagggggcgtggccgccgaggccccggaatctgcgggtgcccggaccgtggaggagggggcggggtcccgctgctctgaggctgcgagaatgcaggcgggggctgcggccaggcttcttggaaaagaaatggaagacctcgtcggccaggcgggttggctcacgccagtaatcccagcactgtgggaggccgaggcggcaggatcgcttgaggccaggagttcaagaccaccctggccaacatagcaagaactcctctctgcaaaaaatttaaaaattatccgggcgcggtggcgcgcgcctgtattcccagctacttagaaggcctaggcaggaggatcctttgagcccaggagtttgaggctgaagtgagctatgattgggacactggactgcagcctaggtgacagagtgagatcttgtctcggaaaaaaaaaaaaaaacaacccttccaaccccacttctcccaggaagattctccatccctcccctttccaccctccataaatcaagtagaagtttcaaattatttattcattcaacaaacatgtcagagagaaatgaacagtctagtagcaaatatttcatagagaaatggacgtatcattccaactcaccacgccccaaacttcctgtggctcactccatcttttgcccctctagggagcttcggtgatgtggatctgccttggggcaggaaaggggaaggggaggtcaggcctagtggctcacgcctgtaatggcagcactttgggaggcagagtcatgtggatcacctgaggtgaggagttcaagaccagcctaaccaacatgttgaatccctgtctctaaaaatataaaaattagccgggtatggtggcacgtatctgtaatcctagctactctggaggctgaggcaggagaatcgcttgaacctgggaggcagaggttgcagtgagccgagatcatgccactgcactccagcctgggggacagagcaagactccgtttcaaaaaaaaaaaaagttggggggaaagaacaaaatgagtggagggtggaggagggaagcactgctgggagcccagcgaagagggggcttgcatcgggacaaagactcatcccttctgggagatgcagaaatggcatcttgctgccccccactcatcacatgtgcccttcaaacatggctgctcttccacctaaatctgtagtctgatgtttatggggagagtggccttgaagtcttgaggggcagtgagacggtaggggggaactgcttggcatccagcttgtccttgtactggagctcaggggtagctaggcgctcacattcctcttggtcttgggggctcaatccactccgaagtatatagcccaaaaccttagctgacccaaactggaaggggcggaaccggcgatcagtgatgtatttggggtcagaagcctcaccccctaccagacaatgtttcgctagggcctctcggcgagcccggagctcggccacagctgtctgcagccggccctggccgtatttctctatccgtgcccagagactgcggttgaagtggacatagagagcccagtccaggttgttccaggctcgggcccgtgcagtcagctgccggtcctccgcagtcagtccactgttgctgacagtgctgaggccctgcttatgtccagcctgggcattgtgcatgaagcccaccacgtcatctagaccccagcacagggcatctgccagcagaaccaatgactcatcgaagtactcagccaccatgaccaggtcaaagacagagtccagccatgccagaccccactggatgaaggatgaagaccccaaatcgaaagaggcagggcttgatatctggctgcgatgatcagtaacagtggaaacaggatggatgagggcattgggattgagggtttgggctcgagggccagcaccagaaggcaagacctgcagctgtggggg

SEQ ID NO: 586203 - DNA, 4001 bp, Homo sapiens
gggggccttcattggtgccacattctttgtagccacctgggctgtcagccatgagggaaggaccctcgttttagtctcggattgtaaggtttccatctctgtaccttctcacaaagaagagtcagggcccaagcttaatgacctgttttttaattcaggaaggtaaatctcgttctctcgtcacacccggaattacaggtccatttgtcctcagtgggagttgatctttgattcctacaaagaacaataaagtccggtgaattcccatacctccagtcatcaggcacagttactggtcggtgcagggcaggccagaagtgaccaaggcccaagagactcagacggccattcacaggcatcaggcaggtgtgattgtgggcaggacagcagctcaggagagagccctctgacctccccaaagctggtgccccctacaggcagccaaagccaaccagagatacctcctgcagcctctgtgctgactgactcagcacaggaggaacggaaggaggcggaggcccctaatgttccttctcattaccaccccaaatgccactgtcctctgggtgcccagcccattcaatccctaaaatacctcttaatggcctctccctcatctggccaactcgatttctctactcttctatggtggctcagttaaatgaaactgagggcattttatttcacaataaagtctcattggccaacacgccgcccttaagctaaagatacttctgattggtcaaacttgaagcagcaataggggcccggaggcattaactgtgccagtctgtagattctgaagcccacgccagcctctgatctagtttggcctctcttttccctatcccaattgttctgcctccactcagcagtcctggagctcagtcctcacccagagagatggagttgtgactcagagggcctaggtctctaccttccacttaggaatcaagccagaagctcctgaagcggaggtttgcccaaaaaaaagagtagtcagcgatagtcctctctgaatcataatttgataatgcattgctcatccagatggctgtttacaatttaagaaaaaatattaccaggccctcctcctaacctgcccggccatggggcacacctttgccaatgcaccttcatttctgtcaaaactcagtgatattagtgactcctaccccctaaggcgcctcccaagcgcaatgctgcagtctgtgcggacaaatttagttcaccctggggtgcctattaagtacatttcgcaaacgaggaactgagacttagttaacttgcagaagatcacagaaaagtttgaaatcagctggttggattcgcagccaggtcctgcagactccagaccccgcgcctccccgccctacttctgggccccaagagcaggccgcggcaacttccagaagccgggtctctggggcaccgcgctcgcggaccgacctcagtcccatcccagccgctccctgcctgggcagaatgggggccccgcgggaacgcgatgtgctgccagttcacagcccgccctccctctgcgggccggtacccgccgctggcggcgccgacctgtgggaggcccagagggcgggtgagtgcggagcggaaggcgcgggcgaagcaccgcaggggcctcgctgaccccgccacacgccgggcagggctgcaacggctccttccgactggagcggccgcgcgctcctccggccggctactggcttccctgctctcaggttcccgtctccggctctcgtgccccttcttagcttccagagcggagccgggaggcaaattccaagcggttgtgggacccacgcctcacccggaactttaagccctgccgtctcgcctggcgcccaaactctgcggacctccactggccgcccgcctcttccggccccgcgcgctccggggtcccgcgggctcccggcctcgggacacttccggtcttggggaactcccggccccctcgcagtcccggcgcccgggacacttccggctcccggcagctgcctcagtcggaggtccgcgggcgccccatgctggcagtggtaatgccgccggctggcatccggttggctgcgcgctgggaacgccagcgaggcagcgccaccggcttgaggagggtgaaagttcaattcttggcccctgaagttagcggaagggaacgggcatgttttggaaaggcccgccgggaattccctcagaaaccaggcgaagctccctgctgggccaggcccccctcgtgtgcttgaggaggatgggagcccggcctcggtttgttatcctaattaagtggaaaattaagaaaataatagaatagcgtaagtactaatagtaaaattatagtaagagaaataacaatagctagaatggaatgaattgctgtattaaccaaggctagaaagaatttcagccctccgaaagttaaagcgagggaagagagagaccctctcatattgttttatactcagtacctgtttttttttttttttttaaaaaaaaaaggaagtgaaatcaaagacaggcagcccagcgccaggcccaaaactggacctgggcctgcctggcctaaacctagtagttaaaaatcaactcatgacttagaaaccgatgttattcatagattccagacattctatagaagaacattgtgaaactccctgccctgttctgtttctccctgaccatcggtgcatgcagcccctgtcacgtaccccttgcttgctcaaatcaatcacgaccctttcatgtgaaattttagtgttgtgagctcttaaaagcgacagaaattgtgcactcggggagctcggattttaaggcagtagcttgccaatgctcccagctgaataaagccctttcttctacagctccgtgtctgagaggttttgtctgtggcttgtcctgctacagtccttggttccctgaccaggaagcgaggtgactgacaagccctgtggagcgtccctgcagaggactccggccagcctgactgacgcaatccaaagagcgctcccgggtaggaaatggccccggtggaatgccttgccagagcagcgcatagcaggctcccgagaaggattaacactggctgaacaccgggaaggaactggcacttgaagtccagacatctgaagcttgtcaagactagtttttggaacttgccccactccatgtgagtggaagcatggcctgatcacccacggtgtgcctgtattgacatctttgttctggttttgacttggcttgacttggtaagactagtctttggaacttgccccactccacgtgagtggaagcgtggcctgatcacccacggtgtgcctgtattggcacttttgttctggttttgacttggcttgacttggtaagactagtctttggaacttgccccactccatctgagtggaaacgtggcctgatcacccacagcatgcctgcatgggcactcttgttctggttttgacttgacttgaattgctggatactttggttttggttttgacttggcttgaattttttggtactcggattttgaatttcgtgattttggtttggtataaacggtaaaagtgtgtgtgccctctttacctgttctttgtcttgtggtatgtgtggtgtgagcgtggtattttgtctggaaaaaaaaaaaaaaaaacatgggtcaggtgcaaagtaagcccaccccactgggacctatgttaaaaaaattttttttcaagagagaatttaaaggagattacggtgttagtatgacaccaggaaaacttagaactttgtgtgaaatagactggctagcattagaggtaggttggccaccagaaggaagcctggacaggtcccttgtttcaaaggtatggcacaaggtaacctgtaagccaaagcacccagaccggtttctgtacatagacagttacagctggttttagaccccctttcccccaccacagtagttaagagaacagcagcataagcggctggcagagccaaggaacgac

SEQ ID NO: 586204 - DNA, 4001 bp, Homo sapiens
gacatggagaacccactctgtgtgtgctgagggcagggcactcaccagtgcagaggcagaagtgggtgcctgtcctcgagggttaacccgctttgcctcccgcccacagcccctccaccttctaaaagctcaagagatgatcagactgaaacacccgcccatcttgctgttctgcctaggctggaagacctggcccaggtcatggaggcccctgctccacttgccagattcgcaggagtcttctgaccagagctgtcgcaccttgctgctgccactggcactgctgccattctcatcctcttgggggccttcattggtgccacattctttgtagccacctgggctgtcagccatgagggaaggaccctcgttttagtctcggattgtaaggtttccatctctgtaccttctcacaaagaagagtcagggcccaagcttaatgacctgttttttaattcaggaaggtaaatctcgttctctcgtcacacccggaattacaggtccatttgtcctcagtgggagttgatctttgattcctacaaagaacaataaagtccggtgaattcccatacctccagtcatcaggcacagttactggtcggtgcagggcaggccagaagtgaccaaggcccaagagactcagacggccattcacaggcatcaggcaggtgtgattgtgggcaggacagcagctcaggagagagccctctgacctccccaaagctggtgccccctacaggcagccaaagccaaccagagatacctcctgcagcctctgtgctgactgactcagcacaggaggaacggaaggaggcggaggcccctaatgttccttctcattaccaccccaaatgccactgtcctctgggtgcccagcccattcaatccctaaaatacctcttaatggcctctccctcatctggccaactcgatttctctactcttctatggtggctcagttaaatgaaactgagggcattttatttcacaataaagtctcattggccaacacgccgcccttaagctaaagatacttctgattggtcaaacttgaagcagcaataggggcccggaggcattaactgtgccagtctgtagattctgaagcccacgccagcctctgatctagtttggcctctcttttccctatcccaattgttctgcctccactcagcagtcctggagctcagtcctcacccagagagatggagttgtgactcagagggcctaggtctctaccttccacttaggaatcaagccagaagctcctgaagcggaggtttgcccaaaaaaaagagtagtcagcgatagtcctctctgaatcataatttgataatgcattgctcatccagatggctgtttacaatttaagaaaaaatattaccaggccctcctcctaacctgcccggccatggggcacacctttgccaatgcaccttcatttctgtcaaaactcagtgatattagtgactcctaccccctaaggcgcctcccaagcgcaatgctgcagtctgtgcggacaaatttagttcaccctggggtgcctattaagtacatttcgcaaacgaggaactgagacttagttaacttgcagaagatcacagaaaagtttgaaatcagctggttggattcgcagccaggtcctgcagactccagaccccgcgcctccccgccctacttctgggccccaagagcaggccgcggcaacttccagaagccgggtctctggggcaccgcgctcgcggaccgacctcagtcccatcccagccgctccctgcctgggcagaatgggggccccgcgggaacgcgatgtgctgccagttcacagcccgccctccctctgcgggccggtacccgccgctggcggcgccgacctgtgggaggcccagagggcgggtgagtgcggagcggaaggcgcgggcgaagcaccgcaggggcctcgctgaccccgccacacgccgggcagggctgcaacggctccttccgactggagcggccgcgcgctcctccggccggctactggcttccctgctctcaggttcccgtctccggctctcgtgccccttcttagcttccagagcggagccgggaggcaaattccaagcggttgtgggacccacgcctcacccggaactttaagccctgccgtctcgcctggcgcccaaactctgcggacctccactggccgcccgcctcttccggccccgcgcgctccggggtcccgcgggctcccggcctcgggacacttccggtcttggggaactcccggccccctcgcagtcccggcgcccgggacacttccggctcccggcagctgcctcagtcggaggtccgcgggcgccccatgctggcagtggtaatgccgccggctggcatccggttggctgcgcgctgggaacgccagcgaggcagcgccaccggcttgaggagggtgaaagttcaattcttggcccctgaagttagcggaagggaacgggcatgttttggaaaggcccgccgggaattccctcagaaaccaggcgaagctccctgctgggccaggcccccctcgtgtgcttgaggaggatgggagcccggcctcggtttgttatcctaattaagtggaaaattaagaaaataatagaatagcgtaagtactaatagtaaaattatagtaagagaaataacaatagctagaatggaatgaattgctgtattaaccaaggctagaaagaatttcagccctccgaaagttaaagcgagggaagagagagaccctctcatattgttttatactcagtacctgtttttttttttttttttaaaaaaaaaaggaagtgaaatcaaagacaggcagcccagcgccaggcccaaaactggacctgggcctgcctggcctaaacctagtagttaaaaatcaactcatgacttagaaaccgatgttattcatagattccagacattctatagaagaacattgtgaaactccctgccctgttctgtttctccctgaccatcggtgcatgcagcccctgtcacgtaccccttgcttgctcaaatcaatcacgaccctttcatgtgaaattttagtgttgtgagctcttaaaagcgacagaaattgtgcactcggggagctcggattttaaggcagtagcttgccaatgctcccagctgaataaagccctttcttctacagctccgtgtctgagaggttttgtctgtggcttgtcctgctacagtccttggttccctgaccaggaagcgaggtgactgacaagccctgtggagcgtccctgcagaggactccggccagcctgactgacgcaatccaaagagcgctcccgggtaggaaatggccccggtggaatgccttgccagagcagcgcatagcaggctcccgagaaggattaacactggctgaacaccgggaaggaactggcacttgaagtccagacatctgaagcttgtcaagactagtttttggaacttgccccactccatgtgagtggaagcatggcctgatcacccacggtgtgcctgtattgacatctttgttctggttttgacttggcttgacttggtaagactagtctttggaacttgccccactccacgtgagtggaagcgtggcctgatcacccacggtgtgcctgtattggcacttttgttctggttttgacttggcttgacttggtaagactagtctttggaacttgccccactccatctgagtggaaacgtggcctgatcacccacagcatgcctgcatgggcactcttgttctggttttgacttgacttgaattgctggatactttggttttggttttgacttggcttgaattttttggtactcggattttgaatttcgtgattttggtttggtataaacggtaaaagtgtgtgtgccctctttacctgttctttgtcttgtggtatgtgtggtgtgagcgtggtattttgtctggaaaaaaaaaaaaaaaaacatgggtcaggtgcaaagtaagcccaccccactgggac

SEQ ID NO: 586205 - DNA, 4001 bp, Homo sapiens
gctctccctaacacacacacgccctccctaacacacgcatgccctcccaggcttctagcctcaaagacaccccacgagcgcacacccacatggggagaggcctgggcagcatggccgagataagagcaagggaagtggcaggaggaagaagaggtagcctacggcagagggcgtctctcttactgacggtgaccaagggtctagcctctgcccatgcagagtttctggtcatgagtaagaggcttgtctgactttacctcaatcaggattcccagagcaacatcaactatctcagcctcattcatgcagtacacagtccttgtcgcagggagtctgaaaaaaagacatgcaaggcacagatgacacagactctcaagtctcataagggcaaagagaacaggagaagcagggcctcttccccctgccttcctaccacgcaggaggtaccagcacctctgagctgaggagctttctgacacggacacaatttcctcagccttgcagcccagtgactggcacagggcttcatggaggcaacaccggggtgcctcccaccctccaccaactgccctacaaggatctggaagtagggaaggatggccgcctctgaaacacacacatggatgcaagaggaagggaacctcgggctgaggctgtactgagaggaacctgaaagcaggaccagacttagggaaagacggcagcagtcacaagggaaggctgtcagtcaggaaaccttagaggaggaggagccagagagggaaacaccgagtgctggggccccgcccacttcacagtgcagcctggagactcaccaccccccccccgcccccccccggcaattaccgtcattcaactaactcactccccagctccttagctcttgctggccctgcagctgctgctcatctgtccatccctaaaggtctgtccacaggggcaggcaccactcagaacagacccttccactgatcttgcccatctgatgttaccatgtttgttgtaaaggaagagactggcattctggacaactggcatcagagactggctgacatggagaacccactctgtgtgtgctgagggcagggcactcaccagtgcagaggcagaagtgggtgcctgtcctcgagggttaacccgctttgcctcccgcccacagcccctccaccttctaaaagctcaagagatgatcagactgaaacacccgcccatcttgctgttctgcctaggctggaagacctggcccaggtcatggaggcccctgctccacttgccagattcgcaggagtcttctgaccagagctgtcgcaccttgctgctgccactggcactgctgccattctcatcctcttgggggccttcattggtgccacattctttgtagccacctgggctgtcagccatgagggaaggaccctcgttttagtctcggattgtaaggtttccatctctgtaccttctcacaaagaagagtcagggcccaagcttaatgacctgttttttaattcaggaaggtaaatctcgttctctcgtcacacccggaattacaggtccatttgtcctcagtgggagttgatctttgattcctacaaagaacaataaagtccggtgaattcccatacctccagtcatcaggcacagttactggtcggtgcagggcaggccagaagtgaccaaggcccaagagactcagacggccattcacaggcatcaggcaggtgtgattgtgggcaggacagcagctcaggagagagccctctgacctccccaaagctggtgccccctacaggcagccaaagccaaccagagatacctcctgcagcctctgtgctgactgactcagcacaggaggaacggaaggaggcggaggcccctaatgttccttctcattaccaccccaaatgccactgtcctctgggtgcccagcccattcaatccctaaaatacctcttaatggcctctccctcatctggccaactcgatttctctactcttctatggtggctcagttaaatgaaactgagggcattttatttcacaataaagtctcattggccaacacgccgcccttaagctaaagatacttctgattggtcaaacttgaagcagcaataggggcccggaggcattaactgtgccagtctgtagattctgaagcccacgccagcctctgatctagtttggcctctcttttccctatcccaattgttctgcctccactcagcagtcctggagctcagtcctcacccagagagatggagttgtgactcagagggcctaggtctctaccttccacttaggaatcaagccagaagctcctgaagcggaggtttgcccaaaaaaaagagtagtcagcgatagtcctctctgaatcataatttgataatgcattgctcatccagatggctgtttacaatttaagaaaaaatattaccaggccctcctcctaacctgcccggccatggggcacacctttgccaatgcaccttcatttctgtcaaaactcagtgatattagtgactcctaccccctaaggcgcctcccaagcgcaatgctgcagtctgtgcggacaaatttagttcaccctggggtgcctattaagtacatttcgcaaacgaggaactgagacttagttaacttgcagaagatcacagaaaagtttgaaatcagctggttggattcgcagccaggtcctgcagactccagaccccgcgcctccccgccctacttctgggccccaagagcaggccgcggcaacttccagaagccgggtctctggggcaccgcgctcgcggaccgacctcagtcccatcccagccgctccctgcctgggcagaatgggggccccgcgggaacgcgatgtgctgccagttcacagcccgccctccctctgcgggccggtacccgccgctggcggcgccgacctgtgggaggcccagagggcgggtgagtgcggagcggaaggcgcgggcgaagcaccgcaggggcctcgctgaccccgccacacgccgggcagggctgcaacggctccttccgactggagcggccgcgcgctcctccggccggctactggcttccctgctctcaggttcccgtctccggctctcgtgccccttcttagcttccagagcggagccgggaggcaaattccaagcggttgtgggacccacgcctcacccggaactttaagccctgccgtctcgcctggcgcccaaactctgcggacctccactggccgcccgcctcttccggccccgcgcgctccggggtcccgcgggctcccggcctcgggacacttccggtcttggggaactcccggccccctcgcagtcccggcgcccgggacacttccggctcccggcagctgcctcagtcggaggtccgcgggcgccccatgctggcagtggtaatgccgccggctggcatccggttggctgcgcgctgggaacgccagcgaggcagcgccaccggcttgaggagggtgaaagttcaattcttggcccctgaagttagcggaagggaacgggcatgttttggaaaggcccgccgggaattccctcagaaaccaggcgaagctccctgctgggccaggcccccctcgtgtgcttgaggaggatgggagcccggcctcggtttgttatcctaattaagtggaaaattaagaaaataatagaatagcgtaagtactaatagtaaaattatagtaagagaaataacaatagctagaatggaatgaattgctgtattaaccaaggctagaaagaatttcagccctccgaaagttaaagcgagggaagagagagaccctctcatattgttttatactcagtacctgtttttttttttttttttaaaaaaaaaaggaagtgaaatcaaagacaggcagcccagcgccaggcccaaaactggacctgggcctgcctggcctaaacctagtagttaaaaatcaactcatgacttagaaaccgatgttattcatagattccagacattctatagaa

SEQ ID NO: 586206 - DNA, 4001 bp, Homo sapiens
aacatatataaatatataaaatatatataaatatatataaacatatataaatatatataaacataaatatataaatatataaacatataaatatatataaacatatatataaatatatataaatatataaacatatatataaatatatataaacatatatataaatatatataaacatatatataaatatatataaacatatataaacatatataaatatataaacatatataaacatataaatatatataaacatatataaatatatataaacatatatatgaacatatataaacatatataaacatataaacataaacatatataaacatatataaacatatataaatatatataaatatataaaaataaatatatatatgcggatgtgtgtataaactgtgtatatatataactatatatataaccatatatatgtacttatatatatcatctacacatatatcatctcaagcttaagaattcgtaatcaatacccctgatcaccctccacaaacctgagcttcctagtgttcatcctctccataaacatccatctgatgaggttcacatagtagctcaagcttaaaaccttggtccatccataaatcctctctttctcacatactcgtccaacccaccacaaactcctgttggtttaccactgaaatacacccagaatgtgactcccttaagatcccataggtacccagtccaagccaccacctctcacgatggcttttaaactcctaaatcagatggtgtgtcacctccactcaaaaaacttcccaagctgtccccttccacttggagggaaagtcaaggtccttgccacttggtaaggtccacacgactgccctggcccctcctcgcatctctgggaactcacctcctctttctctctctgttcccaaattggctgcagccacactgggctccctgctgtttcccctgcacctgctgtttcctcgacctggaatgttctggtgcctcactcctcctcctgcttcctttccattctcaaaacccctgttctcatcttctccatggcacttaccatcacctgctctgtgcaccttgttcatctgtctctcccctccagaatggaagttcactagatcacagacttgtctccacttgttgacagctgtagcccaatgccccgaacagtgcaggaggaacccaatgaacgttttttaaaaatgaatgaatgaatgacggaaggaaggaaacggaaagcatgcttatgatggaaagtgaggccaagcgcgttggctcactcctgtaatcccagcactttgggaggccgaggcaggaggatccatcgcttgagcccaagaattcgagaccagcctgggtaacatggtgagaccccatttctacaaaaaacatttttaaaaattatccgggtgtggtggcgcgcgcatgtggtcccagctacttgggaggatgaggcgggaggacggcttgagcccaggaggtggaggctgcagtgagctatgatcacgccattgcactccagcctgggtggcacagcgagacactgcctcaaaaattgaaaaagagaaagtgggagctgaaagcctcggagggcaatcagggcgtcttcagagaaagacaatgaaaccagagccactgcaagccctgacggcctgaaacctaggagccagctgagtcccttccactcgcccgcgctgagttaacccagaggcgggtgcgggtgtcggagcccgcgccgggacgcaccggccgcaccggccgcaccagcctccccagcaccgcggaccccagggccgccgcccggtcgcgccgcgccgggcctccgcgcacccacgtggagggggcggagccccgcgggagcccgccccggggctctgggtctcctggcgccctgacccgccggccaccccgccgccgccccacgcgcctacctgcgcccacctgcgcccacgtcgcccacctaagcgtgaacagctgcgtcgcggacgccgccttccggcagggacccgcgccccaggtaagcgttagtcccgccttcaggagtgcggagcctcccattggacgaggtctgcgtccgtctctccgccggctaatggcaagcggcggcagcacggggggcggttccaggaccgggcgcgggctactgacgccatctctagaggcctagagttgcttggagaggagctggttgccaaggcaacccgccctgcccagaacaagtgcagatgactaggtttgggccccgcagggcttgggggtctggggtgcaagctgccccggccgggctggcgtcccggggtggggcctccgccgagggtccagggtatggagctcggctcggagtcgaaatggatgagctacggctattgggatcaacagggctaggacttaaacttcgtgctgaatttaaaaaatcaggataggtgctaaaaaatacacagggtgggtagtgttataataatgcttgtgtccgggagcggtgactcacgcctgtgatcccagcattttgggaggcccaggcgggcggatcgcttgagctcaggagttcgagacccgcctggccaacatgacgaaaccccgtaaccccgtctctgctaaaaatacaaaaattagccaggcgtggtggcaggtgcctgtaatcccagctactcgggaggctgaggcaggaaaatcgtttaagcccgggaggtggaggttgcagtgagccgagatcgtgccactgcactccagcctgggcgacagaatgagactctgttttaaaaaataaaaaataaattaaaaaaataaaaattagccgggtatggtggcacgtgcctgtagttcctgatactctggacgctgaggtgggaggatcgctggagcctgggagatggaggctgcagtgagctatgatcaaggcactgcactccagcctgggcaacagagccagaccccgtctaaaaaaaaaaaagaaaaaaaagcatgctttcaagtcacccagtaagttaagtgcttggcagccgtatcaagtatgatgtacgttgcctcaggaatccaaaggtgacaagcaaagaaggtgcactcttccttactggtagaagattgtatttggttcctttttctgcataacaaattaacccaacatttagcagcctaaaagaacatttattttttcatggtatccgcggtcaggaaagtgggcgtggctaagctctgtgcctttgcctcaagggttcaccaagttgtggtcaaggtgtccccccagggttgtggtttcatcggaaagcttatctggaatgatccactcccaagctcacacacacggatattgtaaggactcagtcctccaaggtcattagagaagggcctcagccttgctggctgctgcccaaaggccaccctcagttccttggtacatgggccttaccacaaggaagctcacaacactgcagctggcttgccttagacggtgcaagcacacacaagaggaggcacacacaagacgcacatcacagtctccttgcaccctaatctcagaagtgacttccctaggcttttgccatattctgttcattagaagtcggccgggtgcggtggctcacacctgtaatcccagcactttgggaggctgaggtggatggatcacttgaagtcaggagttcaacaccagcctggccaacgtggcaaaactccatctctactaaaaatacaaaaattagccaggcatggtggcatgtacctataatcccagctactcaggaggctgaggcatcagaacctattgaacccgggaggcagaggttgcaatgagctgagaccgcgccactgcactccagcctgggcgacagagcaagactccagctcaaaaaaaaaaaaaaaaaaaaagtgaatcatggccaggtgcagtgactcaggcctgtaatcccagctctttgggaggctgagtcaggaggatggatggacaccaggagttcaagaccagcctgggcaaacagtaagacctcatgtctacaaaaataaaa

SEQ ID NO: 586207 - DNA, 4001 bp, Homo sapiens
tcggttgagcctgaatcatgaggacaaaagggtcagcaatagacaggaaacagtaaatagatcacaagaacccaaaagagatcaaatgaaatagaacactgtattttccctgtggagaaagggtaggtttctccctaatagaatcccttctccggagggaaaggatagagaaaatgggatggttattcagttagctgtgagcctgaaggaaacagaaaccatttcccctatgctcaagtgcattccagagtggtatttccagaatgtaccatgaatttcagaaccattaccaagtctctctcaagggtaataatgttatccccataaggtacaactataatcatgtcacctccttaaaaatcttagaatggggccaggtttgatagttcacgcctgtaattacaacactttgggaggccgaggcaggcggatcacctgaggtcaggagttcaagaccagcctgaccaacatggagaaaccccgtctccactaaaaatacaaaattagccgggcgtggtgtcgcatgtcgcctgcctgtactactcgggaggctgaggcaggagaatcgcttgaacctgggaggtgatcacaatcttagaatggcttcccattacacttacaataaagtttaagttcctgttcggcctaccacttcatctacctccacttcacccaccacaccttagggctaaaccactctcaactggcaatttttctccccttgggctttcaattgtgtagcttttaaacctggaccctaaccccaatttacttgctaactccaaattagccttcaggtccctgattaatttcctccggaaaaccttccctaactaccccttctttataccccagcccctgttgtctacaccttgagcacttatttatcctcagtactttactgtatggctccttaggtgggcagcaagtgtcttaaggacaggacacatgtgcatctgattcttcctgtttagaccaggttcctagcacagaccctaacgttgccaccttttaaaaactaggtgaatttgagttctaagattttacattctgacgtccgtggctcagaaattcgacagttgatcgttctccctttccccacattgctcaagggcagcaagtttccttccctaaagcccagttgttcttttccgcctcaaaaagaaatgcttcttagaataacttttctaggggacgggtgaggaaattgttggccagatgctgtggctttaagtctagcaacagtacacccttcaactccatcttcattgttttatccccagcattgaatcctccattccactttcctgactgccctccgcagaggcaacagaccagccaatgaaatccttcgggacgggtccgcccctctgcaggacaggctgacgtccccagagcgactctgcgcccccccccgctggtcctttggtccccgagtttatgccagagcatggagcctagggcctgggttggtttggtcagaaccagggctccgtgggagggttggcctcagaaatgcaggaattaaacaccgtgctccccaccctagcccagacccggctcttcctccctccccagcacgtagagcacccgggacatggctcccgtacccgatgtgcacggaaagccttcacaaggtaccgataggccgcggtgtcgcgatagggtcggccggtggccgcgctcaggtagcgcaactcccgcagaagtcctcgaaaagtgtgcgacggggaccctaaggccgccattgtcctgtccttctccgagcgtggtgcccaacggcgtcctacgaccctgaaaacccctcctccggcccaggcgcctaatggtacggtcggacagactaccgactccccctatcgactgacgagcagtggaaccgctcacttgtccgttgaccgaaccttattaatcgaaggcccaggggcgccgtaacaaaatcaaacgaaacccgactgttaactgaaggtaccaggacctctaacccagaacaagggtttggggaaacaggggcttttcttcactgcgtcattgaagatgcccgttagccgaccaaccgctgagtctcaggagaagcgggcccggcggggggtgtgggtgtggatttgatatggaacacgctgagaagacatttttaaatgatttataaaagggatatcaaaattcaacgtattgacgtctccccaaatcccaggggacctgcggctcagacaaaggacatgggtgtgtgcagattctcgaaaattgcagcccaccagctagtaaaaacacacacacacttcccatttaaaaaaaaaaaaagtaaagttggcatatttcgctttgtttagaaaggggaaaaaaggacaaaagtcacaggccaccccagatgggactcgaacccacaatccctggcttaggaggccaatgccttatccattaggccactggggcttctgcaaacgacgcgctcacacaacatattcaactattttcctctttggtacgtcatcgtcacttcattttcgccttaccctatcccacgaaaccacacctagcgcccacgtgaggggtgacgtatgctgggagttgtagttagagaacaaaagtccacatcaccgcgccaaaggctttaccctcgaaactgcaccgatgctccggacgttgaacgggcgcgcgcacgcttctgcgtacgcgcttgcctgcgcaatagtctccgcgcctgcgccgtagtccccgcgcctgcgcaaaagcgggcatgcgccgtcgcggagcacagcgcgctgggcaaattggccggatcttcgagactcgccctctgaacgtcagctctggtgggtttttaccggaagcagccggaccttttccggtgttgcgaatttccaggaggagctttgctccagcggccgttagatggcgcctgccgcggtcaatttctgcttccggttgaagcgttgaggccatttccgcaggccgggcgtggtggcgcacgcctgtaataccagtactttgggaggccgaggcgggcggatcatcttaggtcgggggtttgaaaccagcctgaccaacacagagaaaccctgtctctactaaaaatacagaattagccgggcgtggtggcgcatgcctgtaatcccagctactccggaggctgaggcaggagaattgcttgaaccctggagtcggaggttgtagtgagccgagatcgcgccattgctctctagcctgggcaacaggagcgaaactccatctcaaaaaaaaaaagaaacatgtgccgtgtcctttgaattggtgcgtcagcgataaacatgggacagcggggaagtaatagtacattgattaggaattaattttaaaaattagcagttcattttttggttctgttcctaattgtataacgaacaaatcacttcggagtcccagtaaacttacccttatagtatcacaggggcttcccattgtccctaagataaagctcagacgacataaattgatcctcgcttgtaccttaatcttcatctctcacttttcgcttatcaccctctgctccaggtatctccactttcattgtctcttccccaccacacaccttacctgatattccctctgcctgaaacttaaccatttgtattaatatgcctctttaccctttgggcttcagcttactccagaagtctaggttagacgcttctccaggcccttgaagtcaatacggcaaggtgaaaattattcatttcacctcctctggtcccctgttgctccctttatttactcatcgtaaataactcttaatgtaggtacatggccactactccatactgtagttgtcagtctcttccatcagactgggaaattgttcagctccgaaagccctgtgcctaacagaaaagcctgtttcttcaccaggcttattccttggtagcatagtcataacagcttagtctgaagctcctaaagggattggcactgtctggccccagtggctaggagacataagctactgagcaggaatgacaaacaaa

SEQ ID NO: 586208 - DNA, 4001 bp, Homo sapiens; identical to SEQ ID NO: 586207

SEQ ID NO: 586209 - DNA, 4001 bp, Homo sapiens
gtgtgttatatgttcacatacccgcaggggcacaggctcctgctttaggctgctgtggcctcacagaacagctgtggagccacttacgaagtgtgtgaccttgggcaaattactccaaactctataaaatgggggtaatgttaccttgtagcattgttatgaggttaaatgagttagtgtatattaatacaaagcacttagaacagtgcctggcagttgttagtgttccttactgctgttcatacagacaaggtcactagaaggcacccagaagtcacataaaggctccagagcctactgggaaaaggcaaatcagccaggccttctgtgctgtcccctttccaatccccagcatggccacactatcttcaatagtggtcacaaggtagagctctgggctagcagcatgtttagagtatgaagaagggtcacatttggttcacttctgagcaaatgtgctggctccagggtgccgaccagctgcaactcagctgtcccagctgatccccaggaccctcttctctaccctcctacagcctttcacaaataaaaaagcaatagcaaaaggaaaaaaaaaaaacccagaagacagcatctcaagacttcttcttccttcccctctcctccacttcaaaccctggcacataagaagacatgaacctcactgaattccttttcctgtatccagacactaaacccagaatgtatatttaacttgcttggggtctaaagtaggagcaagggctagggattcagtgaaattcctaggggattctgctagagaagaaacttcccaggtcaacattcaggaacgcagttgtgagaattgtatagggttgaactatgacaaagaaaatttccaagggatcctgttgctccagattgaaccaagataggtagccttggttctctcttgttgaaaataaagaaaaacaagactccccccactcatatttaagtcttgatttcacactcaggcacaggagcagtttgtggctttctttgacttgttagttttatcacttggtcctccatcgttcacacccccctccagcccacatagaggacgttgggtccacagcgtgtctagcaagcagagtgcacgcacccagctctttctggccgggacgcgctcagggcgcactcaccgcagggagcgtagcggtgcgtggcgccctgaagttccttgcttgtgttcctcatggtcaggcgctgcacgctgcgggaaaagacagatgctgccggacctggtgttcgcgggtgcgctggacgctgcctgcttgaccagttgccaggagctgcagctgcaaaagcaaaatccgcgcgcccgctctgggtcggtctgtacgcctcgccctgacacgcctgcaggcgccttacgatcgcctagcgctggcacttccatgcagggtatacagcagggggcatgtccacgccaggtaaacagaagggagcacatcacgccggtatacagcaggaacacacgcacgccgggtagacagcagggcacgtccacacagggtacacagcagggacgtacgcactccgggtacacagcaggggcacattcacgcggggtattcagcagagacacgtgcgtgcggggcacacagagggggcacgtcacgccgggtatccagtacaggcacgtccacgccagggacacagcaagtacagagaggataagcaacaggtaaccaaggggccgcgggacttgggcaggcttggagatcccgccctgtgctcatcccaacccggcgacaaggtggtcccctccctccagccccggcgcgcactgcccgcactgcgagctccgcacagtggacaaggcccgggaccacagtgggcgcccccattgtcctccagcccgctcaggctcaccagctccccgcgggtctccgtgggtgctgcccgcggcgcccggcgttggagtttttacacggctggctggctgcagccaaccaaacccaaactcccagcgcgccgcggaaccacaacatcggcgtcgccagggcaacggctgaacggccaaccggcgggcgcggctggagcactgtcagccaataggggaagcctgagggggagcggtgggccaatcagggcaggaagcggagcgcgggcgccgcctgtcaactgcccgtagcccagagccggaccagggcagggcagcgcagcgatgccacggggaaccgggcgggacgcagcgggggtgggagcagggccttactgttgcaggggtgtgggggcgtggggacgtggggacgtggacgcaggaagagagtcaggcctcagtcctcctcatgccgctctggctgggaaccacagttactgtagagcggtccagaaaaattggggacatgcatcacgttttccaaataagtataactgtctcaccctaaaaacacaacaaaacaaaacaccccaccagtatacaaaaataaaacataaaaagaatttactaatgagatgcaggagtaatgattcacttagtaaaggaatccttaattttagacaaatttgcttgcaaatttctcatctaatgcatttttttcaagactaataagtatttggaaattgtgtgtcgataataaaattatcatgtgaacattcttccttatatcttattttttgagaatatttctgttttataagttgagagactttttttaaagctcttaaccatatttatatggaatcgcgtttagaactccaaacacttggcttaagtgtaaacttgttgcctgcctggattttgagatctacagaaagtacaatgagtatattaccaatggtgcttcatgggaatgaagattatctatctggcatatgcttggtgaggccaatagacaccaacagctatggcgcagttcagtaggagacacttttgatacccagaaagccctatacaaccctggcaaaaataataagggctacttacccggtggtaaccgcttgtgagagtttgaggggataagttgatacagagaacattcaaagaaatcctgttgttccaacgactgcagcaacagttagcagccttggttttctcttgttgaaaatttttttttaaatcaagacttttcataatggtgggtatttgacaacttgaactgaacatgagtctgtttctgttacacgagtatagccttagaaatctagcaggagacaggtaatatcagaattggttaaagagaagatagtttttgtgcaggaattaactctaattctgtggtttatcctgctctaatataatatcataatgaattctaagcatcttcagtggtccagtcatgagtaatcaagacttcatactgcaatgtcaaatgtttgttccactgcatatacacgctcttaggttattgccaagcatgacaaatgcttttgtttgtgcaagtcacagcatcctctagctacgggattgtatggtcaagagaagtttatttatttatttagagacagagccttgctcttgctctgtcgcccaggctggagtgcagtggggtgatcttggctcactgccacctccacctcctgggttcaagcaattctcctgtctcagcctccggtgtagctgggattacaggcacgtgctaccacgcctggctaatttttgtatttttagtacacatggggttttgccatgttggccaggctggtctcatactcctgacctcgtgatccacctgcctcggcctcacaaagtgctgggattacaggcatgggccaccgtgcctagtcaagaaggttattcttttttttttaattgatcataataactggagctgtcatgaccaaagagcatctctattctccattggattaacaaaaaagtacagcattcatccaagttgataaccttcttgactggctgaaatcataagttcagtgataatgaagtgttatcattccttagaagaaactttttattttatttttattttattttttttgagacaggatattgctctgtcatccaggctgaaaggcattagtgtgatcat

SEQ ID NO: 586210 - DNA, 4001 bp, Homo sapiens
aaacatgtgggaactaagcacatataaacagcacttgaagagatgccacattagtgtgttaatttgagtggaacctattcatttatgaataaatgaataatgaaattattaaaaggtaaaaatagaaatggaattctatgctagtcatttttctctttagaaagatgcacttaaatttgtacaaaatagcaggataaattgcaggaaaatgtgtccatttatttcctaatctctccaaataacataaaatctacagtgaattccattatgtaagagcattctttgaatatcaagaatgatgcagttgttgctatggtaactactcattttattgactaaattgtgggtttgggtagcattctttcaaaaaacatattttaccatcctaagtaggtctgataagactctttctattgctatctgttaaacaataactacaagccccatttggggatgattaaacagcctctattaaaagctaagcttgatttgctaaggaaagaaacctttaaagtttgaaaaatgaaacatatcaactacattcaaaagaacaaaggatacttagttttaactttctagagtagttgaaacgtgtgtataaatcaacagtaacatgatcttacctgtctgtattccttcactgccataattttccttctaatcctaaattattaactaagtataggactaacaccagaaggctgctgacttttcagtttgcaattaagctaaaatgagaaccagtggaaagctttcctcatttcgatactcaggagaagtctctctcccaagcctatgaaaacagaattttcactgtcaaaatcttataaaacagctgtgtacaaaagcctatatttaaagatatcaaggataactgtagactccaactataaacactcttcaggcacaggcaaaagccactaaggcttcttcccctatgagcttccacagagggggttctcaccggaaccccatccatggaagccgagggtgggctttatcggcaggtgtctttaggaggcttccaatacaaacggtattttcagaacctgcccagatctcttcctcatcgcctaaataaacagttaagaccaagtatttaagaaatgggagtgggggccacgagtgtagcccgcccccttttaacaatgtgaagtccagtcagctaaaaggcctgctggcttcccagccctggaagccaatgcgaggaaggctcggcatggttgtaggaatgaagtactaggaagggggtctgataaggaagcaaatggtacagccggtaggtcaagcgtaaaggagggacaactcaggtttcttttcgtcttttacaaatggattttacctgtcttgttttacctcggcgtctcttgcaaaaagcgacccccacctcctctgtgagcgtgtatgtgtttgtgtgtgccgagacaacaacctcagcaccccggctggggacaggggcttggagggggtggggactcaattcctttacaggcctagaactctcccgaagggccctcaaagaaaagggggcggggaggagcgcgtctgatgccgactagggggctcagaccaggcccgggagagcagcagcggctggggggacgtgcagatcctttacattttaatggtggcctctttggaggagggaagaggtgacaagcggttgggggtgatgaggcctccccttcctccctcactcagcgcgctgtttaccttctcggtacttcttgcggagccgccggtggacgctcttcaccacaccggagagcttctcctgctccagtttccgctcctgctcccggggcggcggagtgttcggggacccggccctctgcgcacgagcagtatttcggccgccggcccctggctccatatcgcagccgccgccgccgccgccgcccctcaggcccccgcagacgctccccagatggaggaggtggggtaggaggagggagctgcggaggcagcagccagaggaggcagaggaaccggagcgacagccttggaggtggaccctcacccaaaagtgcaaactgattggtggattttgagggctgggcggaaacggaaaaggctaagggccaatgggcagaaagcgccggcggcgaacccggttgtttgggaaggcgagcagctggaggaggcggagcttgcggggatagggaggctgaggcagtgggagctccaggcctgggtgctcatctcttccccaccctccccggattctgtgcgcaggcgctgtggctcggcctcgggagacgagctgtgagcaacgcgcttgcgcgtctcagtttgcttagtttgggcttttttacagctcggctttctgatgtcttccatcattttcatcccctacactttataatctgttgcgatgcggccagggtgctctgcttgaacctccgctgcaccttgtcacatgtaggttccctttagttacttgcgctttgagatgacgttacacttcagggacctcaagcacacaagcattctaaggctcaaggagaggtctggctaccaaatgctaatttaattctcaggtcgacaatggtttatgcctgcagtactactgctgggcaaaggacatagaaaatgcgaaaaggagagggccaagaaaagcaacaggagatgcaggaggacaataaggaacgatggaaaactcacagcagatgccctcaagaacttttgtagtgaccacggtgttaataagcagccttccctgatcttattcgcatcagcactctgagcttttatggtcagctcaggtgacctcctgtcctttaatttggagagttagtctatgcggagtgtatctaagtgggtttggtaacctgttcaccctcctccacttcttttccatctcttggggaacgcgattgttgacttctgtcccagaaaggtggaacactgctctctggagagaggtagactgcattggctcctgaagtggtactgaggctgctggagtgtcagagattgaatagactgagagcccctaatgagttgtgttggattgtgtaccacttccccattgcaggtgttggttacgtgacagtctatggaaatgattgcaatggtaacattttgataatgattttctaactacgaataaagcttgcattatgtaactgttttatatgctaccttctttatattgaatacgctgaagagcaaagaattatacacactgtctaggacacaggagaagcgggaggtgaagggagattgatggaatttaaaggcggaagatgtgtccctacagcacagtgaagagacagatcaaacacaaagacaaggacatataaacttcaaaagaactccttataattatgaagagaagttaagcggaagtgcctaataaattgaaaatatggtggtcttatttgggggaatttcatttgggaagaaaggggagcttgaattacatgtctcttttggctctttccatattttaatacatatggaaggcaaataatggtgcagatattcgaaagatacaatgatagtaaaaagagcattaaatttcacttgtgctgaactgtagttttattttttaaaaaagaacttttcagcataatactagcaaatgaacttttaaggcctcttaactgaagatgttcactgaaggaaatttggaaaatacagaaaagagtaaagaaaataagacatctggactgagagataacaacttaacattttttctttgtttgtatatactaatttcaaataggatatttcttgatgcctatgtggcaatctattgtatgaatagcctactatttcattaaccaattcccagttattgtagatttatgttttttccagcttttttgtattacagataatgtcatgacaaacacatttgcacacaagtatttgtccatttctttaattatacattccatcaggctaaattcctaaaagttcaatttctgaagcaaagggtcaaacatgttagggttttgatgtatattatgaaattgccttttctgaaagatagt

SEQ ID NO: 586211 - DNA, 4001 bp, Homo sapiens
ggtgctatctcggctcactgcaagctccgcctcccgggttcatgccattctcctgcctcagcctcctgagtagctgggactacagccacctgccaccttgcctggctaattttttgtatttttagtagagacggggtttcaccatgttagccagtatggtctcaatctcctgacctcgtgatcagcctgcctcggcctcccaaagtgctgggattacaggcgtaagccaccgtgcccggccagaaatatatatatatttttaagagacagagtctcgctctattgcccaggctggagtgcagtggcacaatcatagctcattacagccttgaactcctgggctcatgtgttcctcctgcctcagcctcccaagtagctggaaatacaggcaccactaagcctggctaatttttaacttttttgtagaaatggggtctcactttgttgcccaggctggccttgaactcctggcctcaagtgatcctcctgcctcagcctcccaaagtgctgggactataggcatgagccaccatgcctggctaagaaagaaaacatttgccgggcatggtggctcatgcctgtaatcccagcactttgggaggctgaggcaggtggatcacttgaggccaggagttcgagaccagcttggcctcgtggtgaaaccctgtctctactaaaaatgcaaaaattagccaggcgtgggagtctgtagtccccagctactcgggaggctgagccaggagaatagcttaaaccggggaggtggaggttgcagtgagccgagatcacgctactgcactccagcctgggcgacagagggagactctgtctcagggagaaaaaaaaaaaagaaaggaagaaaaagaaaaagaaaaagatattttaagagacagggtcttgctatgttgcccaggctggtctcgaattcctgagctcaagtgatcctcccatctcagcctcccaaagtgctgggattacaggcgtgagtcactgcaccaggccaggaaacaattgttgaacaagtaatcagagggaggggtgagtcactgggggctggggaaagagggagggggtgttaggatggtgctgaccttccagctgcacatctgccagccgctctgcagggcagagaccatgagcgtggagacagacttgacggccgtcctcggcagctgcagtagggattggccctgttggcccagctccacctcggtctcctctgtagtcttggccaacacgcagggatctgccagctcgggggactcacccaacttgggcttagcctcttttgggagctcgaccaacctcaaagtctcaaccacctggagagtcttctccatcttcttcaatgagtgtttcttggagtcagggtgtcctgagatggttggtttaattttttgcctccagaagaaaacctgagaaccaagacacagagaggagagacaggagagaggggcagggcagagacaacaccatccacagaaaagaaggcacaaaagggatggagcagtgagtttcctggcctctcttccttctcctccagcccctccccagctgtcctttccttcctccccactccatcttgtttggccacaggccaggaagggagggaacccacgcagtaaggggctgctgcgacccatgccctcatcccagcgcatcatgaggacagagtggtctcagaaactcacccaggaaataatcctttgccaagcccgtctaacccatcggaagaacttcatgaccacaaccatctctcttgatgggaaaaacacagaagaaagggcagagctagcatttggtacggtgggggtggcgggtgggggatggggtgggctgtgggccggtgaccacctcttgaggggtctcctgtgagcttcaagcacagcagtaaagaaagaagtaggaaatcctgggggaagcccctcctggcaatgaatcccagaccttttctcccctccctgggacagggagaggagtcgaagtaggtgagaacctacagtgagggagagttctagaccattgtgaggctgcctggccccgaccccaacccccgaggccctgcccagacccacagagtccatctcttccaccctggctcttcttcgctcagatccagggaaaataaactaacacgtaacaaactaataagcactgttcctgcatcacgtcctgcagtccttcacagcagcccttcaagataggtattattgttagtgccacttcatcaaagaggaatctgaaattcaggaaagctgaagggggccgggcatggtggctcatgcctgtaatcccagtgttttgggtggctgaggcaggaggatcacttgaggccaggagttgaagaccagcctgggcaacatagtgagactccccccaactcactatgtttaaatttttcaaaaaaagagtttaaatcagttgggagtggtggtgtgtgcctgcagtcccagctactcaggaggctgaggcaggaggattgcttgcgcccaggaggtggaggctgcagtgagccatgattgtgccactgcactccagcctgggcaacagaatgagaccctgtctcaaaaaaaaaaaaaaaaaaaaggaaggaaggaaggaagggagaggagggaggaaggaagagagagagacagagaggagagaaagaaagagagagagagagagaaagaagaaagaaggaaaagaacaaaagaaagaaaagaaggaaagaaaaaaacaaaaaagaaagacaaaaaaggaaggagggaaggaaggaaggaaggaagcaaggaaggaaaaaacttaagagagccaggtgtggtagctcacacctgtaatcccagaactttgggacgccaaggtgggaggattacttgaagccagcagtttgagatcagcctgggccatatagcgagatggtctctaccaaaaaatttaggctaggcgcagtggctcatgcctgtaatcccagcactttgggaggctgaggtaggcagattacttgagttcaggagtttgagaccagcctgaccaaagtggtgaaaccccttctctactaaaaatacgaaaaaaaaaaaaaattagctgggtgtggtggtgcacacgtgtagttccagctactcaggaggctgaggcatggaaatcgcttgaacctgagaggtggaggttgcagtaagctgagatctcaccactgcattccagactgggtgacaagagcgaaacttcgactctagctgggcatagtgccacatgcctgtagtcccagctacttaggaggctgaagtgggaggatcacttgagcccaggagttgaagactgcagtgatctatgatcacaccactgcactccagcctgtgcaacatagcaaggccccatctctacaaaaataaagaaaattagctgaacgtggtggcgcacacctatagttcagggaggccaaggcgggaggatcacttgagccaggaacgtggaggctgcagggagctgtgattgtgccactgcactctgggcatcagagcaataccctgtctcaaaaaaagaaaggagaaatgaaaaaaaaaaaaagaaaaaccaaagaagttgcccaaggttatgaacctagggaaacctaaggaggcagagagtcaggcactccaagacaggtcagcctccttggaggctgctggggccaggggatcccggggctaggggcctcctggggctacagctgcagctctcgcctcttccccactagatggggtccttctccattgctgctgactcttccgcctgggaccggagcccaggctgccagggaggggccagctcacccacagggcccgtcctcagctggccgggggtgggagccacggcggctggccaggcctggcaagggcaccgtgtgcccggggagcctggcccacacccagccccgagacaaggggcccattcagggccccccgccccgcccccaagcagccacccggatccagcccgcagaggggacacactgggaagccaggggtggatcttgggcaacc

SEQ ID NO: 586212 - DNA, 4001 bp, Homo sapiens
acttctacatgtacttgcctctaacctgaggttgcaagcaactcaagggtgggatttttcttctcgattttgtaccctcagaacactatacttctgctatgtagtagtgactgtttattaactcttgagggattggatgataatctgaattccgtttgtcttttttcagccatacttttttttgaaaagtgtcaattcatgaaaatgatgttaatatttgagagcttatgataaacttattaaacccatctacctagtaaaataatgtattgaacttaataccacaacaaatagatacattttaaagtttagctcaacatactctataaagattaatatattacctctgtgtatattgcaatgttctgtttcttttaaaagacaccagtaactttaaaaatgttttttttatttaagtagcacaaactccttaagagacatgggcacattatccctctcaatcctagaaacgtgaaggagcaggccataccacctcagaatccagagtgatgtgtatgggtctattatacatgtttataaatgttgccgggtccatgaattcttcggatttgcacaagtactttatgatttgttctgggaggagtaggtcaggtgcaacttggtgtaagttatcgcctggtcctttagtgcctactttcatagtctggcaaaggtagagtgacagtttatgagtttgtgtgagaaaatctgtgatgacctcctttagggactgtgactgtgtcacatcgtcgagatacataactggaacttttatcactgaaacatgccattgcataaaaagcctcattggaatgttatgagaaatgactataattttcatttgttgaataaaaaatactgtttcatctttgacatggccaatataatctaaaagaactttgtagagagtgtcgctggaggactcgaggatatgcagaatggaagtgggatagatgagcagcaatcctgtcactgcttctcctaggtgatgtttcaaaactgactgaaacatttgttcatagtagtcagcaacatcttttctttctacatttgcttgtatcttggccactagaaacatcctatcaagaaggaatttctttaggtgtagtcgttgtttctcttcttgaaagtgcaggtaattgctacgtgggacttggagaaaaagaagaggttccagtggcaaaggccttttgctgcccttctggttatggaccgaaaaggacatgaggagtcttatttatttttccagatgattccagcttttagcttatcataatatttatgctgccagggtacctctttactgatgaactcgtgtttttatttcttctgacaaaaaaaaaaagagtaaatcacggtttgtcaaatgttactaaatagtaaaatcccaatcttttgccagttttatcaggaaacaatgtatttgaaatgaaagacaatgttaaaacaatactcaaactatagacttttttaaaagtttacaacgaaagagttaaataatatcctaggaaaaaactttgtaaatgtcatgtaatggtgattacagattgtcctttataagccaaattttttaaaaatggtattttatggtaattcttccagtttcttttacaaatctaactgatctataacttttaaaaaaaaatccaaggctttttaagtcctaattagcttatgtaacctttagtcatgtcactaatagttaataatgttccttgaataataacagtaaacatttcaagggaaaagttttggttctttgttttttctcctatcgacgaatctcagaaatgattcatttctcccccctttatttgttttcttgttgtttttgttgttgtaagggctacatgaaagtattctgctactttaacttactctgcttacaaatctcctcaatttttttttccaggtcaacttaccatttttcttttttttcctgtgcttctgtcacgcacctgtcctcgaggccctacttgtcctccatcaggctcccaactgccagtcctctggtgttctcagctgtcctgtgttctgccttccctcgggcatacgtgagtcagaatgtcagcaccattaaaggaccagagcgccaagtttcttaatacgggtatctcgacaaacacttcaaagtcactgcagaggaagtgtgaatggcttattcctgaatggtttatttttagtcaggtgcatttgtaagtcagacagatggtgagaatctggacatctttttcctttctttttttccgtttgataaataaaaagtatggttgtagaactcctctgttctacttagacactaactaaagacttcaggaacacatatctgaatctatctaatggtgaatatatgatgagaaagttctatagtaagatttggcttacttaacttaatgtgattttaagagatgcacctcttaaaattgtgtcttaagagatgcatctcttaaaattgcatccacatgagttctaaacagtaattttaaaacaagtttaaaaaacgtttattcaatttttaacaatgaaacctaagaataattttttccctgagttctgtattatccaaactaatgatctaattttaatgataatacaatgataaattatccaagtaaatgaaggcagagaggtgacttaataattaattaattgtgtaatacataaaaatggactattcttcctcattgtgattcactttatcactccctgaagcaatacaatctttccgaagatgtaaaccatggtgccaaaccatgtcattgcccagtctagttattatctcactctcattcttcttacagctttgttggaagaaagtgtccatgttgaccagagccttcattatggccttctctcctctcctggtttctatgatactgcactttcttggatttctttctaaatctctgtatgaggccttgcccggcaataccttctcacatccaactctggaaaatacttaggctctgcgctcatgatgtggttggatctctcgctctacttctttgcccagttagctcagcaccatctatatgtctcttttgtgagggcaggtaagtggtccttaaagccactcttgccactagattgcacgtttgaaattggaaattgatcatggggctttccttctgagcttacctgtggactaaaaatatttttcaatctgagtctcaaggtagacacaactagttaattggggttgagaaagaagaaaaaactgagctcccattctagattatttttgcacagaaaattctcaaattattatctccagtcacttattcacaactcttctctccttggatgtaactctgtcttttcaaatttaaaatgaaaacatttaaacaattattttccttattaaacatgtttccctttacaaataccccacttgtgtctaaattaacatgttttttcctctcagttcccaggccaaaatccttggtattatttgttcatgtttcatccaagttatatactccaactctattctttttactaagtctttttactcactttaatatgccttaagggttcttgatttacactacctctttcatagtcctacttctttatttggattataataagggtctctacccacagtatttctagatttctccaccccacaaattcagctaagagtgtgaaaccataagccctttgatacatctactttataaagttaaaaagattctcattttacaaagtcctccctgctttctttccctccatagaatgctgggaggcaaagcctctgccttcaccacatccagagtgacttctggtatttatttccaatttccagtcatggattaaaccagagagaacatggggacaggcaatggtgtgatttgttacctaacacagctactgatcaaagtcagtaggagaatttatgaggtactgctacccaggagccccttttcagtgcacaaactcaaactagtcttttatacacaggtgagattcttcctcttcatgaaactgttccttactga

SEQ ID NO: 586213 - DNA, 4001 bp, Homo sapiens
gactgacactgtcaggtgtgtggcaagcagcatgcacagtgggctactgtgaaaagacgcatgtgctcaagtgcatgtgtgtacagaaagagacgtccaagggtatcaacaacaccttagtgagaatatcttgaggctcttgagacaggttgaccattttctttcttttttttgcggggggggacggagtcttgctctgttgcccaggctggagtgcagtggcacgatctccactcactgccacctccgcctcctgggttcacgacattctcctgcctcagcctccggagtagctgggactacaggcgcccactaccacgcccggctaattttttatatttttagtagagacgggatttcaccgtgttagccaggatggtctcgatctcctcacctcgtgatccacctgcctcggcctcccaaggccctgggattacaggcgtgagccatcacgcccggccattttctgatacttttcttaaggcttgctagtaccttcaggctgctgtaacaaagtaccatggactggatggctcgcacacaacagaaatttatttcttgcagttctagtggctgaaagtccaagattaaggtgccaggacattcgctgtctggggagggcccactttctcgttcattgatgatgccatctccctgtgtcttcacatgacagaaggggtgagtgagctctaagagcacttatcccatcacgcaagtcgagcactgagaagctatgcagtccctgaaggcccactcctggacagaaatctccgtgtttctctttgttctggtcttgactgaatctaaacaagtgaaaggcagttcttgagcctgtgtaaccccctaacctggcccaagttccaaacacacctggatcttcgcctttttcatctgttaattgtggccaataaaaataccttccttggccggacgcggtggctcacgcctgtaatcccggcactttgggaggccgaggcgggcggatcatgaggtcaggagatcgagaccatcctggctaacacgatgaaaccccatctctactaaaaatacaaaaaattagccgggcgtggtggtgggcacctgtagtcccagctactcgggaggctgaggcaggagaatggtgtgaacccgggaggcggaggttgcagtgagccgagatcgcgccgctgcactccagcctgggctacagagcgagactccgtctcaaaagaaaaaaaaaaacttcctcccaggttttagtcgttttttccccggcacccctgcttgccacgtggtaaatgttcaatacaactaatatcaataatgactcaagtttattgattaccacctctctctttcctccatggagtgcttactgggaggatggagtctcttggggtgcgtggctttcccatacatcagcatcagccatcgcgagaccccacgggccagcagtgtggacggggagacaagtgaggcctcccagccagaacagctcagcctgccaggagaagcagaaaccccccaaagtaatcacttctcgagtgccttcgagaccccagatgttgggaaaacaactattttcccttgtgtaagacatggccagtttctttccatctcctaaacaaatcaaatacaaccctgagccctcctccttccagcctggcagaaaatccagccttgacattctgtggactctctctgccccacagggagttaccaaagccctgggagctttttcaaattttgatggatagcaaacattttaaaaaaagacaaaaaatcaaattatcatgaagtggacacgcccatgtaaccacttcccaggtccagaaagaacaacagtcatccaggaccacccccacatccctcccagcatccacacctcccaggccccacaaagaccactgtcctgaccgctgcctccctccctggggcccggccagagccgtcttccttctgttgactctgttggtgccatcctcatcccactgcccgggtgactcgtctgccaaatgcaagaatcgaatggggagaggagtctagcgtaccccctgaaccctgagccccaaagcaggagttttagccacatagctttgggttttcccaggatccctcgggtgcctggggcgcaggatgccagggtataggagctctgctctcatgacgggtgaatcccctggttctcctgtaagtgcagagatgctagggtagttcccacactcaaatattccccgagccagggctgggcgcctgtgggaatcccagcaatcctacagtttcactgaagtcctataatttcccgtaccctgcctctatttcagggacctgctgctcagaatgtggaaatgcagatgtggtttgcttgtgttgccattgttctcgtgagctgtaaggcagtgattacaggctccgtgggcggcagggagcagccaactggattgacggcacattcttagcttattttaaaatcagtaacagcattaataaaaatcctgtgccttcccatttactttttcttccaaaagaaaaaatactgtacttcctagcagtctgtggctggagtgggaagaaaggagaaatcatttgaaagtgtgaggaatatcagaggaaattttagaaaggaccctaggccatctctagctttctcatagcagtgaccctgttcctccccccagattgggacactttaattttttttttttttttcaagacaaaggagtctcgctctgttgcccaggctggagtacagtggtgtgatctcggctcattgcaacctccacctcccaggttcaagcaattcttgtgtctcagcctcctgagtagctgggattacaggtgtgtgccaggacacccagctaagtttttggtatttttagtagagaaagggtttcactgtgttggccagcctggtctcgaacctgtaacttcaagtggtcagcccacctcggcctaccaaagtgctgggattacatgcgtgagccaccggcccggatgattcacttcttaataaatcatccaacccaatgatttggttccaaaagaaacagataacattcaaacactgtttcctctagttcatactgtaagacaatgtattttagatacattttgcttgaaatccacaaacttgtcaaatacccacctgggtagaggaggacagcagaactgaagggcaagagggctcagccagacttccctccccgagctcccgggagaaggttaatcacttcgatctaaaccaggcagggcagagacctaggaggcaggaagtcagtttaaaggatgtgacattggcatttgcccagcgggtgatgggagagggaggttgaggtcgtaacacttcattttcattctgcatcttacaaagactccgacctctgagctaaactgacttgggccagctcccacctagtgaacctcagctcctcctcctcaagtgaggctgtcaccttgcaggtaagcagagagtttgtgagtctaaaaggagagaaactctaggagaggaaaggctctgtagccatgggcctggaggagcctgaggctctatttgtggaatgagtgtgttagaggaactgggggtctggaccagataagaaagtccccagctttaggcagtacatgtgtccagtagaggcagcagacagacttgctggccagaggggctgaagccatcattcgggccccaaggccagagggtccaaggcacatgatagagatggccggcgtgactgagaggcatgaagttggaaataaaaaataaattatggaatcagagagaagtatgggttgttttccatggactatgcctgatattcttgttcaatttaacctgatttagaactggttcagttttatcattttatttgtacaaacttatggagtacaagtgtaactttgttacatagatatattgttgtattagtctgttttcacactgctataaagataccacacaagattgggtaattaaaaaaaagaaagaggcttaattgactcacagttctgcattgttggggaga

SEQ ID NO: 586214 - DNA, 4001 bp, Homo sapiens
aatatggaagtgtgggaatataaaaaatgcctatcaataggagagggcttgaaataaatagtggtttgtctgcattgtggaatactgtgctataaggcattgattagaaatagtatattagaactactctagttgatttagagcaatgtactcaaggcatttttgaatgagaaaagttagatgaagaagagtgtatattatatgatctaatttgtatagtcaattttaaacttcttatcgatttcatgtggggatgtgtgtgtgtgtgggtgtgtgtgtgtaattacatgatcctgaagtatagcgtagaagtacacagtgttgttaacataggttaccagcttgactgacagaggagcagtgaatctggatgagttggagagaaatggtggaaagaggtaagattggagaagagctgggtggggaatagacaattagcttttactttatacatctttgtatattttacttattaaaacaaatgtgttaaatccataatttgaaaagtacatctataaaagaacctttaaaatattgagttaagttaaacttttttgaacactccaggggtttgaatggtggcttcccaaaagatatattgacctagaacctaagaatgtgaccttttttggaaaaatggtctttgcagatgaaattaaattaagatctccattggagatcatcttgcaaaatcctaaatcgagtgacaagtgtcatcataagagaatagaaggggagaagacacacaaagaggagaaggctatgtgaaggccgagggagggattgaactgagagtcacatgccaaggactgccaagagacaccagaagctgaaggaggcaagaagcagaatcccccctcaacctgctgcagggagtatatagcccacccgttaccttcattttggacttctgacctccataactatgagagaataaatttctgttatcttaagcaagtaaatttgtggtaatttgttacagtaacctaggaacttaatatacatatgaaacttttatttcaatggaaattttctgtgagttccaatatgtaaaaatattagagatactctgcctcatgaatgagacatcctgccccaccattcccatccttgtgtcaccaaagaaacaccagggatacttaggtcacagcttgaacatcactaatttagtccaatcccctttctgtacggaagaaaagagtggaacttgaagaatgtttcccaccttttgataagttatgcaaactcaaaggaaccttgtgcccctttctgaatttgtttcttgtaaggcttaggatcattttaagtatcttatgacaggttactgtagttcagttagcttttgctatttttatacttttgacacattcatttcactgccacacaatcatttttgtaaagttttattcacttttttccttaatttcccatttcctttggaaaagattttgcataactgattggtttcttgtggacaatccgtagatatgcacctttcacttgagatatgtatccctcatgaattctagttctgtatctctgatccatcatgtgacgatattgagctgagaattcctctgacatcactggatgcaatgggtccagggcataaaaacacttgagaaggcatgacatttgtggtgcagaaagaatgagtacagcctatgtgcaatggagaaaaagaaagagactgaatgctgatcaacggcagttaaggtgccacgtctcacagtagggcaccaggtttatgcacaatgagtcaggctcattcctcaacatggaagattctttatttctaccaaaaaaaaaaaaaaaaagaaaaaaagaattcccaccttacctgaaacagcattgcaaggcaactgaggctccaaagtctctgatgagtgagatgaggtacagagagttgagaaagaccatcactgggtgtcatcacagccatcattttgcaaggtttatatggatgtcattgcatgtttgggatcaacatatgttttctgtagtggagaacagaattaattagatctgaagaagaagtttataaagaccttcaacttgacatttttgcaatcacacacacagatactctgagaattttgaataacaggcttcaaacacaatgattattacatattagcatggagcacacggaaaacaaagggtaaagagacaatgaaaaatcaggatgaccaagacagaaataaatgcaaaaatgaagaaggtggagattattctatttatcacaactaagggttttatatacataaaatatatcaatacttatatatttataactaatatatgtttcatatatttataattattgtgagcatatttgtagtttctaatacacacacacacacacactgtaactcccattgttgggtttgaaagatggcgtaagtttgtcccaaatatttcatgggacatatttataaaaaaatttgttgtttatttgatgttcaaatttaactggatattctgtgatttcatttgctaaatctggcaacctttttcttaagttaatttgtgttctatttttaatacagacaccttttttacttctcagtgtctaagtacagttggtgtaatgcccactgtttccactctgtggaagtcccaagaggtcttcatatttctaaaaagtttacagggaactggtattcataggtttctccagatctttgtgtttctacttcctggcatactatatgtctcataactcctccatctgacatgaagttcagctctttcttcagttttcatgaagaaatgttatcacacatacatgcaagaatttgatattttttgtttgtttatttggtgcatcatcatgaacaacagtaacatctaaaacccgactttcctcccctactgtcatctgttgtcctcaagtttcctcttcctggtagcccttgaacaactaaattcttcactgaaactttgggggtcagctttttttttttttaggccttgatggtggaaatggggaagagagagaatctcaccttcaactctaaaaaattaaaacatttttcccaagacagactgatttttcctgtggaggaattctgctaccggctgtgaagataatacattttctccatcttattacgtatttaatataagcataaaagcatgtctacaaaaaagttagtttcggtaatatgttacattggaaaaatcagtatgaattcatgtctttaaaagatttattttccaactctatcattattataaatggcccagcagcagggacactactctagtgtattaccaatcctcatgtgcaccccagcacacacattttgatccctggagggtaattggcttcaagtttgttgtaaagacaaaataagatggagtcaaagcaacctgttgttaaccagaaatcaaggctgctacttggaatattagggagtagtgtttcaataacaaaaacatagcaaataataaccaaagtaataatgctaattgctaaattggaaaaaattaagtatctaaaaagccacaatttcacagtaacactcgaaagaaaacacaaggtatgcaaagagctacttgcattacaacaacagaaagattctaacaggctctttccatccttattgatttaaagaagtaggagagtatttaaatatgatgttttcttctttttgtttagggtatgtttccatatgttcagcacatattcttgtttatatctgtgtaagaaagaagatatgtgaatgaaccaatatgagataggatttctacacaatgaggtagacctttttcctactatagaaaagatcacagaaggagggatattctaaatactaatgaactcatcagcattaatgatcttatagaataatgacttccaagtttattatagttgattacagctatggcatacaggtatacacaatgactgtggcaaaacagaatgtggtgaaattataagtggataaaatgttctgaaaaggaaaagtaagcacagagattcaatccttcatctc

SEQ ID NO: 586215 - DNA, 4001 bp, Homo sapiens
aactgtccacaggtttacagcgtaggggccaagaaccatccaaaaaggaagaagagcaagggcgatctcaggggagaggggcagcagagagagagcttaccccttagacgatgctgcttagcagcatggaggggaggctctgggtcagaaagctcctgaagccagcagcagcttggggccttataacattatcagtgggtaacagctgtcccctgaggttttgcagggtgtgtaaagctgacaggctctaaatggctaaaatgtttgtttgggtgtttttttttttttttttgagacggagtcttgctctgtcgcccaggctggagtgcagtggcgcaatctctgctcactgcaagctccgcctcccggattcacgccattcttctgcctcagcctcccgagtagctgggactacaggtgcccaccaccacacccagctaattttttttttttttttttttgtaatttaggagagacagggtttcaccatgttagccaggatggtttcaatctcctgacctcatgatccgcctgccttggcctcccaaagtgctgggattacaggcatgagccactgcgcccagccctgtttgggttattttttaaacaattggatgtgtaaaaattcgagtttgttaccagtaggcttttgagctaacagcttacagcctgcagtgaagaaataaaccacctggaggcttatagagcacatgttgagggcacaacaacttgctgagcccaagaccctttctggtctcccaggcacaggcacaggcctctctcctgaggctcacccacagctcagaatggttcaccaggggacactgaaactgagacacagactttacatatgggcatgcacatcgcgttgataatctcagtctccaaagttagatactgaaaacaacctttataatacaatgaatttccattgctgagatcatcttactgccatttagttcaattcaggagaggtattttcctgattttgctttttttcaccaagaaatcactattttaccaaaagctcgtaaagtagcatcatcagatataatctccattgcatagtttatcacgttaacaaagctctttatttaggctgctaacatgaaatttgtctttatttttttctttttcctagctgagaggttttctcatgactttaccccaaaaaagaaaatcttttcaaagtaaatcttttgtgagacttaaagatgtcactgcttatatgtgggaaaaggtcctcacctttctgagactggaaacaccaaagttggaagaggctgagatggttgagaatcacgtaagctgtgagatcttggattactgagcatgatagcacacactcaagatgatggtttcattgcagaattttgctttcagttatcaaagcatgagtatgtttccatgccaaatctccttgcaaagccacaaaattagtctcaatcatagtggaactcatggaattttcccgtgcaattctaaaacactttacagattaccaagcacattctcctgccttaactcactatatccttatagtgacctgtacagttggaaagacagagtttatggtcttccccaggacacagacatgctgtattctgtcccctgagttagtcatttgcttttggtgcctgctatcaaacccaaacttctatccaaaacatagagccttaggtgcattacttgagttcagtcaccccagacatgcatgtaaacaaatcaaaccaggcgtttgcacactgaatactcactttcttcatggctgatatattagtttgttttcatactgctgataaagacatacccaaaactgggaacaaaaagaagtttaattggacttacatttccacatgacttgggaggcctcaggttcatggtgggaggtgaaaggcacttcttacatggtggtggcaagagaaaaatgatccagatgcaaaagtggaaacccattataaatgatcagatcttgtgagacttcttcactatcacaagaatagcatgagaaagaccagcccctatgattcaattacctcccactaggtccctcccacaacatgtgggaattctgggagatataattctagttgagatttgaatagggacacagccaaacaatatcattctgctcctggccccctccaaatctcatgtcctcacatttcaaaaccaattatgccttcccaaaagtcccccaaagtcttaactcattttagcattaacccaaaagtccacagtccaaagtgtcatctgagacaaggcaagtcccttccacctatgagcctgtaaaataaaaaataagttagttacttcctagatacaatgggggtacagggattgggtaaatacaactgttccaaatgggagaaattggccaaaaccaaggggttacaggccccataccagtccaaaatccaacaggtcaatcaaattttaaagctccaaaatgatctcctttgattccagggctcacatgtaggtgatgctgatgccagaggtgggttcccatggtcttgggcagctctgcccctgtagctttgcagggtacagcctccttcctggctgctttcatgggctggcattgagtgtctgtggcttttccaggtgcacagtgcaagttgtcagaggatccaccattctggagtctggaggatggtggccctcttctcacagctccactaggtcccttccacactgccctagcagttctccataagggccccgcccctgcagaaaacttttgcctgggtatccaggcatttccatacatcttctgaaatctaggctgaggttcctaaacctcaattcttgacttctgtgcacccataggctcaataccacatggaagctgccaaggcttgggggttccactctctgaagccccagcccaagttgtacaatggcccctttcggccatggctggagcaactgggacacagggcaccaagtctctaggctgcacacagcacggggaacctgggcccagtccactaaaccacttattcctccttggcatccaggcctatgatgggagaggctgctgtgaaggtctctgacatgacttggcgacattttccccatggccttggggattaacattaggctgcttgctacttatgcaaatttctgcagctggcttgaacttctccccagaaaatgagtttttcttttccactgcattgtcaggctgcaaatttctttaacttttatgttccatttcccatttaaaacggaatgcttttaacagcacccaagtcaccttttgaatgctttgctgcttagaaatttcttctgccagataccctaaaaatcatctctctcaagttctaagttccacaaatctctagggtggggcaaaatgctgccagtctcttgctaaaacataacaggagtcacctttgctccagttcccaacaagttccttatctccatctgagaccacctcagcctggactttatttttcatatcactatcagcatttttgtcagagtcattccacaagtctctaggaggttccaaactttcccacattttcctgtcttcttctgagccctccaaactgttccaacctctgcctgttatcaagttccaaagtcactttcacatttttgggtatcttttcagcaacaccccactctactggtaccaatttactgttttagttcattttcaagctgctgataaagatataactgaaactggggacaaaaagatatttaattggacttacagttccacatggctggggaggcctcagaatcatggcgagaggtgaaaggcacatcttacgtggcagtggcaagagaaaaatgagcaagatgcaaaagcggaaacacctgataagccatcagatctcatgagatcttattcactatcacaagaatagcacgggaaagaccagcccccatgattcaattacctccccccaggtccctcccacaacacaggaattctgggagatacaattcaagttgagatttgaatggggacacaacca

SEQ ID NO: 586216 - DNA, 4001 bp, Homo sapiens
atgtgtggtgtgtatgtgtgtacgtatgtgtggcaggtgtgtgtgtgcttgtgtatgaagcgtgtgtggtaggtgtgtgtgtttgtgtatgatatgtgcatgtggtgtgtctgtgtatgacgtgtgtggtctgtgtgtgtctgtgtttgtgtatgatgtgcgcatgtgtctgtttgtggtgggtgtgtgtgggtgtgtgcttatgtctgtgtgtgtctgtgtttgtggtgtgtgtggggggggatgtatgtgcacatgtgtgtttgtgtcagccagccctggctcgcacaggcagagcagaccacctccacagtgtgacctgaggagcagtggccctcaaacacctttcccaccatgtgtcatgacactgccaactcctccattaatttctctaaatcaaggcagtgattccatttcctaggaactctctcaattacatttcaaatacccctgtatccatttgctagggctgccataacaaaataccacggaccagggccttaaacaacaggcatttattgtcttacagttctggaggctggaagtccaagatcaaggcgtaggcagggttggcttccccgaggcccctctccctggcttgcaggtagccgccttgtctctgtgtcctcatgtgtcttgtctctgagtgtgcacatctctggtgtctcttcctcttcttaaaaggacaccagtcagattgggttagggcccatccacaggaccccattttaacttaatcacttattcacaggtcctatccagagttagattctgaggcgctgggggttagggaagcagcatagaaattttggggaaaagcaattcagcccatagcagccctgagagaggtaacacactagactgcttcggggtcacaggaatgacatttgcggctcccttgctgcacatctgctgcttgagggtgggtctttaggggatagtggggcttttgatagatggccgacctggggcagggcaattccggagcagagggctctgactccctgtgaaggaaggaccctggctggaggatccccacctatgctccaaggtggtagccctgggcctatgaggggaccatcacgatgtgggaatgggatgcagggagtggagctgaaagcccaccagagacaaacccgactaactacccttcagttttgcccaagacgctgttcacttcaactcatccattcatggaagtaactttcctgccaagctctcttcctctggtgatggtggagattctatacactttcttcatggtctctcagccagcggcagcttctgggcccaccttgcttcactccccatccatacccagcaggggcttcctaaggaactgtattagtcggttctcacactgctataaggacatacctacgattgggtaatttataaagaaaaagatttaattgactcacagttccgcagggctggggaggcctcaggaaatttataatcatggcggaaggagaagaaaacacttcctttgcgacgtggcagcagcgagaagtgcagagggaaggaggggaaagcctctataaaaccatcagatctcgtgagaactcacttgctatcacgagaaccgcatgagggtaaccgcccccttgattcaactacctccctccgggtccttcccaggacacatagggataatgggaactgcaattcagcatgagatttgagtgcggacacagccaaaccgtatcaggaacttatgtgattaagcagtacatttgaagaggaaatggttgagccgttgttataagatgcttcccagagctttgcggtgtccagcattctgacatcaacgtagggtttctatcaagtagttgggctgtcagtctaccaccagcaaataaacctgaccctctaaaggctgatagaaagaaacatcccataaggggtagctcttccctttacattaccacctacctcaacaatgaggtcagcgggatagagcagaaattgcactgggctggaaaccgagatcctactgctgattttgtctccaagtgactttgtgacctcatataagtcatttaaccttcgtgggcctctttcctcgtgaaggaaatgatgaaagtgagtgttggaacaatctgtgatactcagcggcaggaaagctcacccagaaggctgaaatctgcatacataaataactcgaaaacaaagccatgcttggtccttttttatttagttcaatcaacatatctcatctaatgttaaaagaaaggacataggatttttttaaagaaatttttgttttgaactaattttagacttacagaaaagtggcaaaagtaatatatactttccttatatctcttctatcatttcccctgatatcaccatcttatataaccatagtacaactattaagaactggaaattaacatcggcacaatgtaactaactgaactacagtcctatttgaaactcacaatttttttccactaatgtcctttttttctgctcaggatctaatctaagatcctaaattgcatttagctgtatttctccttcttctcctccactgggtaacggttccatggtctctcctttactttcatgaccctgacactttggaagaaaatggatcggttccacaggagaatatccctcagtttgggtttgtttgtgcattctcatgagtggggtaaggttatgcctttttggtgagaatacacaaaaatcatggcacatcttcctcagtgcatcattcaaggggttcatgagagccacatcttataactggtgacattgatcttggtcacttgattaaggtggtgtctgctgggtttctcactgtcaagttattatctttccctttgcagtggataagtatctaggctgacgctttgagactaggcatggcctgtttgtcctccagctttcactcaccagtgctagcatccctcagcagatcttgtctgcagtgctcactctgtggagtcctgtcctcttcccttctacatgtattcattggcgttccactgtgcagaagcgctgtcttttctccttcattatttatgtggtttttgtttgtttattcatatcagtgtggatgtttaattattgtatttgtggatgtttttagtctagcttaaaatgtaacgctatctttatcttgctgctcagatcgtctcagctcttcgctctttcacattggttcccgagctcttttgacagactcttatctttattttgagcattttcttattttctggcaccacaagatgtttcagactgaccttgtgttttccatgtcctggcttgggaatcagccacttcttcacgattcctggttccttttacaggagaatggtgtggagagaccaagatctatgttgtagatgggtccattgttattggaatggtattgcttttaagccctcaaaacagagggctaggtatatatgtgtgcatgctaagctgcacaaacatacccatctacctctgtcttcttctctcctgccctctttaaagatcttgagttcatagtgatacccatgattctaagctataccacaggaaatcattttatacttgtttcttctcttatttgtgacatctttctccaacagtgaaaaccctggctctcatcatatacaatatatttacttatttgttcaattccactaccgttgtcccttggtatacacaggggtttggttccaggaccccctcacccatgccaaagttcgtgcatactcaagttccgaagtcagacctgggcaacatgagtagaggaaaagtctgccctccgcctctgcaggtttcaaatccctcgaataccgtaaaccacgcctggttgaaaaaagcccatgtataagtggaccctcgcagttcaaacctgcattgttcaagggtcaactgtatctatataaagtagttttgaacggctagctcatactgccatgagaaatgcttttactaactgatcacagcgtttatgcacagttccatgcccttggcttttcagcatccagcggaatact

SEQ ID NO: 586217 - DNA, 4001 bp, Homo sapiens
cggagtttcagtttttcatgttagaagtgttctggggatggatggtggtgatggttgcacaacaatatgaatgtacctaatgctgctgactgtacttaacagtggttaagatggtaaacttgatgttatgtgtattttaccacaattaaaaataatttttataaagcacaggataccaggggttcctaatctggagtttgtgcacctagaatgaactcacctgggttcatgaatttcctaaaattgcatgaaaaaacatgtttgagatatttcttctccttaatagtatctacatgaaaaactgtccagaaaataacttaccttttcatcataggaataattgaactgtatcctagctcatgatttatacccatttcactcagattctggctgtggaaacaacacaaatgagaatcaacagtacttagggaacaactgggtactggatgggacagtgcggagcggtgagagaggggcaggaggcagctatcttaaccagcccaggagagtggggagatgacaggaccgggaacagaaaatatatctaatgtacattgcatacatggaacttgtagatgtagcattcgtggtggccttgactatttggggtgacctcaaatgtcacagcatgggtccttttttaaagtggaaaacaatgccttcctaacactcttgggaggctgaaacaagctatggcgtgcagagcactatgtgcatgtgacctgtggtgccggcaggccactgggcagcccgtgtgcctgctgtggatgggtctgtagacggccctcaaaagccatgtttccactgttactattgcgatttggggaattaatgaaggtcttgggaagcgtgcctcacgacgccaaggactcactccaagcgcgaacacacacgtgtgtgtgtgtgtatgtgaatatgtatgtgtgtgtggtgtatgagtgtggtgtgtgtatatgcatgcaatgtggtgtgtatgtgtgtggtgtgtgtggggtgtgaatatgcttctatgtgtgtgtatgttttgtgcgatgtgtgtggtgggtgcctatgtgtgatatgtatgtgttgtgtgtgtgatatgtatgtgtgtggatgtatgtgtgtggtgtatacttgtgtgtggtgtgtatttgtggtgtgtgtatatgtgtgtggtgtgtgtatatgtgtgtatgtgtatgtgtgtagtgtgtgtatatgtgtgtatgtgtatgtgtggtgtgtatgtgtgtacgtatgtgtggcaggtgtgtgtgtgcttgtgtatgaagcgtgtgtggtaggtgtgtgtgtttgtgtatgatatgtgcatgtggtgtgtctgtgtatgacgtgtgtggtctgtgtgtgtctgtgtttgtgtatgatgtgcgcatgtgtctgtttgtggtgggtgtgtgtgggtgtgtgcttatgtctgtgtgtgtctgtgtttgtggtgtgtgtggggggggatgtatgtgcacatgtgtgtttgtgtcagccagccctggctcgcacaggcagagcagaccacctccacagtgtgacctgaggagcagtggccctcaaacacctttcccaccatgtgtcatgacactgccaactcctccattaatttctctaaatcaaggcagtgattccatttcctaggaactctctcaattacatttcaaatacccctgtatccatttgctagggctgccataacaaaataccacggaccagggccttaaacaacaggcatttattgtcttacagttctggaggctggaagtccaagatcaaggcgtaggcagggttggcttccccgaggcccctctccctggcttgcaggtagccgccttgtctctgtgtcctcatgtgtcttgtctctgagtgtgcacatctctggtgtctcttcctcttcttaaaaggacaccagtcagattgggttagggcccatccacaggaccccattttaacttaatcacttattcacaggtcctatccagagttagattctgaggcgctgggggttagggaagcagcatagaaattttggggaaaagcaattcagcccatagcagccctgagagaggtaacacactagactgcttcggggtcacaggaatgacatttgcggctcccttgctgcacatctgctgcttgagggtgggtctttaggggatagtggggcttttgatagatggccgacctggggcagggcaattccggagcagagggctctgactccctgtgaaggaaggaccctggctggaggatccccacctatgctccaaggtggtagccctgggcctatgaggggaccatcacgatgtgggaatgggatgcagggagtggagctgaaagcccaccagagacaaacccgactaactacccttcagttttgcccaagacgctgttcacttcaactcatccattcatggaagtaactttcctgccaagctctcttcctctggtgatggtggagattctatacactttcttcatggtctctcagccagcggcagcttctgggcccaccttgcttcactccccatccatacccagcaggggcttcctaaggaactgtattagtcggttctcacactgctataaggacatacctacgattgggtaatttataaagaaaaagatttaattgactcacagttccgcagggctggggaggcctcaggaaatttataatcatggcggaaggagaagaaaacacttcctttgcgacgtggcagcagcgagaagtgcagagggaaggaggggaaagcctctataaaaccatcagatctcgtgagaactcacttgctatcacgagaaccgcatgagggtaaccgcccccttgattcaactacctccctccgggtccttcccaggacacatagggataatgggaactgcaattcagcatgagatttgagtgcggacacagccaaaccgtatcaggaacttatgtgattaagcagtacatttgaagaggaaatggttgagccgttgttataagatgcttcccagagctttgcggtgtccagcattctgacatcaacgtagggtttctatcaagtagttgggctgtcagtctaccaccagcaaataaacctgaccctctaaaggctgatagaaagaaacatcccataaggggtagctcttccctttacattaccacctacctcaacaatgaggtcagcgggatagagcagaaattgcactgggctggaaaccgagatcctactgctgattttgtctccaagtgactttgtgacctcatataagtcatttaaccttcgtgggcctctttcctcgtgaaggaaatgatgaaagtgagtgttggaacaatctgtgatactcagcggcaggaaagctcacccagaaggctgaaatctgcatacataaataactcgaaaacaaagccatgcttggtccttttttatttagttcaatcaacatatctcatctaatgttaaaagaaaggacataggatttttttaaagaaatttttgttttgaactaattttagacttacagaaaagtggcaaaagtaatatatactttccttatatctcttctatcatttcccctgatatcaccatcttatataaccatagtacaactattaagaactggaaattaacatcggcacaatgtaactaactgaactacagtcctatttgaaactcacaatttttttccactaatgtcctttttttctgctcaggatctaatctaagatcctaaattgcatttagctgtatttctccttcttctcctccactgggtaacggttccatggtctctcctttactttcatgaccctgacactttggaagaaaatggatcggttccacaggagaatatccctcagtttgggtttgtttgtgcattctcatgagtggggtaaggttatgcctttttggtgagaatacacaaaaatcatggcacatcttcctcagtgcatcattcaaggggttcatgagagccacatcttataactggtgacattgatcttggtcacttgattaagg

SEQ ID NO: 586218 - DNA, 4001 bp, Homo sapiens
atttaggtttgttacatcctgaaagtacttatcatttacaattaattgtttccaggatgtacaaagtcattgaaagcctaggacaaattatattgaactctgtccccaaattgcaggtattactttttgaaactcttaatagttaataataagagctactattaatgaaatgttttatcaggtttcagggattctgctaagcactttacaagtgttaattcatttgattcttacaaatgtataaaagaagtaagattattcctaatttatgtatgaagaaactgaaaattttggacttcttacaatctgacatttattctttattttaggtatttttacataaaatggcccttacttattatcttacgaagtttcactcttaggtgagtttttttttttttttaacataaaatgacccttacttattatcttatgaagttttactcttaggtgagttttacaagtaaggatacacaggcataaagagaatagtaactagccctgggtcgtacagcaactgagtttttgccagagctcaaggccagacagtctgagtctaaagcctgttctctaaactcctctgtttcactgattcaggcagtgaaatacatgggacagatgagctctatacttggttctgacttggtggtacaaagtctgttaacaccattttagccctatgttagctttgctaagccatttcttcaacctataatttcttagaataatgtttaaaagtattcttcctatagcatttggccctttccttttccgatgctaaaaatgttgatctttttacattcctgcctgccagacagcttttatacagaaaatagtacctgtggctttcctttggaggtgtttctcatcatttagaggaactccatttacaggagttcttacagagaaaccacatggtgcagatgtcagtaagaggtcatcaaacctgcctccatggctgtggagctatttatgcagagtttgcttcatttcagcttctgttcttattggagccaaaaaatgtacgttcaagtacttaaatttttcccattttatttcaatccttaaaactaactctttcataatatcagtgaattcattctttcaaaggagagagacagataaggaggatttctatacaattatcaaagtgatacataaattcccctgtggtaaaacaagcttatccatatatctagaataaataatgttatatactttgtgttaatcactaatgaatgttcttttcttaaagaataaattttcttttacaaataagtttataaggtttatcattcctttgtttcttataatctgtaatttaaaaataaaacctttttcagatcattgtaattttgttaatttaactgcctaaatattgaatcttatgtccatactctcttcccttgagcatttaaaaaatagaaagttcatgtcacttcatttacctccaagtcttgctctgatagaaatgtctggtacttccctggaattccatctcctgttctgttgcagttcttctgatagaattttttgcctttttattgttgtttgaaatcctgtgtctggtctgggaactcgatgttgaggtttcacatcactaaaatccactagggttggtatggttctgccaatgccaggatttaaatcagcatcaccaccaggactcataaaccctgaacaggaatcacctaaggtcacatcatcccgaagtggaaataatggataatgtggcccatatggtgggggataaggatcatgtaaatgatagtctggcaaaactgaagggggataagggtgaaatttaagaaaagcagggttgcatttcttttcaaacctgccatagttatgtctgttctcaagacctttcacaaaaggcatgttcatttttcttaagagatcacaatagtgtgggtaatctatattctcaacagttcctgaaaggatggaccttttagagatacttatctttccaggtgtgtcctgaatttctacatccatggcctttttctttagaatttttgataactataaagtatttctgataattcctttatatttaactatataaactctattgccaataactaaagatctgtgttaaactagtataaaattgacacagctttctaaatgttggcagataattttgtttttctttttaaggcaaatattttcctccaccaaaggaagaatagggcaatgaaggaacatgacataaggagaataaagcagagcccttgttgcctggcaacggctagaattcttaacacattgaaccatttattatgtacatcacaattcttaagaaaaacaaaaatagccttggtactaatatttccatgatacttttctccccagtgctcaggaaagctgtgttcatttacttattttaaaatttttccataagttggtattttatgggtataaaatatatttaaggagtgtaaataaagcagttaattcagtgacaatacatttctcaaaagtatatatgtgactacaattaagtatttatatatataacacttgctatctaattaaatgtaaatctaaatgcactacaaaatataaacattactaaagttaaattggtacatctaattttttttttttggtggagtctcactctgtcgcctaggctggagtgcagtggtgtgatcttggctcactgcaagctccgcctcccaggttcacgccattctcctgcctcagcctcccaagcagctgggactgcaggcgcccgccaccatgcccggctaattttttgtatttttagtagagatggggtttcactgtgttagccaggatggtctcgatctcctgaccttgtgatctgcccgcctcggcctcccaaagtgctgggattacaggtgtgagccactgtgcccagccctagtatatctaatttttaagaaaaacagaaaattataatgaaagtacaggtacatctttacatgccctaaattatctttacttcccttaaatttgccatggtgtccagagtaagaacagtaagagttttaagttcattttaggaaaccacaatgggtatcagttaactgtctacacacaaaatatcatttaaatcactaatgtattggttcacttaaaagctctttcacctggataatttcatcttgcatgaactactataagaggaaatgcaaatattagaatttggggtaaaagttcacatcatccttactgcagcaaaaatgttaaaacaggcaagattctagctttgaagagtcaggcacataatcgttaatcaggccaactgtcaagggtgatatgtttggtacaatcagaatgcctatgccccattgaaagtctttacaattttgagatatactattaaacaagtgagattaaattaggtggttaggctgtcagttttaaatccttcatccagatcatagcatatcaagtgacagtttttagtccacccatgatcactcatttcttcatatcaaaagtgataactcacttgtaattaggcattctacatttagttgctcaaacttcattcttcaatgtatttaaaccaactgcttaagatttatttctatcacagctctgctcccattaagtaaatccttccagcagcagaaaagtagaggcatgagtctctttcaatttctctaaaacaagttctagctataaatggcctcttaggctgtgtatgggaaaataataacccccataactttgtacttagaatggatcctttacaagagacagattaacaagagaaaaacagatgtttattaatatatttcatttatatatgaggaacacccagagaatgagtagttctcaaagaagcgtctttgaattccagcttgtatagcatcttcaacaaagactaggaaatttttagagatgtgacaaaggaaaaggactctgagtctctacaggcagtaacttgggctaagcaaacaaatagcagacaaaagatggtttaaaaaaagctaatattaattcctctgatatcattt

SEQ ID NO: 586219 - DNA, 4001 bp, Homo sapiens
gaggctgaggtgggaaggctgcttgaggccaggaattaaagactgcactgagccatgattgtgccactggactctagcctaggtgacaaagagaaaccttgtctcaaaaaaaaaaaaaaaaaaaaaaaattaacacacagtaaaagtttattgcaaaaccaaatagactcattctgcaaaaccacttagaaagttaactgtaattgaatcatgtcctctcagtttatcaatgagcaacagatatagtaagcagctcaattacatcattctatactctggagctaagtgataccgcttttaatctagtgtttactacaagaaaatgactgtcattattctgaactcctaaactaacatctagttaggacactacagaaactcctagaggcaaaggagcagccctgtcttagctgggcagattaaggacactcttttgactaattggatttaacaatccattaccatctttcaaaaggacaaaaggggtgcattttgtgttttaatctctttgataaagatacagcatttggggccgggcgcggaggctcacgcctgtaatcccagcactttgggaggctgaggcaggcagatcccgaggtcaggagatcgagaccatcccggccaacggggtgaaaccccgtctctactaaaaatacaaaaattaactgggcctgctggcgcgcaccagctactcgggaggctgaggcaggagaatcgcttaaacccaggaagcggaggctgcagtgagccgagatcgcactactgcactccagcctggcgacagagcgggactccgttaaaacaaacaacaaaaaaagatacagcatttgagccgggagcagtggctcacgcctgtaatcccagcactttcgtaggctgaggtgggttgatcacttgaggtcaggagttcgagaccagcctggccaacttggtgaaacccgtctctactaaaaatacaaaaattagctgagcatcctggtgcgcgcctgtaatcccagctactccggaggccgaggagggagaatcggttgaacccgggaggcggaggttccagtgagcccagattgcgccactgcactccagcctgacgacacagcgagactccgtctcaaaaaaaataaaaaataaaaaaaaatagaggttgaaagcatcaagttttgaatgcacaatagcttggcagaaaaactttcacttgaaaatttgatgagcaactcctggaaccttcaccaagcaatttttgaaatataccgagttttgccagaaaactcgtttttaactcaaataaggagccaagagaaatagtctgcttactcatgcttacacattttgggaaaaattacttgtataccagtgtctgactcattcctccaactctgaaaggtctgatgaggacttagcctctcggacttcgtgaggtggctaatttacggtttattcctggccttcctacctcctcagaaaagccaactagcagggctccacagcagggaccggccggcgaccatgtaatggaacaggagcgcagaaagaaaggggggcggactacgaaaagtcatcaaggaccacacaagctttaatacaaagattgcacaatgagcgcggggcgcggcacacaataagaagctctggaaacgcacactctctgacacctcaaagttttagggacttggatggctgcagaaaaatattggcaaagggattttctggggaggcaggaagaaaacggccgccctgcgaggcgacgaccaggcgcgggggacgaagggaccgctggacccacgcccaggccgggtcggcggggtcggcaatcctcaagggggaaatggggtccgaggcacgccccaggcagcgggccccgctcttcggcagctccactcaccaggaactggagcatgatgtcggtggggagggcgaggagggcgcgaaggactgcagcagctccgcgggccggtccgagcctacctccccatgcgcggggggggcggaacccctcgtcgacttccgggtcacgccacgccccgccccgctcctcccactcagcccgcgcccggaaacgacttgcagtgtcgcagcgcccaggttccccctggcggagcgcgttggcctcaccgcctgaaccggcggggcagcgagcgcgcgacaggacttgcgaagagcaagtcccgagcctggctgggcatccttgagcatcccgcctctgtaaacctgggccgaggcccaggaatctatattattctcagcacgcggactattctgatacacagcccagtttagggctctctaacctagaaggacggcatgagcagcgggtcccatccctaggttcgcagctgaatcgtgggggcttttgcagcatcctctacttgggcccagctggactttgcggggaggaaaggaggcttgtagctctcaaagctccgcaggtgtgctgtgtaatcagcgttgtgtaatcaggtgttgtgtaatcaaggtagaggctgggtaccgtatggggcccatgctgccgtgtgccgcacgccagtcactgagatgatgagttttgtagcagagaaaaggtttattcaccaggcagccagccgaggagacgggagaacagatctcaaatctgcctccccaaagatgggttttagggatatttatgggatagaggagcagggtggtctgaggtgtggggaaaggcggttgaaggtaaggaaaagtttggcaatgggttatctgcgcgaggtagtcaagcttcatggctctttataggatacatggtcacaaaatgacatccttagcatgatctgagtgtggaggttttggccctctaatgtcagaaggacacccatcgggctttcatgcaggcccagttgagaggttggtggtttaaactgtacaagaactgaccccaacttcctgaaaaacaagaaacctttatcaagcaacccagatgtcagagatgttatccataaggaagatagtgggagcttagatatatattgtttagctctgtgactttagctatgtgggttttttaatccactaaaagcaggtgactaaaaacaagtgagagaagttgcatttggcaggcctcatcaggttggctctcagtttcactggcctagctgggtttcttgcctgggatggccataggtcctgttgacaatttgtatcatcgccacaaagagtctgttctgtcagtcttccggtctgtgtatgtgtgtgtttttttctctctttctcttttaaagaatttattttaagcctattataccacacagtatgttttaaacactaactccctaataagatatataactccctaataagataaagcaaagacaaaaaaagttcatcttattagaaacaagatacaccatcccttattgtcttcaaaaattattgcactttaattttcataatttgacaaagcattcatgaaacaatctgcagactagttttaacagacaaataacacctgtaagcagacatgactgtcctaaattattaggtacgaattttacaaacttttttttttttttgagacggagtctcgctctgtcacccaggctggagtgcagtggcgcagtctcggctcactgcaagctccgcctcccgggttcacgccattctcctgcctcagcctcccgagtagctgggactacaggcgcccgccaccacgcccggctaattttctgtatttttagtagagacgaggtttcaacgtgttagccaggatggtctcgatctcctgaccttgtgatccgcccgcctcggcctcccaaagtgctgggattacaggcgtgagccaccacgcctggcccaaactttacttatattagtggtaacggtggagctggagagtatcacgccttctccaagctgcccagcaagaaccatcaatagtgtggtggaacttatggcactttccaaggccacagctcctttggcctgcagatgtcagcccacacatctccctctgcttgtggactggtttggtgatcgactgggtgtcagga

SEQ ID NO: 586220 - DNA, 4001 bp, Homo sapiens
tgatgataagtacatgccttaatgttaggaaagactaaaaaccatccaaatgtggtggacttcaacctgtcattgagcacactgaactatgttaactaaaatttattggatgtttagtaagtacataatagctcagtaaacatgttagtattatcattattatgtgtgcaaaacatactaagtgctttatgtgaattattattattttttaataatttcaacttttactttagattcaggtggtacttgtgcaggtttgcataatgccgatgtttggggtacaattaatcccatcacccaggtactgaatgtagtacccaatagttagtttttcaaccctgaccatccccctccctcccacttctagtagtccaaagtgtctgttgttataacccatctttatatccatgagtacccaatgtttaggtcccacttacaagtgagaacatgtggaattttgttttctgttcctgtgtcaatttacttaggataatggcctccaactgcattcatgttgctgcaaaggacaaaatttcattctttttaatggctgcagagtattcccatgatgtacatgtgccatattttctttatccagtcctatgtggactattttatttaattttcagaaatgctctctgaggcaagtactattatctccagtttaaagtaagcttagagaggttaacctgcttaggatcattagtagagccataaatcaaatcctgattctggggcctaggctctataccactgtagtatatggcatctttatcacactgaaaattttctttgtaagatcctctcaaagtaatgtagatctttaaacaaggcctttgttcatttgctgtggataggtagtggcagtctgaaacactggtaaagactgccgatcctggtgtgagtcagactaggtttgattccaggctgtaccacttaccagttataagacttacagcatataaatttaattctctgtgcctcagttttctatttgtaaaaatgggtaatgacacctatctcactaacttgtgagaattaacacatgtaaaatgtttataatactccccaatttacagtaaatgttcaaaaacacaagctactattatttgggttatgtcaaaatagcctaatacattctccattcctttattttctgatgaaagagtaaattccagaatagaaaaatttctctagccaacgatttcatgctcaaattcactgatacgctgcagtaattcattcaacacatgtttgagttccttctacatgtaaggcattgtgcttggcactggccatcttgttctgaggtaggggccaaatgaatgtggacaagttatgcaacttcaccataagaggcattctataataggtgattaattctgtttcagtctgagaaatggcttggatctcacagtttctctaggggtctctccctttatcaggccaatctaagacccagcagtgctgattcccttaaataatgattggcaaggtcttctaacacccaagcattgatcaaatgctgaataaaataaccctggatggtcagcaacagaatacactggtcattatttctctactagaagcataagcttatctttagacatgcaggctctccaaaatggctatgatcagctcggttgttaaaaacatgcctatttagtgagttgttaaactctttgatccccattataacctccaaggacctatcaatctatatgctgttctgttttatagttattattattcttgagcaatgagcatttggcatctgagagctctggaactctgtctttttgaatataatagcacagacttgaaagtaaaaacctgcttgctattctgaaagcctcttcttgctggttgcccaagtcaccactacaacttttttctcagcaggcaaaaagccctgattaccttttgtaggagaaaaaggattagtctaggaaaactcaccacttttgttttcatctcggagactgcatatcgtgaattgcgtaagtcactgagacgaataaatcattgagagaagctaatcaatgtccctggaagtttatatttcatcttctcttagatatctggtgtgctgaaataacacagggtttcctacaccttagcctcatttattttcagcatcagaaggacccttaatgacagggcctttatgaagcattagaaaattccagggccaatagatattctgaacagaaagtgctgacttgaaaattccctaaactgaggattgctgccgttacagctgcatgagctctgacattagttgttggtaaagtgcatggggtcagggttcaccatgaccttttcttcagctagaagagtaagggatgactgaccacagatacaacccagatactgtggtactgcccaagtatccagttcacagagatcctgcagtgctcacagctgctcacttcctattgggttggccatggaacccatgggtataaatcctttctgttttcatttccctgctgcaggtagtagttcttaaaagttcaggaggaaagggttccctttaagggtctgatgaagctttgcactttctttttagaaatatgcgcatatggagaatatcttgagtacaacttcagggaatttgaagactttctgaagtccatctcagcaccccgtggggtccaaacctcacaggtatgttgtttgaacaagtacagtttctggaatttatttttatggttttcacatcatatcctttcctaaagtgaccccttttcttacagaatctggaactcttgtcttagaaaaactacaagcagagactcctaagcaaagcttggtgtctaaattcctcttccccactttatttttccccagttaggttttttcaaaaactttttaatatggaaaatttcaaacatataaaatagtataacaaatccccatgagctcatgaactgattcaacaattaccagcttatggccaatttgatttcatttacatctatacctctcctcatattatttcatcagttagttactgaagtatgacatacgttctttccttattatcttgaatcaaaacctatatactaattcatttataaataccttatttacataagaaatcatgcaaattataagaaaagctacagtaccattttcaaacctaaaaacatcgagcaattcctcatatcatcatacagtgttcatatttccaatgatcttataaatgttattaaagtgttttaatggttcatttgattatatcagaattcaagtaaaatttccatgttatgatttcttggtatgtttctgaagtcacttttaatctatgaattctctctcctttctttctgcttgtaatttacttgttgaagacacaaggttgtttttcctatagaatctccttgagttggggttttgctggttgcatccccatggtgtagcttagtatatttcttgcatatgcttttcttctgactgtatttcccataaattattagctggatctagctttcttggatttaagtttgatttgtttgttgaggctatttcatcaaagtggtggtttgtatttctatcaggagttatctatctatttatttatttatttattttgagacagagtctcactctgtcccccaggctggagtgcagtggtgccatctcagctcactgcaacctcgcctcccaggttgaagagattcttctgcctcagcctcccaagtagctgggattacagatgcacaccaccacgcccagctaatttttttgtatttttattagagacagggtttcaccatgttggccaggctaatcttgaattcctgacctcaggtgatccacccacctcagcctcccagagttttgggactacaggtgtgagccactgtgcctggccttataaggagttatctctaattgtgagatgttagcagctattgttaatccattagttcatgaaaggttgcaaaatagtactattataattctatcatctcttctttatttattagctataa

SEQ ID NO: 586221 - DNA, 4001 bp, Homo sapiens
cacagaatgcaagcgactcatttgagttctcactttacaggccaagcaacaaacagacttaaaaaattaaatggaagtgtgatgccttaataagagtaaataattctgaagcatccttagggtgattcttactctttttatgtttaaaaatatctgactggaacatcctgccaattaaacgaagatctccagatggcatttacccttttgcttcataacaaaaaggatctgcaatcagttttatggaagattatctaaagaggaacattactgtaactcaatgacaacaaaaattagacactccccttctccgggatagaatgtgcatcctccagattcttgcactgacacctaaggtaataaatacttaaaactgaatcttaaataatagccgcaggatttcaaccgctaaagattcactgttactttccaccaaaaactcctgtattcagcactcagccaacaaaggacagcaagtaattcccagcagcataaataccgggaaagctaccttgggctttgtttttgttatgtaaaatgcattaaagtgactcatccacttaagattacctacctttagaagctttaaagaagctccaagaaccaaaataaatgctttcccagaatgccggataggctattcggtgcattaaaaaatatgtatatatttatatgtgccattgagtttgattctattttgctaagaaaggagagaattattatttttcattcccttcctgtggtgtgactatagctacctataagccctctatttccagaacagcagcgaggtttttaaaagttattttagaaatggtaaaaataaaagaaaatttgtaggagactggaaatagtccctccttcaaagaataggctctattcatttgaagaacagggaccgcgtgtctgccgacacttagatgtttcaaataatgggttggggaggttggatcgcgtggtcccagtacctgcgagccccctgcgtggacagcacgctcggccgcggggagccagcacgcgtctaatcggaaggctgtcaagtgcatccagtaacgtgggataaaacgagtttgggcactacagcaattaaagagcatctccgaggccaagtgcgggggaagtccacgctacctcggcaagcctgaaattacctgtttgtaaattacccaaccaaaacataactttttattgaactgggttgaatcagagcgggtgagctggctggaaacttttttccccagtacggctgcactctgaagtctagagaatcccgttagagacgggctgagacgccgcgagtcgtcggcgggcgcttcccgggacagtcggcccccagtgcccggccccgtggaggcgcccgagacgccggttcgggacgcattccagcggcgagcggcgcgcaccgcctgcccggcgtctccgcatccgagcctggctccccggccgctcgctccccacccccacgggcggaaaagccccgcgactcgggaaccgacccccacccccaactcccgcggcgcccctcggccggcgctccctgcccggcccgccgacttacgtgacggccgaagggaacggctcctccgacgaggggccgatgagcaaagattggaaaagtgtcagagtcaaggccagcaggcagccagcagccatcttcgcgatcgaagatcaatgccccctccctgcccaagcgggggaaggagcggcgctggaaaccgcgggcggaggaagagcagcacacgccgccgggaccgcgggcgtctggagggctggctgcgcccggggcccgaggcgcggagccgcgcgggggacggcaagggcgggagcggacgccgaggaaggggcggtggcgggcggacccactagcgtgcgtcggctgctccgcgccgcggccgccttgcctccgccgccatcaagggcgactttggaaacagacctcggcgagcccgccggcgctcgcgcgctctcgctctccctctcggtttcctccctgatttattcccccgattgccgaggcgaaggcggaggcgggggcgggggcggaggaggggtgacggcgctggagggtgggggtggctgcaggaatcggggaatggcaggcagagagacttgtggaagcgagaggctccgtctggcttcttaggcaagtcagagggaggcggctgggggtgggcagcgggagggctgggcgtcagagcagtcgggcggagacgggccgggagcagccctccatacaaggcagccaggaactcccaaagtcggcgccggctcgctcccgccgcccggcgtgcgcaggcggagcggaccagccccgcggggctcccgggggacggccagccgcccagcgggcatccacaggctgcagaggctccaacccaggacttggctcgcgtcttcgggggttatttttgcacatgcaggcagcgttcccccccagccctactcccaggcgcagaatccagtgcctgcctgggaatcgtgaagtgatttgacaacaaatgtaggaggggtttgtattgcattttaaagcaccactgttgactctctaccaggtggcactatatgcccgcgtgtgccataggttagagcctctgccggggctgggtgccctttgtgccagcggtcccacgcccaggtactgctcggctcacctggcgaggacagagcctcagggaccgggctgtggacggacagagaagtactgacgctgtaaaatcttcccagccctgtggttccattggacagaggggtggagggacgaattctgcatctagggaggacagtagtaagagaagcgctttgcagcatcccagttgggactacctccaaaagggtcctaacgccctgctctggccactggcctgccctgcctgacaaggttaccgcagggtgagctcacttttgtcaatgcgaaggcatgaaaagggtaagcagcaggaacaggtggcactctgagaaatgcgcctgaaatgtagaggaggaattaagggagggggagagagctagggagtagcaatgccggactggttttatctccagactcagaggaagcagtggcgggctttctccttgaaaagacagggtctgcgactaggcctctcccgcccaacacaggcctcctacaagagggccctggtgggccaaagatagaaatatattcttgcacaccttaaattcttaagctccctctagtagtgtatgagaatacttttgacatgacgtgcagagaatacaatttgtgatgactatcctgcatatgcaaaaattctgtaagtatcggggtggctgtcagatttttaattagcccgttcttatttttaggagatgcttctgaaagaaaaagacccttattaattcgaaatgaattttccagctctctgaaggcaatctcccaaaacaaagactaataataatactactactattaattactggccaaattttaagagcgtgtgtgattttatgatgcttagcctggtgaatttatttttccttcccacttatttctcctttttttaatgccttatttgttttctttatgttcttcgcatctctgtcttgctctttgtttctttctactctgagtggcctcacaaaaggcaccccaccgtgacttaacttagtttgttttatgctaggcatggatactgtggcagcaggagctgcgcaaatgagggatgaagtgggatgtaatgggattgagaactacagctcaggagggatattttatataactgaagatagcattccactccaaaattagataagtaaatagtcaaatccatcatttcttccatttttaataattcaaaagcagactttcttccccagcatgaggactaagaagagcagaattagagatgcccattattgtctatgtgatatgttggtatcaatagcctcactacctaaaaataccattgttatatattctgtcaattatttcaacatcaactccagacttcccactatggtacactgtttccaattttatatcttta

SEQ ID NO: 586222 - DNA, 4001 bp, Homo sapiens
tacacctatgaaaccaccaatagttagggtggagtggtatgcacagctttttacatgtcaattatacctcaaaaaataaaggttatctaaatgggggtaggagaatgtagggagactgaatttactctgaactacagttatagttgaagtcaactcaaaacctctccaaatttctaaaaatgcctcacacactgaagttaatatttcagaaaactaataaatgtctgtgcatgtaggtatgccttgagcagactacaatctctctggatctctaggtcttgtcacaaactgagggaactgttaccgatttctacagaaccttccaggttcagcattctattaaaaagatttcctagagtttgtattgtaaacatttaaccacttaggacaatttgagtcattactcgtgtctggtacagaacatcaggcccctggggtcttgttttgaaactcaagttggccagcctttcacctgaaacaaacttcttaccttttgggggagaataagcattttgttccccaaaaaagcatttggaaagcatttgttatgaagtgatcatgcaccaatcctttatctttcatcagtaatagtatatttcattaatcaggcctgcccagaccagaaattacttacccacaaacactttacaaagctgcatgccttctcggtgtttggatttgatgtcctggttgtatgacaatataggaaacgtattaatttaacttttttattcactgaggaaaatttctacccctcttaagtgaagacttcactctagctaagagaagtactcgggctccacctgtttcgcctagctacaacactcattcagaccctcggcaaacccagctctagcaatatcacgccaggctaggtggacaggaatgcaccagtgctgttggaaattaaagttgatgggagttgcattctaatccggccagagctgcgcctgccgggtgcaaccgcggcgcggccggcgctgtcggtctctgtctcacggatggtgagctgacagctcctgccagcccaggcggggaggaggagaagaggtgtccgctgcagccgcatacccggcgggtgaaagcaccgtcttgtccccaaagattcctctgccctcagagactaacaaaaatacggtgtcctgcgtttcgcagaaggacgggaggcgtcccagagctctcccgggagaaaaacccagggagaagtggtggtaggaggcgcccggtcccgcaactcaccttctgctgcctccgggccatgtcggtgggctgcttggcgttgaaggggtacgcgatgcacctcacgacgaagacgtagagctgcaggcggatcctccgctcctgctcatcgtccagctgccgctggggctcgtctcgcccctcgctgagcacagaggggctcgggctcacagatctggccgcgccgccgccgcccgcgcgccccggcgcgtcccgccgcccttcccgagtcggggctggaggagctcgctgcgagctgccggctgccaccagcacatcgcggctttcctcttccagcccctcgtccgactcctcttcgctggaagacgggtccagcatggtgctcggggatccccgccgctcggcccgcggtccccaagcgcctcacccccggcggctgcgcccgcgggtctgagggagccgcggggctggctgcagcggccgcagaacgaaaggaaaactggccagggctttccggacacgtcgagttagattcaggagtgtttcctaccaccagggcgaaaggggcgggcaggagccgggaggaggattgggaggggggagagggggagccgccgggactgaataggcggagttagcgttgggggtgagcttgggcgcctcaggaattgctccgccagccccgggcgcgccgacccagcggttccccagagcccgccggcagaggcggagccgcccgagcgcccggacgcaggtggggaacctgtggcgcctacaacaagcaacacgtggaattgaatgttgaagagccgcgcggggccgcggagtgcgcgtgcgcgcgccgccgctgctgcccgggcccgcctggagccctagcacacagtttgcaaaggcggggagcggccgagcgcgatggcccgtgtaagcgtccaccggggctgctccgactaccctcaccctaccacctgtgatcttttctccagcaggtggaggtggaatggggagcggggagggactgttccctagcaagaggttagggggagcggccgagacatctccccaacccgaatcggctgcctaggattgaaccccagcgcggaaaagcgggactggagcccttcaccacgaagtatctttgcgacaagactttgaaaagtctcactctgctctgctgccgttttgatactcatgctgaagcccaaattataaaagtcggagtaatgaaaaaaaaaagaaaaccaacgaggcttactttttaaactgttctagtcctgcagactcaaggcaagagagattttatatgtgcaaaatgatactgattcagctcaaacatatctcgattattttctgggttgggatgcagttgactcaaaacaggttgtgtagtgtggacatttattcaacaaagatttgagcgccctcccggtgtccagcactgttagccttttgcggagcccgcggtgactaaggcacatgacactcagtcgctggtggttctggcctcaagtcggcgtcttgtagctgcgctgaagcctgccttatctgcgcagatttctcagtcctagtgctggaaccacctaggagtttcttatagtaattctgtatcttatgtcctaagtcctgacagagggggaaataggcaaaacaatgcattcaacaccaggtggagtgtgcagcgaccaggtgggcagggaggtgatgaagttcagtggaaataacacagggcaaattaactaccagctctgagctcctctaccaccatggtcaaacagcagttttagctttttcaggccactttcatatagttaggtacacaagagagacttctgcacttactgacattctctctagatgggtaaaagacaaggaggcatttactcctgaggagtcttacctatttttctgcctaatccataacaggccccctagtaataaaaggtcttcagtaagagcatggctgtgggatgatcacaaactgccaagaaatagaaaatctcaaacacctatgtatttaaaggcaatgttttatttttggcaaggcaaacaaatagcaatcttgtcataatagctgatgcttatctagcactttgcaaagatctgtgaaattgtttaataccctcatcaaagtaatagctttctgaggcaggtagtattattattgattgccctttgaaccagatactgcactaagctctttacatacattatctcatttattttaggttccattgttcaaataaggaacctgagagttgaagaatcctttccttagggtacagaactagcacctaatggaataaggactcaaaacagttttctagttccaaatagtgtcattttctactgcaatttgccttgataataagacagtataataaatgtatgaggtttactaaactaataaaaatttctagggacataaatgtatgatttaaatatagcaactttactgcccttttcttgccaacaataggtatatttttcagttccttttattaatcaatattacttgatgtgatcacttattcttttcccattaaaggtggttattaagtcaaagatctccaagccttgaggatcccacaggaaaacatctaataatttttagagcagaatatacagtgttttctccatgaagatgaagatgacttaagaggcataaattaaagaaatatctaaaagacaacaaagagaatgtttaagcatcattaaacatacattgattaagaaactaacatatgctaaagctatactggatatatttaggaaaacaagatataggccgtaagaagtttatcagt

SEQ ID NO: 586223 - DNA, 4001 bp, Homo sapiens
ttcaaaatgagaaacagaagacgtatttatatcagctatttctttttaactttgagaatcatgaaacaaaacaactccaagattatctatgtgttcttataaactggttataatgaagatttcttgtttacttattgtgttgatgtagccaatgaataaacttagaacattttataatatgaccagatattattcttgggctatagttcataaaataaactacaggttagaggcattgaaccagaacaaatcctggctgatggatgttttgagttatgttaaaatattgagtagaaatgagtatccactgagaataccaacttaaactgtaaaggttttacaaatctaatcatcttagtttctctcataatactggtgtataaccagcaatctcaactttttaaagctgagttattttactactgaactcataggctagcaatatcctattagaaattacactttataaattccataatactaaaagcattcctactttgtccttaatggtaagtcaactggcccaaatacataaaatatttgctttctatgatcatttaagacagacttaaactcggacgctctgtaatttaaagattagctttaagaactacattgtaaaactttgacttattttgaacatttcaccttcaatcaccgaataatttcaacaaatagccttacatagataacttgattccggttaaccacagcctggaaatagtcagggtctccttaagatcggcaagtgaaaccctgcgttctcttcttgcatatgtcacatagtattaggttaaagctttcatatgaaacttttcttaggtagatttgccaaataaagtctgtatgatagtttactaatctcaattgtattgttgatttttgacttggacctcaaggaaaatgaatgttttgagaaaaggaattaatttgttacagcttttcttgatgtctttcacccaggcttgggaagagcatcatgaaaaagagtactcttttggaaactatgcacacaacatatttttcctaataggtgtgaagaatggctgctatgcataaatgattgttggaaaactattctctgtaaaacatgacttaacaagcaactccattcactactgtgctcatttccaatatccagaacaaccatgacacatcttatagatgctgatattatatgtttgtcagttaataaacaccctttgggaaaattcacaactttaacctccgtaattttcctacccaataagttggagaataaaacttttgagggaaaattgatatgaacaacatagtaaaagtcacaagaaatcaaacgattcttcaatacgaaaccataagttgttggctcttcccaggacacctatttttcttttttctttgacaagggtaaagtaaagcatctaagacctagctgaccctacatgagaaccacaagcaccgcaatcaaaccacatttctataatcaaaaagcaaggtgcctatagcacctgcactgttaaacatcccttggacaccccaaatcgttaagtcccgctcatttccaaacgctccttacctggaattctgtcactgggcggctgggcacagctcaatagaagcaaagggtgttcgcaggtgtggctccagggactcaggcgctcaagcttcagcgcccatctcctgggcaggagatgtcagccgcagggtgaggtgcggacgtgcgcacttctccaacccgggaaggtccgccagccgcgcggcgcagcccacccagacgctggtgggctggctttcctagtttgatgcgagagcaaactgcgttagtctcagtcctccctctccgcccctctcctggttttctgacactttaaatctgtcttaggtggttcagacccaagtctaggttgtattatcagctaaaagacaactgttctttcccctggcttgctttctacctccccagagtccaggaggctcaccttcccggcgccttcctgcgctctcccagctgtgaagctgtgcgcaaacttctcctgacttaagagtctcaatcctagcctgcgctcccgccccacccccgcccgcctcccgacaggcggcagaggaggtggcagcagaattgatgagagccagccccccttcccggaccccgccaccccagtcagccccctcctgtcccaggagagggaggggcgagctggtgagctccgtgcgcctcgcgccagccccagtcgccccggcccgcgagtggggctgcgctcgcggctgctgtctcgctccagtcagggctggggctcaccctgcgagtccgggagactaaagcgccgcgtaaacacaggaagcaggcgagggacccgagttagaccttgagtagggagggagaggggggcgacagtctggactgggagacagctttctgggagccctgtcccctccccggagaatgcaaattccggagggaggtgagtttccacaagaaccttatcccagagacattgtgaccctggcttcttcagccgccactccggggacagcactagggagcctgtggagggagggtcggtagtgggctaggtagtgaaagtggggtgaggacgtgggaagacggctggctaagagctggggtgctaaaaggaaaaaagtgctgagaggaaggagatgagaagagacaccttgggggtcaggcaagccctgggaaagcgtccggagttgggcggctgtaggctggaggcataacttggatttggagaaagagtgccctccgtgtaggggactgctggtgggcacagtgttttagggtgaatgaaaacagagaggatggcgagggaagacggggatatggggtgcctgacttggtgccggacactgcgactcctcttctttccccctaaagccctcgatgtcagcaggagtccgggacaatccaataccaggcggggcgcagcggaggctggcaggcacgccctgggaggcaggcaagttgattccaaggacgagtcaccctcaacctcttttagcccacaactgggtggatcaaggcaggagccaacacttttttccctaactctgtttaggcggtgttggactaagaaaacagcatccggtgcgtcccgggaccacaaggtggccgtgcaccgtcgaggttactaaacactgtctccttggcaaaagaaataatagcaatcatttaatgggaggggaagaaagccagacggcgacagcacactttccctggtgatcttaggttctcataagcacacgggacaacaccgggtgacagagaaggaggtgtcctgtgaatggaactgcagccctcacccaaccatccttggagctcttccatggaaacatcagtgactgtaggcaaaaaatgtccccgttttattttgcatgctcctgttttattttgaatcctcataccccaccccagagagacaacagggacccctaatttgtgtggttgaggctttcaggagatccagtggaggacagactcaaggatcagatcagctctcccacccaacattccagggattttgtttttccaggctccctcctctatatactccccccttccctgtcacctccagtctggtgacccagagggctgtgtgtgactcactgtgcattcaaaccctaaggcactgcctcactgcagaggaagattgtacagtcccttcattcccaggataagtgagaatgatgttgttagcagtaagaaatgtgactaggaaaggaggctgggcaactgggagacaaggaggctttgaaaggaacatacacacacacacacacacacacacacacacacacacacacacacacacacacacacacacagacacagtaacttaaacaaagcctgtataagaaacccttccgaattcagaacttagataggaatcttcactccgtgctgggttgggctcaatctgtcttgagttcaatagctccctgctttccaactgctcctgaccagccaacacttgaccatgacctcctttaagaattctcttttg
